United States Patent Application Publication US 2026/0226133 A1 - sequence listing, part 9

SEQ ID NO: 15983 - protein, 859 aa, synthetic construct
MALPVTALLLPLALLLHAARPEVQLVESGGGLVQPGGSLRLSCAASGFSFSDFWMSWVRQAPGKGLEWVATISQAGSEKDYVDSVKGRFTISRDNAKKSLYLQMNSLRAEDTAVYYCASGVYSFDYRGQGTLVTVSSGTGGGGSGGGGSGGGGSEFEIVLTQSPGTLSLSPGETAIISCRTSQYGSLAWYQQRPGQAPRLVIYSGSTRAAGIPDRFSGSRWGPDYNLTISNLESGDFGVYYCQQYEFFGQGTKVQVDIKRLEIQNPDPAVYQLRDSKSSDKSVCLFTDFDSQTNVSQSKDSDVYITDKCVLDMRSMDFKSNSAVAWSNKSDFACANAFNNSIIPEDTFFPSPESSDSTDHVKPKETENTKQPSKSCHKPKAIVHTEKVNMMSLTVLGLRMLFAKTVAVNFLLTAKLFFLRAKRSGSGVKQTLNFDLLKLAGDVESNPGPTSMDWIWRILFLVGAATGAHSFEQVQLVQSGGQMKKPGESMRISCRASGYEFIDCTLNWIRLAPGKRPEWMGWLKPRGGAVNYARPLQGRVTMTRDVYSDTAFLELRSLTVDDTAVYFCTRGKNCDYNWDFEHWGRGTPVIVSSTREDLKNVFPPEVAVFEPSEAEISHTQKATLVCLATGFYPDHVELSWWVNGKEVHSGVCTDPQPLKEQPALNDSRYCLSSRLRVSATFWQNPRNHFRCQVQFYGLSENDEWTQDRAKPVTQIVSAEAWGRADDVIKIHWQEKKSNTILGSQEGNTMKTNDTYMKFSWLTVPEKSLDKEHRCIVRHENNKNGVDQEIIFPPIKTDVITMDPKDNCSKDANDTLLLQLTNTSAYYMYLLLLLKSVVYFAIITCCLLRRTAFCCNGEKS

SEQ ID NO: 15984 - protein, 869 aa, synthetic construct
MALPVTALLLPLALLLHAARPEVQLVESGGGLVQPGGSLRLSCAASGFSFSDFWMSWVRQAPGKGLEWVATISQAGSEKDYVDSVKGRFTISRDNAKKSLYLQMNSLRAEDTAVYYCASGVYSFDYRGQGTLVTVSSGTGGGGSGGGGSGGGGSEFELVLTQSPGTLSLSAGERATLSCRASQSVSSGSLAWYQQKPGQAPRLLIYGASTRATGIPDRFSGSGSGTDFTLTIGRLEPEDLAVYYCQQYGTSPYTFGQGTKLEILEIQNPDPAVYQLRDSKSSDKSVCLFTDFDSQTNVSQSKDSDVYITDKCVLDMRSMDFKSNSAVAWSNKSDFACANAFNNSIIPEDTFFPSPESSDSTDHVKPKETENTKQPSKSCHKPKAIVHTEKVNMMSLTVLGLRMLFAKTVAVNFLLTAKLFFLRAKRSGSGVKQTLNFDLLKLAGDVESNPGPTSMDWIWRILFLVGAATGAHSFELEQSGAEVKKPGSSVQVSCKASGGTFSMYGFNWVRQAPGHGLEWMGGIIPIFGTSNYAQKFRGRVTFTADQATSTAYMELTNLRSDDTAVYYCARDFGPDWEDGDSYDGSGRGFFDFWGQGTLVTVSSTREDLKNVFPPEVAVFEPSEAEISHTQKATLVCLATGFYPDHVELSWWVNGKEVHSGVCTDPQPLKEQPALNDSRYCLSSRLRVSATFWQNPRNHFRCQVQFYGLSENDEWTQDRAKPVTQIVSAEAWGRADDVIKIHWQEKKSNTILGSQEGNTMKTNDTYMKFSWLTVPEKSLDKEHRCIVRHENNKNGVDQEIIFPPIKTDVITMDPKDNCSKDANDTLLLQLTNTSAYYMYLLLLLKSVVYFAIITCCLLRRTAFCCNGEKS

SEQ ID NO: 15985 - protein, 849 aa, synthetic construct
MALPVTALLLPLALLLHAARPEVQLVESGGGLVQPGGSLRLSCAASGFSFSDFWMSWVRQAPGKGLEWVATISQAGSEKDYVDSVKGRFTISRDNAKKSLYLQMNSLRAEDTAVYYCASGVYSFDYRGQGTLVTVSSGTGGGGSGGGGSGGGGSEFDIQMTQSPSSLSASVGDRVTITCQASQDINNYLNWYQQKPGKAPKLLIYDASNLQTGVPSRFSGSGSGTDFTFTIEDIATYYCQQYTFGPGTKVDIKLEIQNPDPAVYQLRDSKSSDKSVCLFTDFDSQTNVSQSKDSDVYITDKCVLDMRSMDFKSNSAVAWSNKSDFACANAFNNSIIPEDTFFPSPESSDSTDHVKPKETENTKQPSKSCHKPKAIVHTEKVNMMSLTVLGLRMLFAKTVAVNFLLTAKLFFLRAKRSGSGVKQTLNFDLLKLAGDVESNPGPTSMDWIWRILFLVGAATGAHSFEEVQLLESGGGLVQPGGSLRLSCAASGFTFSWYSMTWVRQAPGKGLEWVSSIVPWGDFTQYADSVKGRFTISRDNSKNTLYLQMNSLRAEDTAVYYCAKGPGWGSFDLWGRGTLVTVSSTREDLKNVFPPEVAVFEPSEAEISHTQKATLVCLATGFYPDHVELSWWVNGKEVHSGVCTDPQPLKEQPALNDSRYCLSSRLRVSATFWQNPRNHFRCQVQFYGLSENDEWTQDRAKPVTQIVSAEAWGRADDVIKIHWQEKKSNTILGSQEGNTMKTNDTYMKFSWLTVPEKSLDKEHRCIVRHENNKNGVDQEIIFPPIKTDVITMDPKDNCSKDANDTLLLQLTNTSAYYMYLLLLLKSVVYFAIITCCLLRRTAFCCNGEKS

SEQ ID NO: 15986 - protein, 859 aa, synthetic construct
MALPVTALLLPLALLLHAARPEVQLVESGGGLVQPGGSLRLSCAASGFSFSDFWMSWVRQAPGKGLEWVATISQAGSEKDYVDSVKGRFTISRDNAKKSLYLQMNSLRAEDTAVYYCASGVYSFDYRGQGTLVTVSSGTGGGGSGGGGSGGGGSEFDIQMTQSPSSLSASVGDRVTITCTASLSVSSTYLHWYQQKPGSSPKLWIYSTSNLASGVPSRFSGSGSGTSYTLTISSLQPEDFATYYCHQYHRSPLTFGGGTKVEIKRLEIQNPDPAVYQLRDSKSSDKSVCLFTDFDSQTNVSQSKDSDVYITDKCVLDMRSMDFKSNSAVAWSNKSDFACANAFNNSIIPEDTFFPSPESSDSTDHVKPKETENTKQPSKSCHKPKAIVHTEKVNMMSLTVLGLRMLFAKTVAVNFLLTAKLFFLRAKRSGSGVKQTLNFDLLKLAGDVESNPGPTSMDWIWRILFLVGAATGAHSFEEVQLVESGGGLVQPGGSLRLSCAASGFSLTKYGVHWVRQAPGKGLEWVGVKWAGGSTDYNSALMSRFTISKDNAKNSLYLQMNSLRAEDTAVYYCARDHRDAMDYWGQGTLVTVSSTREDLKNVFPPEVAVFEPSEAEISHTQKATLVCLATGFYPDHVELSWWVNGKEVHSGVCTDPQPLKEQPALNDSRYCLSSRLRVSATFWQNPRNHFRCQVQFYGLSENDEWTQDRAKPVTQIVSAEAWGRADDVIKIHWQEKKSNTILGSQEGNTMKTNDTYMKFSWLTVPEKSLDKEHRCIVRHENNKNGVDQEIIFPPIKTDVITMDPKDNCSKDANDTLLLQLTNTSAYYMYLLLLLKSVVYFAIITCCLLRRTAFCCNGEKS

SEQ ID NO: 15987 - protein, 863 aa, synthetic construct
MALPVTALLLPLALLLHAARPEVQLVESGGGLVQPGGSLRLSCAASGFSFSDFWMSWVRQAPGKGLEWVATISQAGSEKDYVDSVKGRFTISRDNAKKSLYLQMNSLRAEDTAVYYCASGVYSFDYRGQGTLVTVSSGTGGGGSGGGGSGGGGSEFDIQMTQSPSSLSASVGDRVTITCKASQDVGTAVAWYQQKPGKAPKLLIYSASYRSTGVPSRFSGSGSGTDFTLTISSLQPEDFATYYCQHHYSAPWTFGGGTKVEIKLEIQNPDPAVYQLRDSKSSDKSVCLFTDFDSQTNVSQSKDSDVYITDKCVLDMRSMDFKSNSAVAWSNKSDFACANAFNNSIIPEDTFFPSPESSDSTDHVKPKETENTKQPSKSCHKPKAIVHTEKVNMMSLTVLGLRMLFAKTVAVNFLLTAKLFFLRAKRSGSGVKQTLNFDLLKLAGDVESNPGPTSMDWIWRILFLVGAATGAHSFEEVQLVESGGGLVQPGGSLRLSCAASGFTFSRNGMSWVRQAPGKGLEWVATVSSGGSYIYYADSVKGRFTISRDNAKNSLYLQMNSLRAEDTAVYYCARQGTTALATRFFDVWGQGTLVTVSSTREDLKNVFPPEVAVFEPSEAEISHTQKATLVCLATGFYPDHVELSWWVNGKEVHSGVCTDPQPLKEQPALNDSRYCLSSRLRVSATFWQNPRNHFRCQVQFYGLSENDEWTQDRAKPVTQIVSAEAWGRADDVIKIHWQEKKSNTILGSQEGNTMKTNDTYMKFSWLTVPEKSLDKEHRCIVRHENNKNGVDQEIIFPPIKTDVITMDPKDNCSKDANDTLLLQLTNTSAYYMYLLLLLKSVVYFAIITCCLLRRTAFCCNGEKS

SEQ ID NO: 15988 - protein, 859 aa, synthetic construct
MALPVTALLLPLALLLHAARPEVQLVESGGGLVQPGGSLRLSCAASGFSFSDFWMSWVRQAPGKGLEWVATISQAGSEKDYVDSVKGRFTISRDNAKKSLYLQMNSLRAEDTAVYYCASGVYSFDYRGQGTLVTVSSGTGGGGSGGGGSGGGGSEFDIQMTQSPPSLSASVGGKVTITCKASQDIDRYMAWYQDKPGKGPKLLIHDTSTLQPGIPSRFSGSGSGRDYSFSISNLEPEDIATYYCLQYDNLWTFGGGTKLEIKRLEIQNPDPAVYQLRDSKSSDKSVCLFTDFDSQTNVSQSKDSDVYITDKCVLDMRSMDFKSNSAVAWSNKSDFACANAFNNSIIPEDTFFPSPESSDSTDHVKPKETENTKQPSKSCHKPKAIVHTEKVNMMSLTVLGLRMLFAKTVAVNFLLTAKLFFLRAKRSGSGVKQTLNFDLLKLAGDVESNPGPTSMDWIWRILFLVGAATGAHSFEQVQLVQSGAELVKPGASVKMSCKASGYIFTNYNIHWVKKSPGQGLEWIGAIYPGNGDAPYSQKFQDRATLTADTSSSTTYMELSSLTSEDSAVYYCVRANWDVAFAYWGQGTLVSVSSTREDLKNVFPPEVAVFEPSEAEISHTQKATLVCLATGFYPDHVELSWWVNGKEVHSGVCTDPQPLKEQPALNDSRYCLSSRLRVSATFWQNPRNHFRCQVQFYGLSENDEWTQDRAKPVTQIVSAEAWGRADDVIKIHWQEKKSNTILGSQEGNTMKTNDTYMKFSWLTVPEKSLDKEHRCIVRHENNKNGVDQEIIFPPIKTDVITMDPKDNCSKDANDTLLLQLTNTSAYYMYLLLLLKSVVYFAIITCCLLRRTAFCCNGEKS

SEQ ID NO: 15989 - protein, 860 aa, synthetic construct
MALPVTALLLPLALLLHAARPEVQLVESGGGLVQPGGSLRLSCAASGFSFSDFWMSWVRQAPGKGLEWVATISQAGSEKDYVDSVKGRFTISRDNAKKSLYLQMNSLRAEDTAVYYCASGVYSFDYRGQGTLVTVSSGTGGGGSGGGGSGGGGSEFDIQMTQSPASLSASVGETVTITCRVSGNIHNYLAWYQQKQGKSPQLLVYNAKTLADGVPSRFSGSGSGTQYSLKINSLQPEDFGSYYCQHFWSNPYTFGGGTKLEIKLEIQNPDPAVYQLRDSKSSDKSVCLFTDFDSQTNVSQSKDSDVYITDKCVLDMRSMDFKSNSAVAWSNKSDFACANAFNNSIIPEDTFFPSPESSDSTDHVKPKETENTKQPSKSCHKPKAIVHTEKVNMMSLTVLGLRMLFAKTVAVNFLLTAKLFFLRAKRSGSGVKQTLNFDLLKLAGDVESNPGPTSMDWIWRILFLVGAATGAHSFEQVQLQQSGASVKVSCKASELVRPGTGYAFTNYLIEWVKQRPGQGLEWIGVINPGSGGTNYNEKFKGKATLTADKSSSTAYMQLSSLTSDDSAVYFCARYRSYDWYFDVWGAGTTVTVSSTREDLKNVFPPEVAVFEPSEAEISHTQKATLVCLATGFYPDHVELSWWVNGKEVHSGVCTDPQPLKEQPALNDSRYCLSSRLRVSATFWQNPRNHFRCQVQFYGLSENDEWTQDRAKPVTQIVSAEAWGRADDVIKIHWQEKKSNTILGSQEGNTMKTNDTYMKFSWLTVPEKSLDKEHRCIVRHENNKNGVDQEIIFPPIKTDVITMDPKDNCSKDANDTLLLQLTNTSAYYMYLLLLLKSVVYFAIITCCLLRRTAFCCNGEKS

SEQ ID NO: 15990 - protein, 859 aa, synthetic construct
MALPVTALLLPLALLLHAARPEVQLVESGGGLVQPGGSLRLSCAASGFSFSDFWMSWVRQAPGKGLEWVATISQAGSEKDYVDSVKGRFTISRDNAKKSLYLQMNSLRAEDTAVYYCASGVYSFDYRGQGTLVTVSSGTGGGGSGGGGSGGGGSEFDIQMTQSFSSLSASVGDRVTITCRASQDISNYLNWYQQKPGKAPKLLIYYTSRLHSGVPSRFSGSGSGTDYTLTISSLQPEDFATYFCQQGNTLPWTFGGGTKLEIKRLEIQNPDPAVYQLRDSKSSDKSVCLFTDFDSQTNVSQSKDSDVYITDKCVLDMRSMDFKSNSAVAWSNKSDFACANAFNNSIIPEDTFFPSPESSDSTDHVKPKETENTKQPSKSCHKPKAIVHTEKVNMMSLTVLGLRMLFAKTVAVNFLLTAKLFFLRAKRSGSGVKQTLNFDLLKLAGDVESNPGPTSMDWIWRILFLVGAATGAHSFEEVQLVQSGGGLVQSGGSLRLSCRASGYTFTRYWMLWVRQRPGKGLEWVAEINPRNDRTNYNEKFKTRFTISVDRSKNTLYLQMDSLRAEDTAVYFCALGGGYAMDYWGQGTLVTVSSTREDLKNVFPPEVAVFEPSEAEISHTQKATLVCLATGFYPDHVELSWWVNGKEVHSGVCTDPQPLKEQPALNDSRYCLSSRLRVSATFWQNPRNHFRCQVQFYGLSENDEWTQDRAKPVTQIVSAEAWGRADDVIKIHWQEKKSNTILGSQEGNTMKTNDTYMKFSWLTVPEKSLDKEHRCIVRHENNKNGVDQEIIFPPIKTDVITMDPKDNCSKDANDTLLLQLTNTSAYYMYLLLLLKSVVYFAIITCCLLRRTAFCCNGEKS

SEQ ID NO: 15991 - protein, 860 aa, synthetic construct
MALPVTALLLPLALLLHAARPEVQLVESGGGLVQPGGSLRLSCAASGFSFSDFWMSWVRQAPGKGLEWVATISQAGSEKDYVDSVKGRFTISRDNAKKSLYLQMNSLRAEDTAVYYCASGVYSFDYRGQGTLVTVSSGTGGGGSGGGGSGGGGSEFDIQMTQSPASLSASVGETVTIICRASVNIYSYLAWYQQKQGKSPQLLVYNAKILAEGVPSRFSGSGSGTQFSLKINSLQPEDFGSYYCQHHYGTFTFGSGTKLEIKRLEIQNPDPAVYQLRDSKSSDKSVCLFTDFDSQTNVSQSKDSDVYITDKCVLDMRSMDFKSNSAVAWSNKSDFACANAFNNSIIPEDTFFPSPESSDSTDHVKPKETENTKQPSKSCHKPKAIVHTEKVNMMSLTVLGLRMLFAKTVAVNFLLTAKLFFLRAKRSGSGVKQTLNFDLLKLAGDVESNPGPTSMDWIWRILFLVGAATGAHSFEQVQLKESGPGLVAPSQSLSITCTISGFSLTSYGVHWVRQPPGKGLEWLVVIWSDGSTTYNSALKSRLSISKDNSKSQVFLKMNSLQTDDTAIYYCASHYGSTLAFASWGHGTLVTVSAATREDLKNVFPPEVAVFEPSEAEISHTQKATLVCLATGFYPDHVELSWWVNGKEVHSGVCTDPQPLKEQPALNDSRYCLSSRLRVSATFWQNPRNHFRCQVQFYGLSENDEWTQDRAKPVTQIVSAEAWGRADDVIKIHWQEKKSNTILGSQEGNTMKTNDTYMKFSWLTVPEKSLDKEHRCIVRHENNKNGVDQEIIFPPIKTDVITMDPKDNCSKDANDTLLLQLTNTSAYYMYLLLLLKSVVYFAIITCCLLRRTAFCCNGEKS

SEQ ID NO: 15992 - protein, 868 aa, synthetic construct
MALPVTALLLPLALLLHAARPEVQLVESGGGLVQPGGSLRLSCAASGFSFSDFWMSWVRQAPGKGLEWVATISQAGSEKDYVDSVKGRFTISRDNAKKSLYLQMNSLRAEDTAVYYCASGVYSFDYRGQGTLVTVSSGTGGGGSGGGGSGGGGSEFDIVMTQSHKFMSTSVGDRVSVTCKASQNVGNNVAWYQQKPGQSPKVLIYSASYRYSGVPDRFTGSGSGTDFTLTISNVQSEDLAEYFCQQYNTYPFTFGSGTKLEIKLEIQNPDPAVYQLRDSKSSDKSVCLFTDFDSQTNVSQSKDSDVYITDKCVLDMRSMDFKSNSAVAWSNKSDFACANAFNNSIIPEDTFFPSPESSDSTDHVKPKETENTKQPSKSCHKPKAIVHTEKVNMMSLTVLGLRMLFAKTVAVNFLLTAKLFFLRAKRSGSGVKQTLNFDLLKLAGDVESNPGPTSMDWIWRILFLVGAATGAHSFEEVQLEESGGGLVQPGGSMKLSCVASGFTFSNYWMNWVRQSPEKGLEWVAEIRFKSHNYATHFAESVKGRFTISRDDSKSSVYLQMNNLRAEDTGIYYCTRRIGNSDYDWWYFDVWGAGTSVTVSSASTREDLKNVFPPEVAVFEPSEAEISHTQKATLVCLATGFYPDHVELSWWVNGKEVHSGVCTDPQPLKEQPALNDSRYCLSSRLRVSATFWQNPRNHFRCQVQFYGLSENDEWTQDRAKPVTQIVSAEAWGRADDVIKIHWQEKKSNTILGSQEGNTMKTNDTYMKFSWLTVPEKSLDKEHRCIVRHENNKNGVDQEIIFPPIKTDVITMDPKDNCSKDANDTLLLQLTNTSAYYMYLLLLLKSVVYFAIITCCLLRRTAFCCNGEKS

SEQ ID NO: 15993 - protein, 861 aa, synthetic construct
MALPVTALLLPLALLLHAARPEVQLVESGGGLVQPGGSLRLSCAASGFSFSDFWMSWVRQAPGKGLEWVATISQAGSEKDYVDSVKGRFTISRDNAKKSLYLQMNSLRAEDTAVYYCASGVYSFDYRGQGTLVTVSSGTGGGGSGGGGSGGGGSEFDQIVLTQSPAIMSASPGEKVTISCSASSSVSYMYWYQQKPGSSPKPWIYRTSNLASGVPARFSGSGSGTSYSLTISNMEAEDAAAYYCQQYHSYPTTFGGGTKLEVKLEIQNPDPAVYQLRDSKSSDKSVCLFTDFDSQTNVSQSKDSDVYITDKCVLDMRSMDFKSNSAVAWSNKSDFACANAFNNSIIPEDTFFPSPESSDSTDHVKPKETENTKQPSKSCHKPKAIVHTEKVNMMSLTVLGLRMLFAKTVAVNFLLTAKLFFLRAKRSGSGVKQTLNFDLLKLAGDVESNPGPTSMDWIWRILFLVGAATGAHSFEEVQLVESGGGLVQPKGSLKLSCAASGFSFNTYAMNWVRQAPGKGLEWIAHIRSKSNNFATYYADSVKDRFSISRDASENILFLQMNNLKTEDTAMYYCVRQGGDFPMDYWGQGTSVTVSSTREDLKNVFPPEVAVFEPSEAEISHTQKATLVCLATGFYPDHVELSWWVNGKEVHSGVCTDPQPLKEQPALNDSRYCLSSRLRVSATFWQNPRNHFRCQVQFYGLSENDEWTQDRAKPVTQIVSAEAWGRADDVIKIHWQEKKSNTILGSQEGNTMKTNDTYMKFSWLTVPEKSLDKEHRCIVRHENNKNGVDQEIIFPPIKTDVITMDPKDNCSKDANDTLLLQLTNTSAYYMYLLLLLKSVVYFAIITCCLLRRTAFCCNGEKS

SEQ ID NO: 15994 - protein, 860 aa, synthetic construct
MALPVTALLLPLALLLHAARPEVQLVESGGGLVQPGGSLRLSCAASGFSFSDFWMSWVRQAPGKGLEWVATISQAGSEKDYVDSVKGRFTISRDNAKKSLYLQMNSLRAEDTAVYYCASGVYSFDYRGQGTLVTVSSGTGGGGSGGGGSGGGGSEFDDIQMTQSSSSFSVSLGDRVTITCMASEDIYIRLAWYQQKPGNAPRLLISAATSLETGVPSRFSGSGSGKDYTLSITSLQTEDVGTYYCQQYWSSPWTFGGGTKLEINLEIQNPDPAVYQLRDSKSSDKSVCLFTDFDSQTNVSQSKDSDVYITDKCVLDMRSMDFKSNSAVAWSNKSDFACANAFNNSIIPEDTFFPSPESSDSTDHVKPKETENTKQPSKSCHKPKAIVHTEKVNMMSLTVLGLRMLFAKTVAVNFLLTAKLFFLRAKRSGSGVKQTLNFDLLKLAGDVESNPGPTSMDWIWRILFLVGAATGAHSFEDVQLQESGPGLVKPSQSLSLTCTVTGYSITSDYTWNWIRQFPGNKLEWMGYITYSGSTSYNPSLKSRNSITRDTSKNQFFLQLNSVTTEDTATYYCARLGRRYTMDYWGQGTSVTVSSTREDLKNVFPPEVAVFEPSEAEISHTQKATLVCLATGFYPDHVELSWWVNGKEVHSGVCTDPQPLKEQPALNDSRYCLSSRLRVSATFWQNPRNHFRCQVQFYGLSENDEWTQDRAKPVTQIVSAEAWGRADDVIKIHWQEKKSNTILGSQEGNTMKTNDTYMKFSWLTVPEKSLDKEHRCIVRHENNKNGVDQEIIFPPIKTDVITMDPKDNCSKDANDTLLLQLTNTSAYYMYLLLLLKSVVYFAIITCCLLRRTAFCCNGEKS

SEQ ID NO: 15995 - protein, 863 aa, synthetic construct
MALPVTALLLPLALLLHAARPEVQLVESGGGLVQPGGSLRLSCAASGFSFSDFWMSWVRQAPGKGLEWVATISQAGSEKDYVDSVKGRFTISRDNAKKSLYLQMNSLRAEDTAVYYCASGVYSFDYRGQGTLVTVSSGTGGGGSGGGGSGGGGSEFDDIQMTQSPSSLSASVGDRVTITCRASQSISSYLNWYQQKPGKAPKLLIYDASNLETGVPSRFSGSGSGTDFTFTISSLQPEDIATYYCQQYDNLPLTFGGGTKVDIKRLEIQNPDPAVYQLRDSKSSDKSVCLFTDFDSQTNVSQSKDSDVYITDKCVLDMRSMDFKSNSAVAWSNKSDFACANAFNNSIIPEDTFFPSPESSDSTDHVKPKETENTKQPSKSCHKPKAIVHTEKVNMMSLTVLGLRMLFAKTVAVNFLLTAKLFFLRAKRSGSGVKQTLNFDLLKLAGDVESNPGPTSMDWIWRILFLVGAATGAHSFEQVQLVESGGGVVQPGRSLRLSCAASGFTFSSYAMHWVRQAPGKGLEWVAVISYDGSNKYYADSVKGRFTISRDNSKNTLYLQMNSLRAEDTAVYYCARAHNSSSWSFDYWGQGTLVTVSSTREDLKNVFPPEVAVFEPSEAEISHTQKATLVCLATGFYPDHVELSWWVNGKEVHSGVCTDPQPLKEQPALNDSRYCLSSRLRVSATFWQNPRNHFRCQVQFYGLSENDEWTQDRAKPVTQIVSAEAWGRADDVIKIHWQEKKSNTILGSQEGNTMKTNDTYMKFSWLTVPEKSLDKEHRCIVRHENNKNGVDQEIIFPPIKTDVITMDPKDNCSKDANDTLLLQLTNTSAYYMYLLLLLKSVVYFAIITCCLLRRTAFCCNGEKS

SEQ ID NO: 15996 - protein, 872 aa, synthetic construct
MALPVTALLLPLALLLHAARPEVQLVESGGGLVQPGGSLRLSCAASGFSFSDFWMSWVRQAPGKGLEWVATISQAGSEKDYVDSVKGRFTISRDNAKKSLYLQMNSLRAEDTAVYYCASGVYSFDYRGQGTLVTVSSGTGGGGSGGGGSGGGGSEFDDVVMTQSPLSLPVSLGDQASISCRSSQRLVHSNGNTYLHWYLQKPGQSPKLLIYRVSNRFPGVPDRFSGSGSGTDFTLKISRVEAEDLGIYFCSQSTHVPYTFGGGTKLEIKRLEIQNPDPAVYQLRDSKSSDKSVCLFTDFDSQTNVSQSKDSDVYITDKCVLDMRSMDFKSNSAVAWSNKSDFACANAFNNSIIPEDTFFPSPESSDSTDHVKPKETENTKQPSKSCHKPKAIVHTEKVNMMSLTVLGLRMLFAKTVAVNFLLTAKLFFLRAKRSGSGVKQTLNFDLLKLAGDVESNPGPTSMDWIWRILFLVGAATGAHSFEEVRLQQSGPDLIKPGASVKMSCKASGYTFTGYVMHWVKQRPGQGLEWIGFINPYNDDIQSNERFRGKATLTSDKSSTTAYMELSSLTSEDSAVYYCARGAGYNFDGAYRFFDFWGQGTTLTVSSTREDLKNVFPPEVAVFEPSEAEISHTQKATLVCLATGFYPDHVELSWWVNGKEVHSGVCTDPQPLKEQPALNDSRYCLSSRLRVSATFWQNPRNHFRCQVQFYGLSENDEWTQDRAKPVTQIVSAEAWGRADDVIKIHWQEKKSNTILGSQEGNTMKTNDTYMKFSWLTVPEKSLDKEHRCIVRHENNKNGVDQEIIFPPIKTDVITMDPKDNCSKDANDTLLLQLTNTSAYYMYLLLLLKSVVYFAIITCCLLRRTAFCCNGEKS

SEQ ID NO: 15997 - protein, 863 aa, synthetic construct
MALPVTALLLPLALLLHAARPEVQLVESGGGLVQPGGSLRLSCAASGFSFSDFWMSWVRQAPGKGLEWVATISQAGSEKDYVDSVKGRFTISRDNAKKSLYLQMNSLRAEDTAVYYCASGVYSFDYRGQGTLVTVSSGTGGGGSGGGGSGGGGSEFDSYELTQPPSVSVSPGQTATISCSGDQLGGKYGHWYQKKPGQSPVLVLYQDRKRPAGIPERFSGSSSGNTITLTISGTQAVDEADYYCQAWDTNLGGVFGGGTKVTVLGQLEIQNPDPAVYQLRDSKSSDKSVCLFTDFDSQTNVSQSKDSDVYITDKCVLDMRSMDFKSNSAVAWSNKSDFACANAFNNSIIPEDTFFPSPESSDSTDHVKPKETENTKQPSKSCHKPKAIVHTEKVNMMSLTVLGLRMLFAKTVAVNFLLTAKLFFLRAKRSGSGVKQTLNFDLLKLAGDVESNPGPTSMDWIWRILFLVGAATGAHSFEQVQLVESGAEVKKPGASVKVSCKASGYTFTGYYMHWVRQAPGQGLEWMGRINPNSGGTNYAQKFQGRVTMTRDTSISTAYMELSRLRSDDTAVYYCASPRGRGSAFDIWGQGTLVTVSSTREDLKNVFPPEVAVFEPSEAEISHTQKATLVCLATGFYPDHVELSWWVNGKEVHSGVCTDPQPLKEQPALNDSRYCLSSRLRVSATFWQNPRNHFRCQVQFYGLSENDEWTQDRAKPVTQIVSAEAWGRADDVIKIHWQEKKSNTILGSQEGNTMKTNDTYMKFSWLTVPEKSLDKEHRCIVRHENNKNGVDQEIIFPPIKTDVITMDPKDNCSKDANDTLLLQLTNTSAYYMYLLLLLKSVVYFAIITCCLLRRTAFCCNGEKS

SEQ ID NO: 15998 - protein, 866 aa, synthetic construct
MALPVTALLLPLALLLHAARPEVQLVESGGGLVQPGGSLRLSCAASGFSFSDFWMSWVRQAPGKGLEWVATISQAGSEKDYVDSVKGRFTISRDNAKKSLYLQMNSLRAEDTAVYYCASGVYSFDYRGQGTLVTVSSGTGGGGSGGGGSGGGGSEFDNFMLTQPHSVSESPGKTVTISCTRSSGSIASKYVQWYQQRPGSSPTTVIYEDNQRPSGVPDRFSGSIDTSSNSASLTISGLRTEDEADYYCHSYDSNNHSVFGGGTKVTVLGQLEIQNPDPAVYQLRDSKSSDKSVCLFTDFDSQTNVSQSKDSDVYITDKCVLDMRSMDFKSNSAVAWSNKSDFACANAFNNSIIPEDTFFPSPESSDSTDHVKPKETENTKQPSKSCHKPKAIVHTEKVNMMSLTVLGLRMLFAKTVAVNFLLTAKLFFLRAKRSGSGVKQTLNFDLLKLAGDVESNPGPTSMDWIWRILFLVGAATGAHSFEEVQLVESGGGVVQPGGSLRLSCAASGFTFSSYAMSWVRQAPGKGLEWVSAISGSGGSTYYADSVKGRFSISRDNSKNTLYLQMNSLRAEDTAVYYCARTRSSGAFDIWGQGTLVTVSSTREDLKNVFPPEVAVFEPSEAEISHTQKATLVCLATGFYPDHVELSWWVNGKEVHSGVCTDPQPLKEQPALNDSRYCLSSRLRVSATFWQNPRNHFRCQVQFYGLSENDEWTQDRAKPVTQIVSAEAWGRADDVIKIHWQEKKSNTILGSQEGNTMKTNDTYMKFSWLTVPEKSLDKEHRCIVRHENNKNGVDQEIIFPPIKTDVITMDPKDNCSKDANDTLLLQLTNTSAYYMYLLLLLKSVVYFAIITCCLLRRTAFCCNGEKS

SEQ ID NO: 15999 - protein, 861 aa, synthetic construct
MALPVTALLLPLALLLHAARPEVQLVESGGGLVQPGGSLRLSCAASGFSFSDFWMSWVRQAPGKGLEWVATISQAGSEKDYVDSVKGRFTISRDNAKKSLYLQMNSLRAEDTAVYYCASGVYSFDYRGQGTLVTVSSGTGGGGSGGGGSGGGGSEFDIQMNQSPSSLSASLGDTITITCHASQNINVWLSWYQQKPGNIPKLLIYKASNLHTGVPSRFSGSGSGTGFTITISSLQPEDIATYYCQQGQSYPWTFGGGTKLEIKRLEIQNPDPAVYQLRDSKSSDKSVCLFTDFDSQTNVSQSKDSDVYITDKCVLDMRSMDFKSNSAVAWSNKSDFACANAFNNSIIPEDTFFPSPESSDSTDHVKPKETENTKQPSKSCHKPKAIVHTEKVNMMSLTVLGLRMLFAKTVAVNFLLTAKLFFLRAKRSGSGVKQTLNFDLLKLAGDVESNPGPTSMDWIWRILFLVGAATGAHSFEEVQLQQSGPELVKPGASVKISCKASGYSFTGYFMNWVKQSHGKSLEYIGRFNPYNGETLYNQKFKGKATLTVDKSSSTVHMELLSVTSEDSAVYYCGRSGNDDAMDYWGQGTSVTVSSATREDLKNVFPPEVAVFEPSEAEISHTQKATLVCLATGFYPDHVELSWWVNGKEVHSGVCTDPQPLKEQPALNDSRYCLSSRLRVSATFWQNPRNHFRCQVQFYGLSENDEWTQDRAKPVTQIVSAEAWGRADDVIKIHWQEKKSNTILGSQEGNTMKTNDTYMKFSWLTVPEKSLDKEHRCIVRHENNKNGVDQEIIFPPIKTDVITMDPKDNCSKDANDTLLLQLTNTSAYYMYLLLLLKSVVYFAIITCCLLRRTAFCCNGEKS

SEQ ID NO: 16000 - protein, 862 aa, synthetic construct
MALPVTALLLPLALLLHAARPEVQLVESGGGLVQPGGSLRLSCAASGFSFSDFWMSWVRQAPGKGLEWVATISQAGSEKDYVDSVKGRFTISRDNAKKSLYLQMNSLRAEDTAVYYCASGVYSFDYRGQGTLVTVSSGTGGGGSGGGGSGGGGSEFEIVLTQSPATLSLSPGERATLSCRASQSVRSYLAWYQQKPGQAPRLLIYDASNRATGIPARFSGSGSGTDFTLTISSLEPEDFAVYYCQQRSNWPPTFGQGTKVEIKLEIQNPDPAVYQLRDSKSSDKSVCLFTDFDSQTNVSQSKDSDVYITDKCVLDMRSMDFKSNSAVAWSNKSDFACANAFNNSIIPEDTFFPSPESSDSTDHVKPKETENTKQPSKSCHKPKAIVHTEKVNMMSLTVLGLRMLFAKTVAVNFLLTAKLFFLRAKRSGSGVKQTLNFDLLKLAGDVESNPGPTSMDWIWRILFLVGAATGAHSFEQLQVQESGPGLVKPSETLSLTCTVSGGSISNSYFSWGWIRQPPGKGLEWIGSFYYGEKTYYNPSLKSRATISIDTSKSQFSLKLSSVTAADTAVYYCPRGPTMIRGVIDSWGQGTLVTVSSTREDLKNVFPPEVAVFEPSEAEISHTQKATLVCLATGFYPDHVELSWWVNGKEVHSGVCTDPQPLKEQPALNDSRYCLSSRLRVSATFWQNPRNHFRCQVQFYGLSENDEWTQDRAKPVTQIVSAEAWGRADDVIKIHWQEKKSNTILGSQEGNTMKTNDTYMKFSWLTVPEKSLDKEHRCIVRHENNKNGVDQEIIFPPIKTDVITMDPKDNCSKDANDTLLLQLTNTSAYYMYLLLLLKSVVYFAIITCCLLRRTAFCCNGEKS

SEQ ID NO: 16001 - protein, 871 aa, synthetic construct
MALPVTALLLPLALLLHAARPEVQLVESGGGLVQPGGSLRLSCAASGFSFSDFWMSWVRQAPGKGLEWVATISQAGSEKDYVDSVKGRFTISRDNAKKSLYLQMNSLRAEDTAVYYCASGVYSFDYRGQGTLVTVSSGTGGGGSGGGGSGGGGSEFDIVMTQTPLSLPVTPGEPASISCRSSRSLLDSDDGNTYLDWYLQKPGQSPQLLIYTLSYRASGVPDRFSGSGSGTDFTLKISRVEAEDVGVYYCMQRVEFPITFGQGTRLEIKRLEIQNPDPAVYQLRDSKSSDKSVCLFTDFDSQTNVSQSKDSDVYITDKCVLDMRSMDFKSNSAVAWSNKSDFACANAFNNSIIPEDTFFPSPESSDSTDHVKPKETENTKQPSKSCHKPKAIVHTEKVNMMSLTVLGLRMLFAKTVAVNFLLTAKLFFLRAKRSGSGVKQTLNFDLLKLAGDVESNPGPTSMDWIWRILFLVGAATGAHSFEQVQLVESGGGVVQPGRSLRLSCAASGFIFSRYGMHWVRQAPGKGLKWVAVIWYDGSNKLYADSVKGRFTISRDNSKNTLYLQMNSLRAEDTAVYYCARDYYDNSRHHWGFDYWGQGTLVTVSSTREDLKNVFPPEVAVFEPSEAEISHTQKATLVCLATGFYPDHVELSWWVNGKEVHSGVCTDPQPLKEQPALNDSRYCLSSRLRVSATFWQNPRNHFRCQVQFYGLSENDEWTQDRAKPVTQIVSAEAWGRADDVIKIHWQEKKSNTILGSQEGNTMKTNDTYMKFSWLTVPEKSLDKEHRCIVRHENNKNGVDQEIIFPPIKTDVITMDPKDNCSKDANDTLLLQLTNTSAYYMYLLLLLKSVVYFAIITCCLLRRTAFCCNGEKS

SEQ ID NO: 16002 - protein, 861 aa, synthetic construct
MALPVTALLLPLALLLHAARPEVQLVESGGGLVQPGGSLRLSCAASGFSFSDFWMSWVRQAPGKGLEWVATISQAGSEKDYVDSVKGRFTISRDNAKKSLYLQMNSLRAEDTAVYYCASGVYSFDYRGQGTLVTVSSGTGGGGSGGGGSGGGGSEFEIQMTQSPSSMSASLGDTITITCQATQDIFKNLNWYQQKPGKPPSLLIYYATELAEGVPSRFSGSGSGSDYSLTISNLESEDFAAYYCLQFFEFPFTFGSGTKLEMKLEIQNPDPAVYQLRDSKSSDKSVCLFTDFDSQTNVSQSKDSDVYITDKCVLDMRSMDFKSNSAVAWSNKSDFACANAFNNSIIPEDTFFPSPESSDSTDHVKPKETENTKQPSKSCHKPKAIVHTEKVNMMSLTVLGLRMLFAKTVAVNFLLTAKLFFLRAKRSGSGVKQTLNFDLLKLAGDVESNPGPTSMDWIWRILFLVGAATGAHSFEQVQLQQSGAELVRPGTSVKVSCKASGYVFTNYWIEWIKQRPGQGLEWIGVMNPGSGETTYNEKFKGKATLTADKSSSTAYMQLSSLTSVDSAVYFCARDHDRDYYAMDYWGQGTSVTVSSTREDLKNVFPPEVAVFEPSEAEISHTQKATLVCLATGFYPDHVELSWWVNGKEVHSGVCTDPQPLKEQPALNDSRYCLSSRLRVSATFWQNPRNHFRCQVQFYGLSENDEWTQDRAKPVTQIVSAEAWGRADDVIKIHWQEKKSNTILGSQEGNTMKTNDTYMKFSWLTVPEKSLDKEHRCIVRHENNKNGVDQEIIFPPIKTDVITMDPKDNCSKDANDTLLLQLTNTSAYYMYLLLLLKSVVYFAIITCCLLRRTAFCCNGEKS

SEQ ID NO: 16003 - protein, 858 aa, synthetic construct
MALPVTALLLPLALLLHAARPEVQLVESGGGLVQPGGSLRLSCAASGFSFSDFWMSWVRQAPGKGLEWVATISQAGSEKDYVDSVKGRFTISRDNAKKSLYLQMNSLRAEDTAVYYCASGVYSFDYRGQGTLVTVSSGTGGGGSGGGGSGGGGSEFDILLTQSPAILSVSPGERVSFSCRASQNIGTSIHWYQQRTNGSPRLLIKYASESVSGIPSRFSGSGSGTDFTLSINSVESEDIADYYCQHTNSWPTTFGGGTKLEIKRLEIQNPDPAVYQLRDSKSSDKSVCLFTDFDSQTNVSQSKDSDVYITDKCVLDMRSMDFKSNSAVAWSNKSDFACANAFNNSIIPEDTFFPSPESSDSTDHVKPKETENTKQPSKSCHKPKAIVHTEKVNMMSLTVLGLRMLFAKTVAVNFLLTAKLFFLRAKRSGSGVKQTLNFDLLKLAGDVESNPGPTSMDWIWRILFLVGAATGAHSFEQVQLQQSDAELVKPGASVKISCKASGYTFTDHAIHWVKQKPEQGLEWIGYFSPGNGDIKYNEKFKGKATLTADKSSSTAYMQLNSLTSEDSAVYFCKRSYGNYDYWGQGTTLTVSSTREDLKNVFPPEVAVFEPSEAEISHTQKATLVCLATGFYPDHVELSWWVNGKEVHSGVCTDPQPLKEQPALNDSRYCLSSRLRVSATFWQNPRNHFRCQVQFYGLSENDEWTQDRAKPVTQIVSAEAWGRADDVIKIHWQEKKSNTILGSQEGNTMKTNDTYMKFSWLTVPEKSLDKEHRCIVRHENNKNGVDQEIIFPPIKTDVITMDPKDNCSKDANDTLLLQLTNTSAYYMYLLLLLKSVVYFAIITCCLLRRTAFCCNGEKS

SEQ ID NO: 16004 - protein, 863 aa, synthetic construct
MALPVTALLLPLALLLHAARPEVQLVESGGGLVQPGGSLRLSCAASGFSFSDFWMSWVRQAPGKGLEWVATISQAGSEKDYVDSVKGRFTISRDNAKKSLYLQMNSLRAEDTAVYYCASGVYSFDYRGQGTLVTVSSGTGGGGSGGGGSGGGGSEFDIVMTQSPDSLAVSLGERATINCKSSQSLLNSGDQKNYLTWYQQKPGQPPKLLIYWASTRESGVPDRFSGSGSGTDFTLTISSLQAEDVAVYYCQNDYSYPLTFGQGTKVEIKLEIQNPDPAVYQLRDSKSSDKSVCLFTDFDSQTNVSQSKDSDVYITDKCVLDMRSMDFKSNSAVAWSNKSDFACANAFNNSIIPEDTFFPSPESSDSTDHVKPKETENTKQPSKSCHKPKAIVHTEKVNMMSLTVLGLRMLFAKTVAVNFLLTAKLFFLRAKRSGSGVKQTLNFDLLKLAGDVESNPGPTSMDWIWRILFLVGAATGAHSFEQVQLVQSGAEVKKTGSSVKVSCKASGYTFTDHAIHVWRQAPGQALEWMGHFSPGNTDIKYNDKFKGRVTLTVDRSMSTAYMELSSLRSEDTAMYYCKTSTFFFDYWGQGTMVTVSSTREDLKNVFPPEVAVFEPSEAEISHTQKATLVCLATGFYPDHVELSWWVNGKEVHSGVCTDPQPLKEQPALNDSRYCLSSRLRVSATFWQNPRNHFRCQVQFYGLSENDEWTQDRAKPVTQIVSAEAWGRADDVIKIHWQEKKSNTILGSQEGNTMKTNDTYMKFSWLTVPEKSLDKEHRCIVRHENNKNGVDQEIIFPPIKTDVITMDPKDNCSKDANDTLLLQLTNTSAYYMYLLLLLKSVVYFAIITCCLLRRTAFCCNGEKS

SEQ ID NO: 16005 - protein, 862 aa, synthetic construct
MALPVTALLLPLALLLHAARPEVQLVESGGGLVQPGGSLRLSCAASGFSFSDFWMSWVRQAPGKGLEWVATISQAGSEKDYVDSVKGRFTISRDNAKKSLYLQMNSLRAEDTAVYYCASGVYSFDYRGQGTLVTVSSGTGGGGSGGGGSGGGGSEFDIQMTQSPSSLSASVGDRVTITCKASQDVSIAVAWYQQKPGKAPKVLIYSASYRYTGVPDRFSGSGSGTDFTFTISSLQPEDIAVYYCQQHYITPLTFGGGTKVEIKLEIQNPDPAVYQLRDSKSSDKSVCLFTDFDSQTNVSQSKDSDVYITDKCVLDMRSMDFKSNSAVAWSNKSDFACANAFNNSIIPEDTFFPSPESSDSTDHVKPKETENTKQPSKSCHKPKAIVHTEKVNMMSLTVLGLRMLFAKTVAVNFLLTAKLFFLRAKRSGSGVKQTLNFDLLKLAGDVESNPGPTSMDWIWRILFLVGAATGAHSFEQIQLVQSGHEVKKPGASVKVSCKASGYTFTNYGMNWVRQAPGQGLEWMGWINTKTGEPTYAEEFKGRFVFSLETSASTAYLQISSLKAEDTAMYFCGRGGYGSSYWYFDVWGQGTTVTVSSTREDLKNVFPPEVAVFEPSEAEISHTQKATLVCLATGFYPDHVELSWWVNGKEVHSGVCTDPQPLKEQPALNDSRYCLSSRLRVSATFWQNPRNHFRCQVQFYGLSENDEWTQDRAKPVTQIVSAEAWGRADDVIKIHWQEKKSNTILGSQEGNTMKTNDTYMKFSWLTVPEKSLDKEHRCIVRHENNKNGVDQEIIFPPIKTDVITMDPKDNCSKDANDTLLLQLTNTSAYYMYLLLLLKSVVYFAIITCCLLRRTAFCCNGEKS

SEQ ID NO: 16006 - protein, 864 aa, synthetic construct
MALPVTALLLPLALLLHAARPEVQLVESGGGLVQPGGSLRLSCAASGFSFSDFWMSWVRQAPGKGLEWVATISQAGSEKDYVDSVKGRFTISRDNAKKSLYLQMNSLRAEDTAVYYCASGVYSFDYRGQGTLVTVSSGTGGGGSGGGGSGGGGSEFDIVMTQSPDSLAVSLGERATINCRASKSVSTSGYSYMHWYQQKPGQPPKLLIYLASNLESGVPDRFSGSGSGTDFTLTISSLQAEDVAVYYCQHSRELPYTFGQGTKLEIKLEIQNPDPAVYQLRDSKSSDKSVCLFTDFDSQTNVSQSKDSDVYITDKCVLDMRSMDFKSNSAVAWSNKSDFACANAFNNSIIPEDTFFPSPESSDSTDHVKPKETENTKQPSKSCHKPKAIVHTEKVNMMSLTVLGLRMLFAKTVAVNFLLTAKLFFLRAKRSGSGVKQTLNFDLLKLAGDVESNPGPTSMDWIWRILFLVGAATGAHSFEQVQLQESGPGLVKPSETLSLTCTVSGGSISSYGVHWIRQPPGKGLEWIGVIWTSGVTDYNSALMGRVTISVDTSKNQFSLKLSSVTAADTAVYYCARDGDYDRYTMDYWGQGTLVTVSSTREDLKNVFPPEVAVFEPSEAEISHTQKATLVCLATGFYPDHVELSWWVNGKEVHSGVCTDPQPLKEQPALNDSRYCLSSRLRVSATFWQNPRNHFRCQVQFYGLSENDEWTQDRAKPVTQIVSAEAWGRADDVIKIHWQEKKSNTILGSQEGNTMKTNDTYMKFSWLTVPEKSLDKEHRCIVRHENNKNGVDQEIIFPPIKTDVITMDPKDNCSKDANDTLLLQLTNTSAYYMYLLLLLKSVVYFAIITCCLLRRTAFCCNGEKS

SEQ ID NO: 16007 - protein, 864 aa, synthetic construct
MALPVTALLLPLALLLHAARPEVQLVESGGGLVQPGGSLRLSCAASGFSFSDFWMSWVRQAPGKGLEWVATISQAGSEKDYVDSVKGRFTISRDNAKKSLYLQMNSLRAEDTAVYYCASGVYSFDYRGQGTLVTVSSGTGGGGSGGGGSGGGGSEFDIQMTQSPSSLSASVGDRVTITCRASQSIGTSLHWYQQKPGKAPKLLIKFASRLQSGVPSRFSGSGSGTDFTLTISSLQPEDFATYYCQQSPGFPPTFGQGTKLEIKRLEIQNPDPAVYQLRDSKSSDKSVCLFTDFDSQTNVSQSKDSDVYITDKCVLDMRSMDFKSNSAVAWSNKSDFACANAFNNSIIPEDTFFPSPESSDSTDHVKPKETENTKQPSKSCHKPKAIVHTEKVNMMSLTVLGLRMLFAKTVAVNFLLTAKLFFLRAKRSGSGVKQTLNFDLLKLAGDVESNPGPTSMDWIWRILFLVGAATGAHSFEQVQLVESGGGLVKPGGSLRLSCAASGFSITTSGYYWTWIRQFPGKGLEWMGYIGYNSKTYYNPALKSRITISRDNAKNSLYLQMNSLRAEDTAVYYCARSLYGGYKDAFDSWGQGTLVTVSSTREDLKNVFPPEVAVFEPSEAEISHTQKATLVCLATGFYPDHVELSWWVNGKEVHSGVCTDPQPLKEQPALNDSRYCLSSRLRVSATFWQNPRNHFRCQVQFYGLSENDEWTQDRAKPVTQIVSAEAWGRADDVIKIHWQEKKSNTILGSQEGNTMKTNDTYMKFSWLTVPEKSLDKEHRCIVRHENNKNGVDQEIIFPPIKTDVITMDPKDNCSKDANDTLLLQLTNTSAYYMYLLLLLKSVVYFAIITCCLLRRTAFCCNGEKS

SEQ ID NO: 16008 - protein, 869 aa, synthetic construct
MALPVTALLLPLALLLHAARPEVQLVESGGGLVQPGGSLRLSCAASGFSFSDFWMSWVRQAPGKGLEWVATISQAGSEKDYVDSVKGRFTISRDNAKKSLYLQMNSLRAEDTAVYYCASGVYSFDYRGQGTLVTVSSGTGGGGSGGGGSGGGGSEFDEIVLTQSPLSLPVTPGEPASISCRSSQSLLHSIGYNYLDWYLQKPGQSPQLLIYLGSNRASGVPDRFSGSGSGTDFTLKISRVEAEDVGVYYCMQALQTPLTFGGGTKVEIKRLEIQNPDPAVYQLRDSKSSDKSVCLFTDFDSQTNVSQSKDSDVYITDKCVLDMRSMDFKSNSAVAWSNKSDFACANAFNNSIIPEDTFFPSPESSDSTDHVKPKETENTKQPSKSCHKPKAIVHTEKVNMMSLTVLGLRMLFAKTVAVNFLLTAKLFFLRAKRSGSGVKQTLNFDLLKLAGDVESNPGPTSMDWIWRILFLVGAATGAHSFEEVQLVESGGGVVQPGRSLRLSCAASGFTFRSYGMHWVRQAPGKGLEWVAVISYDGSNKYYTDSVNGRFTISRDNSKNTLYLQMNSLRAEDTAVYYCARGGGYYETSGPDYWGQGTLVTVSSTREDLKNVFPPEVAVFEPSEAEISHTQKATLVCLATGFYPDHVELSWWVNGKEVHSGVCTDPQPLKEQPALNDSRYCLSSRLRVSATFWQNPRNHFRCQVQFYGLSENDEWTQDRAKPVTQIVSAEAWGRADDVIKIHWQEKKSNTILGSQEGNTMKTNDTYMKFSWLTVPEKSLDKEHRCIVRHENNKNGVDQEIIFPPIKTDVITMDPKDNCSKDANDTLLLQLTNTSAYYMYLLLLLKSVVYFAIITCCLLRRTAFCCNGEKS

SEQ ID NO: 16009 - protein, 867 aa, synthetic construct
MALPVTALLLPLALLLHAARPEVQLVESGGGLVQPGGSLRLSCAASGFSFSDFWMSWVRQAPGKGLEWVATISQAGSEKDYVDSVKGRFTISRDNAKKSLYLQMNSLRAEDTAVYYCASGVYSFDYRGQGTLVTVSSGTGGGGSGGGGSGGGGSEFDDVVMTQSPLSLPVTPGEPASISCRSSQSLLHSIGYNYLHWFLQKPGQSPQLLIYLGSNRASGVPDRFSGSGSGTDFTLKISRVEAEDVGVYYCMQALQTPPTFGQGTRLEIKRLEIQNPDPAVYQLRDSKSSDKSVCLFTDFDSQTNVSQSKDSDVYITDKCVLDMRSMDFKSNSAVAWSNKSDFACANAFNNSIIPEDTFFPSPESSDSTDHVKPKETENTKQPSKSCHKPKAIVHTEKVNMMSLTVLGLRMLFAKTVAVNFLLTAKLFFLRAKRSGSGVKQTLNFDLLKLAGDVESNPGPTSMDWIWRILFLVGAATGAHSFEQLQLQESGPGLVKPSGTLSLTCAVSGGSISSSNWWSWVRQPPGKGLEWIGEIYHSGSTNYNPSLKSRVTISVDKSKNQFSLKLSSVTAADTAVYYCVGSPYGDYVLDYWGQGTLVTVSSTREDLKNVFPPEVAVFEPSEAEISHTQKATLVCLATGFYPDHVELSWWVNGKEVHSGVCTDPQPLKEQPALNDSRYCLSSRLRVSATFWQNPRNHFRCQVQFYGLSENDEWTQDRAKPVTQIVSAEAWGRADDVIKIHWQEKKSNTILGSQEGNTMKTNDTYMKFSWLTVPEKSLDKEHRCIVRHENNKNGVDQEIIFPPIKTDVITMDPKDNCSKDANDTLLLQLTNTSAYYMYLLLLLKSVVYFAIITCCLLRRTAFCCNGEKS

SEQ ID NO: 16010 - protein, 865 aa, synthetic construct
MALPVTALLLPLALLLHAARPEVQLVESGGGLVQPGGSLRLSCAASGFSFSDFWMSWVRQAPGKGLEWVATISQAGSEKDYVDSVKGRFTISRDNAKKSLYLQMNSLRAEDTAVYYCASGVYSFDYRGQGTLVTVSSGTGGGGSGGGGSGGGGSEFDEIVLTQSPGTLSLSLGERATLSCRASQSISSSFLAWYQQKPGQAPKLLIYAASTRATGIPDRFSGSGSGTDFTLTISRLEPEDFAVYYCQQYGRSLSFGGGTKVEVKLEIQNPDPAVYQLRDSKSSDKSVCLFTDFDSQTNVSQSKDSDVYITDKCVLDMRSMDFKSNSAVAWSNKSDFACANAFNNSIIPEDTFFPSPESSDSTDHVKPKETENTKQPSKSCHKPKAIVHTEKVNMMSLTVLGLRMLFAKTVAVNFLLTAKLFFLRAKRSGSGVKQTLNFDLLKLAGDVESNPGPTSMDWIWRILFLVGAATGAHSFEQVQLQQSGPGLVKPSQTLSLTCAISGDSVSGNSATWNWIRQSPSRGLEWLGRTYYRSKWNHDYAESVKSRITINPDTSKNQFSLQLNSVTPEDTAVYYCARGDSSSWYAFDYWGQGTLVTVSSTREDLKNVFPPEVAVFEPSEAEISHTQKATLVCLATGFYPDHVELSWWVNGKEVHSGVCTDPQPLKEQPALNDSRYCLSSRLRVSATFWQNPRNHFRCQVQFYGLSENDEWTQDRAKPVTQIVSAEAWGRADDVIKIHWQEKKSNTILGSQEGNTMKTNDTYMKFSWLTVPEKSLDKEHRCIVRHENNKNGVDQEIIFPPIKTDVITMDPKDNCSKDANDTLLLQLTNTSAYYMYLLLLLKSVVYFAIITCCLLRRTAFCCNGEKS

SEQ ID NO: 16011 - protein, 864 aa, synthetic construct
MALPVTALLLPLALLLHAARPEVQLVESGGGLVQPGGSLRLSCAASGFSFSDFWMSWVRQAPGKGLEWVATISQAGSEKDYVDSVKGRFTISRDNAKKSLYLQMNSLRAEDTAVYYCASGVYSFDYRGQGTLVTVSSGTGGGGSGGGGSGGGGSEFDQSVVTQPPSVSVAPGKTARITCGRNNIGSKSVHWYQQKPGQAPVLVVYDDSDRPSGIPERFSGSNSGNTATLTISRVEAGDEADYYCQVWDSSSDHVVFGGGTKLTVLGLEIQNPDPAVYQLRDSKSSDKSVCLFTDFDSQTNVSQSKDSDVYITDKCVLDMRSMDFKSNSAVAWSNKSDFACANAFNNSIIPEDTFFPSPESSDSTDHVKPKETENTKQPSKSCHKPKAIVHTEKVNMMSLTVLGLRMLFAKTVAVNFLLTAKLFFLRAKRSGSGVKQTLNFDLLKLAGDVESNPGPTSMDWIWRILFLVGAATGAHSFEVQLVQSGGGVMRPGGSLRLSCAASGFTFDDYGMSWVRQAPGKGLEWVSGINWNGGSTGYADSVRGRFTISRDNAKNSLYLQMNSLRAEDTALYYCARERGYGYHDPHDYWGQGTLVTVSSTREDLKNVFPPEVAVFEPSEAEISHTQKATLVCLATGFYPDHVELSWWVNGKEVHSGVCTDPQPLKEQPALNDSRYCLSSRLRVSATFWQNPRNHFRCQVQFYGLSENDEWTQDRAKPVTQIVSAEAWGRADDVIKIHWQEKKSNTILGSQEGNTMKTNDTYMKFSWLTVPEKSLDKEHRCIVRHENNKNGVDQEIIFPPIKTDVITMDPKDNCSKDANDTLLLQLTNTSAYYMYLLLLLKSVVYFAIITCCLLRRTAFCCNGEKS

SEQ ID NO: 16012 - protein, 877 aa, synthetic construct
MALPVTALLLPLALLLHAARPEVQLVESGGGLVQPGGSLRLSCAASGFSFSDFWMSWVRQAPGKGLEWVATISQAGSEKDYVDSVKGRFTISRDNAKKSLYLQMNSLRAEDTAVYYCASGVYSFDYRGQGTLVTVSSGTGGGGSGGGGSGGGGSEFEQKLISEEDLEFQAVVTQPPSASGTPGQRVTISCSGSSSNIGSNTVNWYQQVPGTAPKLLIYSNNQRPSGVPDRFSGSKSGTSASLAISGLQSEDEADYYCAAWDDSLNGWVFGGGTKLTVLLEIQNPDPAVYQLRDSKSSDKSVCLFTDFDSQTNVSQSKDSDVYITDKCVLDMRSMDFKSNSAVAWSNKSDFACANAFNNSIIPEDTFFPSPESSDSTDHVKPKETENTKQPSKSCHKPKAIVHTEKVNMMSLTVLGLRMLFAKTVAVNFLLTAKLFFLRAKRSGSGVKQTLNFDLLKLAGDVESNPGPTSMDWIWRILFLVGAATGAHSFEQMQLVQSGAEVKEPGESLRISCKGSGYSFTNFWISWVRQMPGKGLEWMGRVDPGYSYSTYSPSFQGHVTISADKSTSTAYLQWNSLKASDTAMYYCARVQYSGYYDWFDPWGQGTLVTVSSTREDLKNVFPPEVAVFEPSEAEISHTQKATLVCLATGFYPDHVELSWWVNGKEVHSGVCTDPQPLKEQPALNDSRYCLSSRLRVSATFWQNPRNHFRCQVQFYGLSENDEWTQDRAKPVTQIVSAEAWGRADDVIKIHWQEKKSNTILGSQEGNTMKTNDTYMKFSWLTVPEKSLDKEHRCIVRHENNKNGVDQEIIFPPIKTDVITMDPKDNCSKDANDTLLLQLTNTSAYYMYLLLLLKSVVYFAIITCCLLRRTAFCCNGEKS

SEQ ID NO: 16013 - protein, 871 aa, synthetic construct
MALPVTALLLPLALLLHAARPEVQLVESGGGLVQPGGSLRLSCAASGFSFSDFWMSWVRQAPGKGLEWVATISQAGSEKDYVDSVKGRFTISRDNAKKSLYLQMNSLRAEDTAVYYCASGVYSFDYRGQGTLVTVSSGTGGGGSGGGGSGGGGSEFEQKLISEEDLEFDIQMTQSPSTLSASVGDRVTITCRASQNINKWLAWYQQRPGKAPQLLIYKASSLESGVPSRFSGSGSGTEYTLTISSLQPDDFATYYCQQYNSYATFGQGTKVEIKRLEIQNPDPAVYQLRDSKSSDKSVCLFTDFDSQTNVSQSKDSDVYITDKCVLDMRSMDFKSNSAVAWSNKSDFACANAFNNSIIPEDTFFPSPESSDSTDHVKPKETENTKQPSKSCHKPKAIVHTEKVNMMSLTVLGLRMLFAKTVAVNFLLTAKLFFLRAKRSGSGVKQTLNFDLLKLAGDVESNPGPTSMDWIWRILFLVGAATGAHSFEQVQLVQSGAEVKKPGESLKISCKGSGYNFSNKWIGWVRQLPGRGLEWIAIIYPGYSDITYSPSFQGRVTISADTSINTAYLHWHSLKASDTAMYYCVRHTALAGFDYWGLGTLVTVSSTREDLKNVFPPEVAVFEPSEAEISHTQKATLVCLATGFYPDHVELSWWVNGKEVHSGVCTDPQPLKEQPALNDSRYCLSSRLRVSATFWQNPRNHFRCQVQFYGLSENDEWTQDRAKPVTQIVSAEAWGRADDVIKIHWQEKKSNTILGSQEGNTMKTNDTYMKFSWLTVPEKSLDKEHRCIVRHENNKNGVDQEIIFPPIKTDVITMDPKDNCSKDANDTLLLQLTNTSAYYMYLLLLLKSVVYFAIITCCLLRRTAFCCNGEKS

SEQ ID NO: 16014 - protein, 863 aa, synthetic construct
MALPVTALLLPLALLLHAARPEVQLVESGGGLVQPGGSLRLSCAASGFSFSDFWMSWVRQAPGKGLEWVATISQAGSEKDYVDSVKGRFTISRDNAKKSLYLQMNSLRAEDTAVYYCASGVYSFDYRGQGTLVTVSSGTGGGGSGGGGSGGGGSEFDIVLTQSPASLAVSLGQRATISCRASESVDNYGNTFMHWYQQKPGQPPKLLIYRASNLESGIPARFSGSGSRTDFTLTINPVEADDVATYYCQQSNEDPPTFGAGTKLELKLEIQNPDPAVYQLRDSKSSDKSVCLFTDFDSQTNVSQSKDSDVYITDKCVLDMRSMDFKSNSAVAWSNKSDFACANAFNNSIIPEDTFFPSPESSDSTDHVKPKETENTKQPSKSCHKPKAIVHTEKVNMMSLTVLGLRMLFAKTVAVNFLLTAKLFFLRAKRSGSGVKQTLNFDLLKLAGDVESNPGPTSMDWIWRILFLVGAATGAHSFEQIQLVQSGPELKKPGETVKISCKASGYIFTNYGMNWVKQAPGKSFKWMGWINTYTGESTYSADFKGRFAFSLETSASTAYLHINDLKNEDTATYFCARSGGYDPMDYWGQGTSVTVSSTREDLKNVFPPEVAVFEPSEAEISHTQKATLVCLATGFYPDHVELSWWVNGKEVHSGVCTDPQPLKEQPALNDSRYCLSSRLRVSATFWQNPRNHFRCQVQFYGLSENDEWTQDRAKPVTQIVSAEAWGRADDVIKIHWQEKKSNTILGSQEGNTMKTNDTYMKFSWLTVPEKSLDKEHRCIVRHENNKNGVDQEIIFPPIKTDVITMDPKDNCSKDANDTLLLQLTNTSAYYMYLLLLLKSVVYFAIITCCLLRRTAFCCNGEKS

SEQ ID NO: 16015 - protein, 862 aa, synthetic construct
MALPVTALLLPLALLLHAARPEVQLVESGGGLVQPGGSLRLSCAASGFSFSDFWMSWVRQAPGKGLEWVATISQAGSEKDYVDSVKGRFTISRDNAKKSLYLQMNSLRAEDTAVYYCASGVYSFDYRGQGTLVTVSSGTGGGGSGGGGSGGGGSEFDEIVLTQSPGTLSLSPGERATLSCRASQSVSNTYLAWYHQRPGQAPRLLIYGASSRATGIPDRFSGSGSGTDFALTISSLEPEDFAVYYCQQYSNSWTFGQGTKVEIKRLEIQNPDPAVYQLRDSKSSDKSVCLFTDFDSQTNVSQSKDSDVYITDKCVLDMRSMDFKSNSAVAWSNKSDFACANAFNNSIIPEDTFFPSPESSDSTDHVKPKETENTKQPSKSCHKPKAIVHTEKVNMMSLTVLGLRMLFAKTVAVNFLLTAKLFFLRAKRSGSGVKQTLNFDLLKLAGDVESNPGPTSMDWIWRILFLVGAATGAHSFEQVQLVESGGGVVQPGRSLRLSCAASGFTFSSYDMHWVRQAPGKGLEWVAVISYDGTNEYYADSVKGRFTISRDTSKNTLYLQMNSLRAEDTAVYYCARERYFDWSFDYWGQGTLVSVSSTREDLKNVFPPEVAVFEPSEAEISHTQKATLVCLATGFYPDHVELSWWVNGKEVHSGVCTDPQPLKEQPALNDSRYCLSSRLRVSATFWQNPRNHFRCQVQFYGLSENDEWTQDRAKPVTQIVSAEAWGRADDVIKIHWQEKKSNTILGSQEGNTMKTNDTYMKFSWLTVPEKSLDKEHRCIVRHENNKNGVDQEIIFPPIKTDVITMDPKDNCSKDANDTLLLQLTNTSAYYMYLLLLLKSVVYFAIITCCLLRRTAFCCNGEKS

SEQ ID NO: 16016 - protein, 861 aa, synthetic construct
MALPVTALLLPLALLLHAARPEVQLVESGGGLVQPGGSLRLSCAASGFSFSDFWMSWVRQAPGKGLEWVATISQAGSEKDYVDSVKGRFTISRDNAKKSLYLQMNSLRAEDTAVYYCASGVYSFDYRGQGTLVTVSSGTGGGGSGGGGSGGGGSEFDELTQDPAVSVALGQTVRITCQGDSLRSNYANWYQQKPGQAPVLVIYGQNNRPSGIPDRFSGSSSGNTASLTITGAQAADEADYYCDSRVSTGNHVVFGGGTKLTVLGQLEIQNPDPAVYQLRDSKSSDKSVCLFTDFDSQTNVSQSKDSDVYITDKCVLDMRSMDFKSNSAVAWSNKSDFACANAFNNSIIPEDTFFPSPESSDSTDHVKPKETENTKQPSKSCHKPKAIVHTEKVNMMSLTVLGLRMLFAKTVAVNFLLTAKLFFLRAKRSGSGVKQTLNFDLLKLAGDVESNPGPTSMDWIWRILFLVGAATGAHSFEEVQLVQSGAEVKKPGASVKVSCKASGYTFTSYAMHWVRQAPGQRLEWMGWINAGNGNTKYSQKFQGRVTITRDTSASTAYMELSSLRSEDTAVYYCARDISYGSFDYWGQGTLVTVSSTREDLKNVFPPEVAVFEPSEAEISHTQKATLVCLATGFYPDHVELSWWVNGKEVHSGVCTDPQPLKEQPALNDSRYCLSSRLRVSATFWQNPRNHFRCQVQFYGLSENDEWTQDRAKPVTQIVSAEAWGRADDVIKIHWQEKKSNTILGSQEGNTMKTNDTYMKFSWLTVPEKSLDKEHRCIVRHENNKNGVDQEIIFPPIKTDVITMDPKDNCSKDANDTLLLQLTNTSAYYMYLLLLLKSVVYFAIITCCLLRRTAFCCNGEKS

SEQ ID NO: 16017 - protein, 863 aa, synthetic construct
MALPVTALLLPLALLLHAARPEVQLVESGGGLVQPGGSLRLSCAASGFSFSDFWMSWVRQAPGKGLEWVATISQAGSEKDYVDSVKGRFTISRDNAKKSLYLQMNSLRAEDTAVYYCASGVYSFDYRGQGTLVTVSSGTGGGGSGGGGSGGGGSEFDDIVLTQTPATLSVTPGDSVSLSCRASQSISNNLHWYQQKSHESPRLLIKNASQSISGIPSKFSGSGSGTDFTLRINSVETEDFGMYFCQQSNSWPYTFGSGTKLEIKLEIQNPDPAVYQLRDSKSSDKSVCLFTDFDSQTNVSQSKDSDVYITDKCVLDMRSMDFKSNSAVAWSNKSDFACANAFNNSIIPEDTFFPSPESSDSTDHVKPKETENTKQPSKSCHKPKAIVHTEKVNMMSLTVLGLRMLFAKTVAVNFLLTAKLFFLRAKRSGSGVKQTLNFDLLKLAGDVESNPGPTSMDWIWRILFLVGAATGAHSFEQVKLQQSGPELVKPGASVKISCKASGYSFTGYYMHWVKQSHGNILDWIGYIYPYNGVSSYNQKFKGKATLTVDKSSSTAYMELRSLTSEDSAVYYCARERGLYQLRAMDYWGQGTSVTVSSTREDLKNVFPPEVAVFEPSEAEISHTQKATLVCLATGFYPDHVELSWWVNGKEVHSGVCTDPQPLKEQPALNDSRYCLSSRLRVSATFWQNPRNHFRCQVQFYGLSENDEWTQDRAKPVTQIVSAEAWGRADDVIKIHWQEKKSNTILGSQEGNTMKTNDTYMKFSWLTVPEKSLDKEHRCIVRHENNKNGVDQEIIFPPIKTDVITMDPKDNCSKDANDTLLLQLTNTSAYYMYLLLLLKSVVYFAIITCCLLRRTAFCCNGEKS

SEQ ID NO: 16018 - protein, 854 aa, synthetic construct
MALPVTALLLPLALLLHAARPEVQLVESGGGLVQPGGSLRLSCAASGFSFSDFWMSWVRQAPGKGLEWVATISQAGSEKDYVDSVKGRFTISRDNAKKSLYLQMNSLRAEDTAVYYCASGVYSFDYRGQGTLVTVSSGTGGGGSGGGGSGGGGSEFDDIVMTQTPAIMSASPGQKVTITCSASSSVNYMHWYQQKLGSSPKLWIYDTSKLAPGVPARFSGSGSGTSYSLTISSMEAEDAASYFCHQWSSYPYTFGSGTKLEIKLEIQNPDPAVYQLRDSKSSDKSVCLFTDFDSQTNVSQSKDSDVYITDKCVLDMRSMDFKSNSAVAWSNKSDFACANAFNNSIIPEDTFFPSPESSDSTDHVKPKETENTKQPSKSCHKPKAIVHTEKVNMMSLTVLGLRMLFAKTVAVNFLLTAKLFFLRAKRSGSGVKQTLNFDLLKLAGDVESNPGPTSMDWIWRILFLVGAATGAHSFEEVQLQESGPDLVKPSQSLSLTCTVTGYSITSGYGWHWIRQFPGNKLEWMGYIHYSGSTTYNPSLKSRISISRDTSKNQFFLQLNSVTTEDTATYYCARSLRYWGQGTTLTVSSTREDLKNVFPPEVAVFEPSEAEISHTQKATLVCLATGFYPDHVELSWWVNGKEVHSGVCTDPQPLKEQPALNDSRYCLSSRLRVSATFWQNPRNHFRCQVQFYGLSENDEWTQDRAKPVTQIVSAEAWGRADDVIKIHWQEKKSNTILGSQEGNTMKTNDTYMKFSWLTVPEKSLDKEHRCIVRHENNKNGVDQEIIFPPIKTDVITMDPKDNCSKDANDTLLLQLTNTSAYYMYLLLLLKSVVYFAIITCCLLRRTAFCCNGEKS

SEQ ID NO: 16019 - protein, 857 aa, synthetic construct
MALPVTALLLPLALLLHAARPEVQLVESGGGLVQPGGSLRLSCAASGFSFSDFWMSWVRQAPGKGLEWVATISQAGSEKDYVDSVKGRFTISRDNAKKSLYLQMNSLRAEDTAVYYCASGVYSFDYRGQGTLVTVSSGTGGGGSGGGGSGGGGSEFDDIQMTQSPSSLSASVGDRVTITCSATSSISYMHWYQQKPGKAPKGWIYDTSKLAHGVPSRFSGSGSGTDFTLTISSLQPEDFATYYCHQRRSYPFTFGQGTKVEIKLEIQNPDPAVYQLRDSKSSDKSVCLFTDFDSQTNVSQSKDSDVYITDKCVLDMRSMDFKSNSAVAWSNKSDFACANAFNNSIIPEDTFFPSPESSDSTDHVKPKETENTKQPSKSCHKPKAIVHTEKVNMMSLTVLGLRMLFAKTVAVNFLLTAKLFFLRAKRSGSGVKQTLNFDLLKLAGDVESNPGPTSMDWIWRILFLVGAATGAHSFEEVQLVQSGAEVKKPGASVKVSCKASGYTFTNFWIHWVRQAPGQGLEWIGEIDPSDSYTNYNQKFKGRVTITRDTSTSTAYLELSSLRSEDTAVYYCAREITTVDYWGQGTLVTVSSTREDLKNVFPPEVAVFEPSEAEISHTQKATLVCLATGFYPDHVELSWWVNGKEVHSGVCTDPQPLKEQPALNDSRYCLSSRLRVSATFWQNPRNHFRCQVQFYGLSENDEWTQDRAKPVTQIVSAEAWGRADDVIKIHWQEKKSNTILGSQEGNTMKTNDTYMKFSWLTVPEKSLDKEHRCIVRHENNKNGVDQEIIFPPIKTDVITMDPKDNCSKDANDTLLLQLTNTSAYYMYLLLLLKSVVYFAIITCCLLRRTAFCCNGEKS

SEQ ID NO: 16020 - protein, 864 aa, synthetic construct
MALPVTALLLPLALLLHAARPEVQLVESGGGLVQPGGSLRLSCAASGFSFSDFWMSWVRQAPGKGLEWVATISQAGSEKDYVDSVKGRFTISRDNAKKSLYLQMNSLRAEDTAVYYCASGVYSFDYRGQGTLVTVSSGTGGGGSGGGGSGGGGSEFDDIQMTQSPSSLSASVGDRVTITCKASQGFNKYVAWYQQKPGKAPKLLIYYTSTLQPGVPSRFSGSGSGRDYTLTISSLQPEDFATYYCLQYGNLLYAFGQGTKVEIKRLEIQNPDPAVYQLRDSKSSDKSVCLFTDFDSQTNVSQSKDSDVYITDKCVLDMRSMDFKSNSAVAWSNKSDFACANAFNNSIIPEDTFFPSPESSDSTDHVKPKETENTKQPSKSCHKPKAIVHTEKVNMMSLTVLGLRMLFAKTVAVNFLLTAKLFFLRAKRSGSGVKQTLNFDLLKLAGDVESNPGPTSMDWIWRILFLVGAATGAHSFEEVQLVQSGAEVKKPGASVKVSCKASGYTFTSYWIGWVRQAPGQGLEWIGDIYPGGGYTNYNEKFKGRVTITRDTSTSTAYLELSSLRSEDTAVYYCARLDGSSYRGAMDSWGQGTLVTVSSTREDLKNVFPPEVAVFEPSEAEISHTQKATLVCLATGFYPDHVELSWWVNGKEVHSGVCTDPQPLKEQPALNDSRYCLSSRLRVSATFWQNPRNHFRCQVQFYGLSENDEWTQDRAKPVTQIVSAEAWGRADDVIKIHWQEKKSNTILGSQEGNTMKTNDTYMKFSWLTVPEKSLDKEHRCIVRHENNKNGVDQEIIFPPIKTDVITMDPKDNCSKDANDTLLLQLTNTSAYYMYLLLLLKSVVYFAIITCCLLRRTAFCCNGEKS

SEQ ID NO: 16021 - protein, 860 aa, synthetic construct
MALPVTALLLPLALLLHAARPEVQLVESGGGLVQPGGSLRLSCAASGFSFSDFWMSWVRQAPGKGLEWVATISQAGSEKDYVDSVKGRFTISRDNAKKSLYLQMNSLRAEDTAVYYCASGVYSFDYRGQGTLVTVSSGTGGGGSGGGGSGGGGSEFDDIQMTQSPSSLSASVGDRVTITCRASQDIRYYLNWYQQKPGKAPKLLIYVASSLQSGVPSRFSGSGSGTEFTLTVSSLQPEDFATYYCLQVYSTPRTFGQGTKVEIKLEIQNPDPAVYQLRDSKSSDKSVCLFTDFDSQTNVSQSKDSDVYITDKCVLDMRSMDFKSNSAVAWSNKSDFACANAFNNSIIPEDTFFPSPESSDSTDHVKPKETENTKQPSKSCHKPKAIVHTEKVNMMSLTVLGLRMLFAKTVAVNFLLTAKLFFLRAKRSGSGVKQTLNFDLLKLAGDVESNPGPTSMDWIWRILFLVGAATGAHSFEEVQLVESGGGLAKPGGSLRLSCAASGFRFTFNNYYMDWVRQAPGQGLEWVSRISSSGDPTWYADSVKGRFTISRENAKNTLFLQMNSLRAEDTAVYYCASLTTGSDSWGQGVLVTVSSTREDLKNVFPPEVAVFEPSEAEISHTQKATLVCLATGFYPDHVELSWWVNGKEVHSGVCTDPQPLKEQPALNDSRYCLSSRLRVSATFWQNPRNHFRCQVQFYGLSENDEWTQDRAKPVTQIVSAEAWGRADDVIKIHWQEKKSNTILGSQEGNTMKTNDTYMKFSWLTVPEKSLDKEHRCIVRHENNKNGVDQEIIFPPIKTDVITMDPKDNCSKDANDTLLLQLTNTSAYYMYLLLLLKSVVYFAIITCCLLRRTAFCCNGEKS

SEQ ID NO: 16022 - protein, 860 aa, synthetic construct
MALPVTALLLPLALLLHAARPEVQLVESGGGLVQPGGSLRLSCAASGFSFSDFWMSWVRQAPGKGLEWVATISQAGSEKDYVDSVKGRFTISRDNAKKSLYLQMNSLRAEDTAVYYCASGVYSFDYRGQGTLVTVSSGTGGGGSGGGGSGGGGSEFEIVMTQSPATLSVSPGERATLSCRASQSVSRNLAWYQQKPGQAPRLLIYGASTRATGIPARFSGSGSGTEFTLTIGSLQSEDFAVYYCQQYKTWPRTFGQGTNVEIKLEIQNPDPAVYQLRDSKSSDKSVCLFTDFDSQTNVSQSKDSDVYITDKCVLDMRSMDFKSNSAVAWSNKSDFACANAFNNSIIPEDTFFPSPESSDSTDHVKPKETENTKQPSKSCHKPKAIVHTEKVNMMSLTVLGLRMLFAKTVAVNFLLTAKLFFLRAKRSGSGVKQTLNFDLLKLAGDVESNPGPTSMDWIWRILFLVGAATGAHSFEQVQLQQWGAGLLKPSETLSLTCAVFGGSFSGYYWSWIRQPPGKGLEWIGEINHRGNTNDNPSLKSRVTISVDTSKNQFALKLSSVTAADTAVYYCARERGYTYGNFDHWGQGTLVTVSSTREDLKNVFPPEVAVFEPSEAEISHTQKATLVCLATGFYPDHVELSWWVNGKEVHSGVCTDPQPLKEQPALNDSRYCLSSRLRVSATFWQNPRNHFRCQVQFYGLSENDEWTQDRAKPVTQIVSAEAWGRADDVIKIHWQEKKSNTILGSQEGNTMKTNDTYMKFSWLTVPEKSLDKEHRCIVRHENNKNGVDQEIIFPPIKTDVITMDPKDNCSKDANDTLLLQLTNTSAYYMYLLLLLKSVVYFAIITCCLLRRTAFCCNGEKS

SEQ ID NO: 16023 - protein, 861 aa, synthetic construct
MALPVTALLLPLALLLHAARPEVQLVESGGGLVQPGGSLRLSCAASGFSFSDFWMSWVRQAPGKGLEWVATISQAGSEKDYVDSVKGRFTISRDNAKKSLYLQMNSLRAEDTAVYYCASGVYSFDYRGQGTLVTVSSGTGGGGSGGGGSGGGGSEFEIVMTPSSATLSVSPGERATLSCRASQSVSRNLAWYQQKPGQAPRLLIYGASTRATGIPARFSGSGSGTEFTLTISSLQSEDFAVYYCHQYSNWMCSFGQGTKLEIKLEIQNPDPAVYQLRDSKSSDKSVCLFTDFDSQTNVSQSKDSDVYITDKCVLDMRSMDFKSNSAVAWSNKSDFACANAFNNSIIPEDTFFPSPESSDSTDHVKPKETENTKQPSKSCHKPKAIVHTEKVNMMSLTVLGLRMLFAKTVAVNFLLTAKLFFLRAKRSGSGVKQTLNFDLLKLAGDVESNPGPTSMDWIWRILFLVGAATGAHSFEEVQLLESGGGLVQPGGSLRLSCAASGFTFSRYAMNWVRQAPGKGLEWVSGISGSGGRTYYADSVKGRFTISRDNSKNTLYLQMNSLRAEDTAVYYCAKDRDFWSGPFDYWGQGTLVTVSSTREDLKNVFPPEVAVFEPSEAEISHTQKATLVCLATGFYPDHVELSWWVNGKEVHSGVCTDPQPLKEQPALNDSRYCLSSRLRVSATFWQNPRNHFRCQVQFYGLSENDEWTQDRAKPVTQIVSAEAWGRADDVIKIHWQEKKSNTILGSQEGNTMKTNDTYMKFSWLTVPEKSLDKEHRCIVRHENNKNGVDQEIIFPPIKTDVITMDPKDNCSKDANDTLLLQLTNTSAYYMYLLLLLKSVVYFAIITCCLLRRTAFCCNGEKS

SEQ ID NO: 16024 - protein, 866 aa, synthetic construct
MALPVTALLLPLALLLHAARPEVQLVESGGGLVQPGGSLRLSCAASGFSFSDFWMSWVRQAPGKGLEWVATISQAGSEKDYVDSVKGRFTISRDNAKKSLYLQMNSLRAEDTAVYYCASGVYSFDYRGQGTLVTVSSGTGGGGSGGGGSGGGGSEFDIQMTQSPSSLSASVGDRVTITCKASKNIRSYLAWYQQKPGKAPKLLIYSGSTLHSGVPSRFSGSGSGTDFTLTISSLQPEDFATYYCQQHHEYPLTFGQGTKVEIKRLEIQNPDPAVYQLRDSKSSDKSVCLFTDFDSQTNVSQSKDSDVYITDKCVLDMRSMDFKSNSAVAWSNKSDFACANAFNNSIIPEDTFFPSPESSDSTDHVKPKETENTKQPSKSCHKPKAIVHTEKVNMMSLTVLGLRMLFAKTVAVNFLLTAKLFFLRAKRSGSGVKQTLNFDLLKLAGDVESNPGPTSMDWIWRILFLVGAATGAHSFEQVQLQESGPGLVKPSETLSLTCTVSGYTITSGYDWSWIRQPPGKGLEWIGYINYGGSTNYKPSLGSRVTISVDTSKNQFSLKLSSVTAADTAVYYCARYNEYKSYIYDWYFDFWGQGTLVTVSSTREDLKNVFPPEVAVFEPSEAEISHTQKATLVCLATGFYPDHVELSWWVNGKEVHSGVCTDPQPLKEQPALNDSRYCLSSRLRVSATFWQNPRNHFRCQVQFYGLSENDEWTQDRAKPVTQIVSAEAWGRADDVIKIHWQEKKSNTILGSQEGNTMKTNDTYMKFSWLTVPEKSLDKEHRCIVRHENNKNGVDQEIIFPPIKTDVITMDPKDNCSKDANDTLLLQLTNTSAYYMYLLLLLKSVVYFAIITCCLLRRTAFCCNGEKS

SEQ ID NO: 16025 - protein, 868 aa, synthetic construct
MALPVTALLLPLALLLHAARPEVQLVESGGGLVQPGGSLRLSCAASGFSFSDFWMSWVRQAPGKGLEWVATISQAGSEKDYVDSVKGRFTISRDNAKKSLYLQMNSLRAEDTAVYYCASGVYSFDYRGQGTLVTVSSGTGGGGSGGGGSGGGGSEFQSVVTQPPSVSAAPGQKVTISCSGSSSNIGNNYVSWYQQLPGTAPKLLIYDNNKRPSGIPDRFSGSKSGTSATLGITGLQTGDEADYYCGTWDGSLYTMLFGGGTKLTVLLEIQNPDPAVYQLRDSKSSDKSVCLFTDFDSQTNVSQSKDSDVYITDKCVLDMRSMDFKSNSAVAWSNKSDFACANAFNNSIIPEDTFFPSPESSDSTDHVKPKETENTKQPSKSCHKPKAIVHTEKVNMMSLTVLGLRMLFAKTVAVNFLLTAKLFFLRAKRSGSGVKQTLNFDLLKLAGDVESNPGPTSMDWIWRILFLVGAATGAHSFEEVQLVESGGGLVKPGGSLRLSCAASGFTFSNAWMSWVRQAPGKGLEWVGFIRSKAYGGTTEYAASVKGRFTISRDDSKSIAYLQMNNLKTEDTAVYYCARDGLYSSSWYDSDYWGQGTLVTVSSTREDLKNVFPPEVAVFEPSEAEISHTQKATLVCLATGFYPDHVELSWWVNGKEVHSGVCTDPQPLKEQPALNDSRYCLSSRLRVSATFWQNPRNHFRCQVQFYGLSENDEWTQDRAKPVTQIVSAEAWGRADDVIKIHWQEKKSNTILGSQEGNTMKTNDTYMKFSWLTVPEKSLDKEHRCIVRHENNKNGVDQEIIFPPIKTDVITMDPKDNCSKDANDTLLLQLTNTSAYYMYLLLLLKSVVYFAIITCCLLRRTAFCCNGEKS

SEQ ID NO: 16026 - protein, 873 aa, synthetic construct
MALPVTALLLPLALLLHAARPEVQLVESGGGLVQPGGSLRLSCAASGFSFSDFWMSWVRQAPGKGLEWVATISQAGSEKDYVDSVKGRFTISRDNAKKSLYLQMNSLRAEDTAVYYCASGVYSFDYRGQGTLVTVSSGTGGGGSGGGGSGGGGSEFQSVLTQPPSVSGAPGQRVTISCTGSSSNIGAGYDVHWYQQLPGTAPKLLIFGNSNRPSGVPDRFSGFKSGTSASLAITGLQAEDEADYFCQSYDSSLSGSGVFGTGTKVTVLGLEIQNPDPAVYQLRDSKSSDKSVCLFTDFDSQTNVSQSKDSDVYITDKCVLDMRSMDFKSNSAVAWSNKSDFACANAFNNSIIPEDTFFPSPESSDSTDHVKPKETENTKQPSKSCHKPKAIVHTEKVNMMSLTVLGLRMLFAKTVAVNFLLTAKLFFLRAKRSGSGVKQTLNFDLLKLAGDVESNPGPTSMDWIWRILFLVGAATGAHSFEQMQLVQSGGGLVQPGRSLRLSCAASGFTFDDYAMHWVRQAPGKGLEWVSGISWNSGSIGYADSVKGRFTISRDNAKNSLYLQMNSLRAEDTALYYCAKDIHSGSYYGLLYYAMDVWGQGTTVTVSSTREDLKNVFPPEVAVFEPSEAEISHTQKATLVCLATGFYPDHVELSWWVNGKEVHSGVCTDPQPLKEQPALNDSRYCLSSRLRVSATFWQNPRNHFRCQVQFYGLSENDEWTQDRAKPVTQIVSAEAWGRADDVIKIHWQEKKSNTILGSQEGNTMKTNDTYMKFSWLTVPEKSLDKEHRCIVRHENNKNGVDQEIIFPPIKTDVITMDPKDNCSKDANDTLLLQLTNTSAYYMYLLLLLKSVVYFAIITCCLLRRTAFCCNGEKS

SEQ ID NO: 16027 - protein, 873 aa, synthetic construct
MALPVTALLLPLALLLHAARPEVQLVESGGGLVQPGGSLRLSCAASGFSFSDFWMSWVRQAPGKGLEWVATISQAGSEKDYVDSVKGRFTISRDNAKKSLYLQMNSLRAEDTAVYYCASGVYSFDYRGQGTLVTVSSGTGGGGSGGGGSGGGGSEFLPVLTQPPSASGTPGQRVTISCSGRSSNIGSNSVNWYRQLPGAAPKLLIYSNNQRPPGVPVRFSGSKSGTSASLAISGLQSEDEATYYCATWDDNLNVHYVFGTGTKVTVLGSRLEIQNPDPAVYQLRDSKSSDKSVCLFTDFDSQTNVSQSKDSDVYITDKCVLDMRSMDFKSNSAVAWSNKSDFACANAFNNSIIPEDTFFPSPESSDSTDHVKPKETENTKQPSKSCHKPKAIVHTEKVNMMSLTVLGLRMLFAKTVAVNFLLTAKLFFLRAKRSGSGVKQTLNFDLLKLAGDVESNPGPTSMDWIWRILFLVGAATGAHSFELEMAQVQLVQSGAEVKKPGSSVKVSCKASGGTFSSYAISWVRQAPGQGLEWMGRIIPILGIANYAQKFQGRVTITADKSTSTAYMELSSLRSEDTAVYYCARGGYYSHDMWSEDWGQGTLVTVSSTREDLKNVFPPEVAVFEPSEAEISHTQKATLVCLATGFYPDHVELSWWVNGKEVHSGVCTDPQPLKEQPALNDSRYCLSSRLRVSATFWQNPRNHFRCQVQFYGLSENDEWTQDRAKPVTQIVSAEAWGRADDVIKIHWQEKKSNTILGSQEGNTMKTNDTYMKFSWLTVPEKSLDKEHRCIVRHENNKNGVDQEIIFPPIKTDVITMDPKDNCSKDANDTLLLQLTNTSAYYMYLLLLLKSVVYFAIITCCLLRRTAFCCNGEKS

SEQ ID NO: 16028 - protein, 867 aa, synthetic construct
MALPVTALLLPLALLLHAARPEVQLVESGGGLVQPGGSLRLSCAASGFSFSDFWMSWVRQAPGKGLEWVATISQAGSEKDYVDSVKGRFTISRDNAKKSLYLQMNSLRAEDTAVYYCASGVYSFDYRGQGTLVTVSSGTGGGGSGGGGSGGGGSEFDFVMTQSPDSLAVSLGERVTMSCKSSQSLLNSGNQKNYLTWYQQKPGQPPKLLIYWASTRESGVPDRFSGSGSGTDFTLTISSLQAEDVAVYYCQNDYSYPYTFGQGTKLEIKLEIQNPDPAVYQLRDSKSSDKSVCLFTDFDSQTNVSQSKDSDVYITDKCVLDMRSMDFKSNSAVAWSNKSDFACANAFNNSIIPEDTFFPSPESSDSTDHVKPKETENTKQPSKSCHKPKAIVHTEKVNMMSLTVLGLRMLFAKTVAVNFLLTAKLFFLRAKRSGSGVKQTLNFDLLKLAGDVESNPGPTSMDWIWRILFLVGAATGAHSFEEVQLVQSGAELKKPGASVKVSCKASGYTFTDYYMKWVRQAPGQGLEWIGDIIPSNGATFYNQKFKGRVTITVDKSTSTAYMELSSLRSEDTAVYYCARSHLLRASWFAYWGQGTLVTVSSTREDLKNVFPPEVAVFEPSEAEISHTQKATLVCLATGFYPDHVELSWWVNGKEVHSGVCTDPQPLKEQPALNDSRYCLSSRLRVSATFWQNPRNHFRCQVQFYGLSENDEWTQDRAKPVTQIVSAEAWGRADDVIKIHWQEKKSNTILGSQEGNTMKTNDTYMKFSWLTVPEKSLDKEHRCIVRHENNKNGVDQEIIFPPIKTDVITMDPKDNCSKDANDTLLLQLTNTSAYYMYLLLLLKSVVYFAIITCCLLRRTAFCCNGEKS

SEQ ID NO: 16029 - protein, 867 aa, synthetic construct
MALPVTALLLPLALLLHAARPEVQLVESGGGLVQPGGSLRLSCAASGFSFSDFWMSWVRQAPGKGLEWVATISQAGSEKDYVDSVKGRFTISRDNAKKSLYLQMNSLRAEDTAVYYCASGVYSFDYRGQGTLVTVSSGTGGGGSGGGGSGGGGSEFDFVMTQSPDSLAVSLGERVTMSCKSSQSLLNSGNQKNYLTWYQQKPGQPPKLLIYWASTRESGVPDRFSGSGSGTDFTLTISSLQAEDVAVYYCQNDYSYPYTFGQGTKLEIKLEIQNPDPAVYQLRDSKSSDKSVCLFTDFDSQTNVSQSKDSDVYITDKCVLDMRSMDFKSNSAVAWSNKSDFACANAFNNSIIPEDTFFPSPESSDSTDHVKPKETENTKQPSKSCHKPKAIVHTEKVNMMSLTVLGLRMLFAKTVAVNFLLTAKLFFLRAKRSGSGVKQTLNFDLLKLAGDVESNPGPTSMDWIWRILFLVGAATGAHSFEQVQLVQSGAELKKPGASVKVSCKASGYTFTDYYMKWVRQAPGQGLEWIGDIIPSNGATFYNQKFKGRVTITVDKSTSTAYMELSSLRSEDTAVYYCARSHLLRASWFAYWGQGTLVTVSSTREDLKNVFPPEVAVFEPSEAEISHTQKATLVCLATGFYPDHVELSWWVNGKEVHSGVCTDPQPLKEQPALNDSRYCLSSRLRVSATFWQNPRNHFRCQVQFYGLSENDEWTQDRAKPVTQIVSAEAWGRADDVIKIHWQEKKSNTILGSQEGNTMKTNDTYMKFSWLTVPEKSLDKEHRCIVRHENNKNGVDQEIIFPPIKTDVITMDPKDNCSKDANDTLLLQLTNTSAYYMYLLLLLKSVVYFAIITCCLLRRTAFCCNGEKS

SEQ ID NO: 16030 - protein, 857 aa, synthetic construct
MALPVTALLLPLALLLHAARPEVQLVESGGGLVQPGGSLRLSCAASGFSFSDFWMSWVRQAPGKGLEWVATISQAGSEKDYVDSVKGRFTISRDNAKKSLYLQMNSLRAEDTAVYYCASGVYSFDYRGQGTLVTVSSGTGGGGSGGGGSGGGGSEFDVQITQSPSYLAASPGETITINCRASKSISKDLAWYQEKPGKTNKLLIYSGSTLQSGIPSRFSGSGSGTDFTLTISSLEPEDFAMYYCQQHNKYPYTFGGGTKLEIKRLEIQNPDPAVYQLRDSKSSDKSVCLFTDFDSQTNVSQSKDSDVYITDKCVLDMRSMDFKSNSAVAWSNKSDFACANAFNNSIIPEDTFFPSPESSDSTDHVKPKETENTKQPSKSCHKPKAIVHTEKVNMMSLTVLGLRMLFAKTVAVNFLLTAKLFFLRAKRSGSGVKQTLNFDLLKLAGDVESNPGPTSMDWIWRILFLVGAATGAHSFEQVQLQQPGAELVRPGASVKLSCKASGYTFTSYWMNWVKQRPDQGLEWIGRIDPYDSETHYNQKFKDKAILTVDKSSSTAYMQLSSLTSEDSAVYYCARGNWDDYWGQGTTLTVSSTREDLKNVFPPEVAVFEPSEAEISHTQKATLVCLATGFYPDHVELSWWVNGKEVHSGVCTDPQPLKEQPALNDSRYCLSSRLRVSATFWQNPRNHFRCQVQFYGLSENDEWTQDRAKPVTQIVSAEAWGRADDVIKIHWQEKKSNTILGSQEGNTMKTNDTYMKFSWLTVPEKSLDKEHRCIVRHENNKNGVDQEIIFPPIKTDVITMDPKDNCSKDANDTLLLQLTNTSAYYMYLLLLLKSVVYFAIITCCLLRRTAFCCNGEKS

SEQ ID NO: 16031 - protein, 859 aa, synthetic construct
MALPVTALLLPLALLLHAARPEVQLVESGGGLVQPGGSLRLSCAASGFSFSDFWMSWVRQAPGKGLEWVATISQAGSEKDYVDSVKGRFTISRDNAKKSLYLQMNSLRAEDTAVYYCASGVYSFDYRGQGTLVTVSSGTGGGGSGGGGSGGGGSEFEIVLTQSPTSMTASPGEQVTITCRASSSINYMHWYQQKPGASPRPWIYETSKLASGVPDRFSGSASGTSYSLTINNMEAEDAATYYCQQWNYPSWTFGGGTKLELKLEIQNPDPAVYQLRDSKSSDKSVCLFTDFDSQTNVSQSKDSDVYITDKCVLDMRSMDFKSNSAVAWSNKSDFACANAFNNSIIPEDTFFPSPESSDSTDHVKPKETENTKQPSKSCHKPKAIVHTEKVNMMSLTVLGLRMLFAKTVAVNFLLTAKLFFLRAKRSGSGVKQTLNFDLLKLAGDVESNPGPTSMDWIWRILFLVGAATGAHSFEEVQLVESGGGLVQPGRSLKLSCAASGFTFSDYNMAWVRQAPKKGLEWVATILYDGGRTYYRGSVKGRFTISRDNAKSTLYLRMDSLRSEDTATYYCATHSRGTDYFDYWGQGVMVTVSSTREDLKNVFPPEVAVFEPSEAEISHTQKATLVCLATGFYPDHVELSWWVNGKEVHSGVCTDPQPLKEQPALNDSRYCLSSRLRVSATFWQNPRNHFRCQVQFYGLSENDEWTQDRAKPVTQIVSAEAWGRADDVIKIHWQEKKSNTILGSQEGNTMKTNDTYMKFSWLTVPEKSLDKEHRCIVRHENNKNGVDQEIIFPPIKTDVITMDPKDNCSKDANDTLLLQLTNTSAYYMYLLLLLKSVVYFAIITCCLLRRTAFCCNGEKS

SEQ ID NO: 16032 - protein, 868 aa, synthetic construct
MALPVTALLLPLALLLHAARPEVQLVESGGGLVQPGGSLRLSCAASGFSFSDFWMSWVRQAPGKGLEWVATISQAGSEKDYVDSVKGRFTISRDNAKKSLYLQMNSLRAEDTAVYYCASGVYSFDYRGQGTLVTVSSGTGGGGSGGGGSGGGGSEFDIVMTQSPSSLAVSEGETVTINCKSSQSFLSSGDGKNYVAWYQYKPGQSPKLLIYWASTRQSGVPDRFIGSGSGTDFTLTISTVQAEDLAIYYCQQYYDTPLTFGSGTKLEIKLEIQNPDPAVYQLRDSKSSDKSVCLFTDFDSQTNVSQSKDSDVYITDKCVLDMRSMDFKSNSAVAWSNKSDFACANAFNNSIIPEDTFFPSPESSDSTDHVKPKETENTKQPSKSCHKPKAIVHTEKVNMMSLTVLGLRMLFAKTVAVNFLLTAKLFFLRAKRSGSGVKQTLNFDLLKLAGDVESNPGPTSMDWIWRILFLVGAATGAHSFEEVKLQESGPSLVQSSQTLSLTCTVSGFSLTSYHIHWVRQTPGKGLEWMGVMWSDGDTSYNSALKSRLSISRDTSQSQVFLKMNSLQTEDTATYYCARGYYSSYLYLWFAYWGQGTLVTVSSTREDLKNVFPPEVAVFEPSEAEISHTQKATLVCLATGFYPDHVELSWWVNGKEVHSGVCTDPQPLKEQPALNDSRYCLSSRLRVSATFWQNPRNHFRCQVQFYGLSENDEWTQDRAKPVTQIVSAEAWGRADDVIKIHWQEKKSNTILGSQEGNTMKTNDTYMKFSWLTVPEKSLDKEHRCIVRHENNKNGVDQEIIFPPIKTDVITMDPKDNCSKDANDTLLLQLTNTSAYYMYLLLLLKSVVYFAIITCCLLRRTAFCCNGEKS

SEQ ID NO: 16033 - protein, 872 aa, synthetic construct
MALPVTALLLPLALLLHAARPEVQLVESGGGLVQPGGSLRLSCAASGFSFSDFWMSWVRQAPGKGLEWVATISQAGSEKDYVDSVKGRFTISRDNAKKSLYLQMNSLRAEDTAVYYCASGVYSFDYRGQGTLVTVSSGTGGGGSGGGGSGGGGSEFDVLMTQTPVSLPVSLGGQVSISCRSSQSLVHSDGDTYLHWYLQKPGQSPQLLIYRVSNRFSGVPDRFSGSGSGTDFTLKISRVEPEDLGLYYCLQTTHFPPWTFGGGTKLEMKLEIQNPDPAVYQLRDSKSSDKSVCLFTDFDSQTNVSQSKDSDVYITDKCVLDMRSMDFKSNSAVAWSNKSDFACANAFNNSIIPEDTFFPSPESSDSTDHVKPKETENTKQPSKSCHKPKAIVHTEKVNMMSLTVLGLRMLFAKTVAVNFLLTAKLFFLRAKRSGSGVKQTLNFDLLKLAGDVESNPGPTSMDWIWRILFLVGAATGAHSFEQVQLQQSGPELRRPGSSVRLSCKASGYRIKDFLIHWIKNRPEHGLEWIGWIDPEDGETKYAQKFQTKATLTADTSSNTAYMQLSSLTSEDTATYFCARWGDVYYGLMRGHVMDAWGQGTSVTVSSTREDLKNVFPPEVAVFEPSEAEISHTQKATLVCLATGFYPDHVELSWWVNGKEVHSGVCTDPQPLKEQPALNDSRYCLSSRLRVSATFWQNPRNHFRCQVQFYGLSENDEWTQDRAKPVTQIVSAEAWGRADDVIKIHWQEKKSNTILGSQEGNTMKTNDTYMKFSWLTVPEKSLDKEHRCIVRHENNKNGVDQEIIFPPIKTDVITMDPKDNCSKDANDTLLLQLTNTSAYYMYLLLLLKSVVYFAIITCCLLRRTAFCCNGEKS

SEQ ID NO: 16034 - protein, 867 aa, synthetic construct
MALPVTALLLPLALLLHAARPEVQLVESGGGLVQPGGSLRLSCAASGFSFSDFWMSWVRQAPGKGLEWVATISQAGSEKDYVDSVKGRFTISRDNAKKSLYLQMNSLRAEDTAVYYCASGVYSFDYRGQGTLVTVSSGTGGGGSGGGGSGGGGSEFDIVMTQSPATLSLSPGERATLSCRSSKSLQNVNGNTYLYWFQQKPGQSPQLLIYRMSNLNSGVPDRFSGSGSGTEFTLTISSLEPEDFAVYYCMQHLEYPITFGAGTKLEIKLEIQNPDPAVYQLRDSKSSDKSVCLFTDFDSQTNVSQSKDSDVYITDKCVLDMRSMDFKSNSAVAWSNKSDFACANAFNNSIIPEDTFFPSPESSDSTDHVKPKETENTKQPSKSCHKPKAIVHTEKVNMMSLTVLGLRMLFAKTVAVNFLLTAKLFFLRAKRSGSGVKQTLNFDLLKLAGDVESNPGPTSMDWIWRILFLVGAATGAHSFEEVQLVESGGGLVKPGGSLKLSCAASGYTFTSYVMHWVRQAPGKGLEWIGYINPYNDGTKYNEKFQGRVTISSDKSISTAYMELSSLRSEDTAMYYCARGTYYYGTRVFDYWGQGTLVTVSSTREDLKNVFPPEVAVFEPSEAEISHTQKATLVCLATGFYPDHVELSWWVNGKEVHSGVCTDPQPLKEQPALNDSRYCLSSRLRVSATFWQNPRNHFRCQVQFYGLSENDEWTQDRAKPVTQIVSAEAWGRADDVIKIHWQEKKSNTILGSQEGNTMKTNDTYMKFSWLTVPEKSLDKEHRCIVRHENNKNGVDQEIIFPPIKTDVITMDPKDNCSKDANDTLLLQLTNTSAYYMYLLLLLKSVVYFAIITCCLLRRTAFCCNGEKS

SEQ ID NO: 16035 - protein, 863 aa, synthetic construct
MALPVTALLLPLALLLHAARPEVQLVESGGGLVQPGGSLRLSCAASGFSFSDFWMSWVRQAPGKGLEWVATISQAGSEKDYVDSVKGRFTISRDNAKKSLYLQMNSLRAEDTAVYYCASGVYSFDYRGQGTLVTVSSGTGGGGSGGGGSGGGGSEFDIQMTQSPSSLSASVGDRVTITCKASDHINNWLAWYQQKPGQAPKLLIYGATTLETGVPSRFSGSGSGTDYTLTISSLQPEDFATYYCQQSWNTPWTFGQGTKLEIKRLEIQNPDPAVYQLRDSKSSDKSVCLFTDFDSQTNVSQSKDSDVYITDKCVLDMRSMDFKSNSAVAWSNKSDFACANAFNNSIIPEDTFFPSPESSDSTDHVKPKETENTKQPSKSCHKPKAIVHTEKVNMMSLTVLGLRMLFAKTVAVNFLLTAKLFFLRAKRSGSGVKQTLNFDLLKLAGDVESNPGPTSMDWIWRILFLVGAATGAHSFEQVQLQQPGAELVKPGASVKMSCKASGYAFSSYWINWMKQKPGQGLEWIGQIYPGDGDTNYNGKFKGRATLTADTSSSTAYMQLSSLTSEDSAVYFCARSITTVVGCAMDYWGQGTSVTVSSTREDLKNVFPPEVAVFEPSEAEISHTQKATLVCLATGFYPDHVELSWWVNGKEVHSGVCTDPQPLKEQPALNDSRYCLSSRLRVSATFWQNPRNHFRCQVQFYGLSENDEWTQDRAKPVTQIVSAEAWGRADDVIKIHWQEKKSNTILGSQEGNTMKTNDTYMKFSWLTVPEKSLDKEHRCIVRHENNKNGVDQEIIFPPIKTDVITMDPKDNCSKDANDTLLLQLTNTSAYYMYLLLLLKSVVYFAIITCCLLRRTAFCCNGEKS

SEQ ID NO: 16036 - protein, 865 aa, synthetic construct
MALPVTALLLPLALLLHAARPEVQLVESGGGLVQPGGSLRLSCAASGFSFSDFWMSWVRQAPGKGLEWVATISQAGSEKDYVDSVKGRFTISRDNAKKSLYLQMNSLRAEDTAVYYCASGVYSFDYRGQGTLVTVSSGTGGGGSGGGGSGGGGSEFQIVLSQSPAILSASPGEKVTMTCRASSSVSYMHWYQQKPGSSPKPWIYATSNLASGVPARFSGSGSGTSYSFTISRVEAEDAATYYCQQWTFNPPTFGGGTRLEIKRTVAALEIQNPDPAVYQLRDSKSSDKSVCLFTDFDSQTNVSQSKDSDVYITDKCVLDMRSMDFKSNSAVAWSNKSDFACANAFNNSIIPEDTFFPSPESSDSTDHVKPKETENTKQPSKSCHKPKAIVHTEKVNMMSLTVLGLRMLFAKTVAVNFLLTAKLFFLRAKRSGSGVKQTLNFDLLKLAGDVESNPGPTSMDWIWRILFLVGAATGAHSFEQAYLQQSGAELVRPGASVKMSCKASGYTFTSYNMHWVKQTPRQGLEWIGGIYPGNGDTSYNQKFKGKATLTVGKSSSTAYMQLSSLTSEDSAVYFCARYDYNYAMDYWGQGTSVTVSSASTREDLKNVFPPEVAVFEPSEAEISHTQKATLVCLATGFYPDHVELSWWVNGKEVHSGVCTDPQPLKEQPALNDSRYCLSSRLRVSATFWQNPRNHFRCQVQFYGLSENDEWTQDRAKPVTQIVSAEAWGRADDVIKIHWQEKKSNTILGSQEGNTMKTNDTYMKFSWLTVPEKSLDKEHRCIVRHENNKNGVDQEIIFPPIKTDVITMDPKDNCSKDANDTLLLQLTNTSAYYMYLLLLLKSVVYFAIITCCLLRRTAFCCNGEKS

SEQ ID NO: 16037 - protein, 863 aa, synthetic construct
MALPVTALLLPLALLLHAARPEVQLVESGGGLVQPGGSLRLSCAASGFSFSDFWMSWVRQAPGKGLEWVATISQAGSEKDYVDSVKGRFTISRDNAKKSLYLQMNSLRAEDTAVYYCASGVYSFDYRGQGTLVTVSSGTGGGGSGGGGSGGGGSEFEIVLTQSPATLSLSPGERATLSCRASQSVSSYLAWYQQKPGQAPRLLIYDASNRATGIPARFSGSGSGTDFTLTISSLEPEDFAVYYCQQRSNWPITFGQGTRLEIKLEIQNPDPAVYQLRDSKSSDKSVCLFTDFDSQTNVSQSKDSDVYITDKCVLDMRSMDFKSNSAVAWSNKSDFACANAFNNSIIPEDTFFPSPESSDSTDHVKPKETENTKQPSKSCHKPKAIVHTEKVNMMSLTVLGLRMLFAKTVAVNFLLTAKLFFLRAKRSGSGVKQTLNFDLLKLAGDVESNPGPTSMDWIWRILFLVGAATGAHSFEEVQLVESGGGLVQPDRSLRLSCAASGFTFHDYAMHWVRQAPGKGLEWVSTISWNSGTIGYADSVKGRFTISRDNAKNSLYLQMNSLRAEDTALYYCAKDIQYGNYYYGMDVWGQGTTVTVSSTREDLKNVFPPEVAVFEPSEAEISHTQKATLVCLATGFYPDHVELSWWVNGKEVHSGVCTDPQPLKEQPALNDSRYCLSSRLRVSATFWQNPRNHFRCQVQFYGLSENDEWTQDRAKPVTQIVSAEAWGRADDVIKIHWQEKKSNTILGSQEGNTMKTNDTYMKFSWLTVPEKSLDKEHRCIVRHENNKNGVDQEIIFPPIKTDVITMDPKDNCSKDANDTLLLQLTNTSAYYMYLLLLLKSVVYFAIITCCLLRRTAFCCNGEKS

SEQ ID NO: 16038 - protein, 858 aa, synthetic construct
MALPVTALLLPLALLLHAARPEVQLVESGGGLVQPGGSLRLSCAASGFSFSDFWMSWVRQAPGKGLEWVATISQAGSEKDYVDSVKGRFTISRDNAKKSLYLQMNSLRAEDTAVYYCASGVYSFDYRGQGTLVTVSSGTGGGGSGGGGSGGGGSEFDIQMTQSPSSLSASVGDRVTINCKASQDINSYLSWFQQKPGKAPKTLIYRANRLVDGVPSRFSGSGSGQDYTLTISSLQPEDFATYYCLQYDEFPLTFGGGTKVEIKLEIQNPDPAVYQLRDSKSSDKSVCLFTDFDSQTNVSQSKDSDVYITDKCVLDMRSMDFKSNSAVAWSNKSDFACANAFNNSIIPEDTFFPSPESSDSTDHVKPKETENTKQPSKSCHKPKAIVHTEKVNMMSLTVLGLRMLFAKTVAVNFLLTAKLFFLRAKRSGSGVKQTLNFDLLKLAGDVESNPGPTSMDWIWRILFLVGAATGAHSFEQVQLVQSGAEVKKPGASVKVSCKASGYTFTNYDINWVRQAPGQGLEWIGWIYPGDGSTKYNEKFKAKATLTADTSTSTAYMELRSLRSDDTAVYYCASGYEDAMDYWGQGTTVTVSSTREDLKNVFPPEVAVFEPSEAEISHTQKATLVCLATGFYPDHVELSWWVNGKEVHSGVCTDPQPLKEQPALNDSRYCLSSRLRVSATFWQNPRNHFRCQVQFYGLSENDEWTQDRAKPVTQIVSAEAWGRADDVIKIHWQEKKSNTILGSQEGNTMKTNDTYMKFSWLTVPEKSLDKEHRCIVRHENNKNGVDQEIIFPPIKTDVITMDPKDNCSKDANDTLLLQLTNTSAYYMYLLLLLKSVVYFAIITCCLLRRTAFCCNGEKS

SEQ ID NO: 16039 - protein, 860 aa, synthetic construct
MALPVTALLLPLALLLHAARPEVQLVESGGGLVQPGGSLRLSCAASGFSFSDFWMSWVRQAPGKGLEWVATISQAGSEKDYVDSVKGRFTISRDNAKKSLYLQMNSLRAEDTAVYYCASGVYSFDYRGQGTLVTVSSGTGGGGSGGGGSGGGGSEFDIVMTQTPLSLSVTPGQPASISCKSSQSLLDGDGKTYLNWLLQKPGQSPQRLIYLVSKLDSGVPDRFSGSGSGTDFTLKISRVEAEDVGVYYCWQGTHFPRTFGQGTKLEIKLEIQNPDPAVYQLRDSKSSDKSVCLFTDFDSQTNVSQSKDSDVYITDKCVLDMRSMDFKSNSAVAWSNKSDFACANAFNNSIIPEDTFFPSPESSDSTDHVKPKETENTKQPSKSCHKPKAIVHTEKVNMMSLTVLGLRMLFAKTVAVNFLLTAKLFFLRAKRSGSGVKQTLNFDLLKLAGDVESNPGPTSMDWIWRILFLVGAATGAHSFEQVQLVQSGAEVKKPGASVKVSCKASGYTFKDTYIHWVRQAPGQGLEWMGRIDPANGNTKYDPKFQGRVTMTRDTSISTAYMELSRLRSDDTAVYYCARRGGVDWGQGTLVTVSSTREDLKNVFPPEVAVFEPSEAEISHTQKATLVCLATGFYPDHVELSWWVNGKEVHSGVCTDPQPLKEQPALNDSRYCLSSRLRVSATFWQNPRNHFRCQVQFYGLSENDEWTQDRAKPVTQIVSAEAWGRADDVIKIHWQEKKSNTILGSQEGNTMKTNDTYMKFSWLTVPEKSLDKEHRCIVRHENNKNGVDQEIIFPPIKTDVITMDPKDNCSKDANDTLLLQLTNTSAYYMYLLLLLKSVVYFAIITCCLLRRTAFCCNGEKS

SEQ ID NO: 16040 - protein, 861 aa, synthetic construct
MALPVTALLLPLALLLHAARPEVQLVESGGGLVQPGGSLRLSCAASGFSFSDFWMSWVRQAPGKGLEWVATISQAGSEKDYVDSVKGRFTISRDNAKKSLYLQMNSLRAEDTAVYYCASGVYSFDYRGQGTLVTVSSGTGGGGSGGGGSGGGGSEFDIQMTQSPSSLSASVGDRVTITCKASQDVSTAVAWFQQKPGKAPKLLIYSPSYRYTGVPSRFSGSGSGTDFTLTISSLQPEDFTYYCQQLYSTPYTFGQGTKVEIKLEIQNPDPAVYQLRDSKSSDKSVCLFTDFDSQTNVSQSKDSDVYITDKCVLDMRSMDFKSNSAVAWSNKSDFACANAFNNSIIPEDTFFPSPESSDSTDHVKPKETENTKQPSKSCHKPKAIVHTEKVNMMSLTVLGLRMLFAKTVAVNFLLTAKLFFLRAKRSGSGVKQTLNFDLLKLAGDVESNPGPTSMDWIWRILFLVGAATGAHSFEEVQLVQSGAEVKKPGASVKVSCKASGYTFTDYYLDVVVRQAPGQGLEWIGRVNPYNGGTIYNQKFKGRVTLTRDTSTSTAYLELSSLRSEDTAVYYCARDHYRYDPLLDYWGQGTLVTVSSTREDLKNVFPPEVAVFEPSEAEISHTQKATLVCLATGFYPDHVELSWWVNGKEVHSGVCTDPQPLKEQPALNDSRYCLSSRLRVSATFWQNPRNHFRCQVQFYGLSENDEWTQDRAKPVTQIVSAEAWGRADDVIKIHWQEKKSNTILGSQEGNTMKTNDTYMKFSWLTVPEKSLDKEHRCIVRHENNKNGVDQEIIFPPIKTDVITMDPKDNCSKDANDTLLLQLTNTSAYYMYLLLLLKSVVYFAIITCCLLRRTAFCCNGEKS

SEQ ID NO: 16041 - protein, 867 aa, synthetic construct
MALPVTALLLPLALLLHAARPEVQLVESGGGLVQPGGSLRLSCAASGFSFSDFWMSWVRQAPGKGLEWVATISQAGSEKDYVDSVKGRFTISRDNAKKSLYLQMNSLRAEDTAVYYCASGVYSFDYRGQGTLVTVSSGTGGGGSGGGGSGGGGSEFDIQMTQSPSSLSASVGDRVTITCRASQSVSTSSYNYMHWYQQKPGKPPKLLIKYASNLESGVPSRFSGSGSGTDFTLTISSLQPEDFATYYCQHSWEIPLTFGQGTKVEIKLEIQNPDPAVYQLRDSKSSDKSVCLFTDFDSQTNVSQSKDSDVYITDKCVLDMRSMDFKSNSAVAWSNKSDFACANAFNNSIIPEDTFFPSPESSDSTDHVKPKETENTKQPSKSCHKPKAIVHTEKVNMMSLTVLGLRMLFAKTVAVNFLLTAKLFFLRAKRSGSGVKQTLNFDLLKLAGDVESNPGPTSMDWIWRILFLVGAATGAHSFEEVQLVQSGAEVKKPGASVKVSCKASGYSFTDYYMHWVRQAPGQGLEWIGRINPYNGAAFYSQNFKDRVTLTVDTSTSTAYLELSSLRSEDTAVYYCAIERGADLEGYAMDYWGQGTLVTVSSTREDLKNVFPPEVAVFEPSEAEISHTQKATLVCLATGFYPDHVELSWWVNGKEVHSGVCTDPQPLKEQPALNDSRYCLSSRLRVSATFWQNPRNHFRCQVQFYGLSENDEWTQDRAKPVTQIVSAEAWGRADDVIKIHWQEKKSNTILGSQEGNTMKTNDTYMKFSWLTVPEKSLDKEHRCIVRHENNKNGVDQEIIFPPIKTDVITMDPKDNCSKDANDTLLLQLTNTSAYYMYLLLLLKSVVYFAIITCCLLRRTAFCCNGEKS

SEQ ID NO: 16042 - protein, 865 aa, synthetic construct
MALPVTALLLPLALLLHAARPEVQLVESGGGLVQPGGSLRLSCAASGFSFSDFWMSWVRQAPGKGLEWVATISQAGSEKDYVDSVKGRFTISRDNAKKSLYLQMNSLRAEDTAVYYCASGVYSFDYRGQGTLVTVSSGTGGGGSGGGGSGGGGSEFEIVLTQSPATLSASPGERVTLTCRASSNVISSYVHWYQQKPGSSPRLFLYSTSNLASGVPSRFSGSGSGTDFTFTISSLEAEDAATYYCQQYSGYPLTFGQGTRLEIKLEIQNPDPAVYQLRDSKSSDKSVCLFTDFDSQTNVSQSKDSDVYITDKCVLDMRSMDFKSNSAVAWSNKSDFACANAFNNSIIPEDTFFPSPESSDSTDHVKPKETENTKQPSKSCHKPKAIVHTEKVNMMSLTVLGLRMLFAKTVAVNFLLTAKLFFLRAKRSGSGVKQTLNFDLLKLAGDVESNPGPTSMDWIWRILFLVGAATGAHSFEQVQLQESGPGLVKPSETLSLTCAVSGYSITSAYYWNWIRQPPGKGLEWIGYISYDGRNNYNPSLKNRITINPDTSKNQFSLQLNSVTPEDTAVYYCAREGDYDVGNYYAMDYWGQGTLVTVSSTREDLKNVFPPEVAVFEPSEAEISHTQKATLVCLATGFYPDHVELSWWVNGKEVHSGVCTDPQPLKEQPALNDSRYCLSSRLRVSATFWQNPRNHFRCQVQFYGLSENDEWTQDRAKPVTQIVSAEAWGRADDVIKIHWQEKKSNTILGSQEGNTMKTNDTYMKFSWLTVPEKSLDKEHRCIVRHENNKNGVDQEIIFPPIKTDVITMDPKDNCSKDANDTLLLQLTNTSAYYMYLLLLLKSVVYFAIITCCLLRRTAFCCNGEKS

SEQ ID NO: 16043 - protein, 865 aa, synthetic construct
MALPVTALLLPLALLLHAARPEVQLVESGGGLVQPGGSLRLSCAASGFSFSDFWMSWVRQAPGKGLEWVATISQAGSEKDYVDSVKGRFTISRDNAKKSLYLQMNSLRAEDTAVYYCASGVYSFDYRGQGTLVTVSSGTGGGGSGGGGSGGGGSEFEIVLTQSPATLSLSPGERATLSCRASSNVISSYVHWYQQKPGQAPRLLIYSTSNLASGIPARFSGSGSGTDFTLTISSLEPEDFAVYYCQQYSGYPLTFGQGTRLEIKLEIQNPDPAVYQLRDSKSSDKSVCLFTDFDSQTNVSQSKDSDVYITDKCVLDMRSMDFKSNSAVAWSNKSDFACANAFNNSIIPEDTFFPSPESSDSTDHVKPKETENTKQPSKSCHKPKAIVHTEKVNMMSLTVLGLRMLFAKTVAVNFLLTAKLFFLRAKRSGSGVKQTLNFDLLKLAGDVESNPGPTSMDWIWRILFLVGAATGAHSFEEVQLVESGGGLVQPGRSLRLSCAASGYSITSAYYWNWVRQAPGKGLEWVSYISYDGRNNYNPSLKNRFTISRDNAKKSLYLQMNSLRAEDTALYYCAKEGDYDVGNYYAMDYWGQGTTVTVSSTREDLKNVFPPEVAVFEPSEAEISHTQKATLVCLATGFYPDHVELSWWVNGKEVHSGVCTDPQPLKEQPALNDSRYCLSSRLRVSATFWQNPRNHFRCQVQFYGLSENDEWTQDRAKPVTQIVSAEAWGRADDVIKIHWQEKKSNTILGSQEGNTMKTNDTYMKFSWLTVPEKSLDKEHRCIVRHENNKNGVDQEIIFPPIKTDVITMDPKDNCSKDANDTLLLQLTNTSAYYMYLLLLLKSVVYFAIITCCLLRRTAFCCNGEKS

SEQ ID NO: 16044 - protein, 864 aa, synthetic construct
MALPVTALLLPLALLLHAARPEVQLVESGGGLVQPGGSLRLSCAASGFSFSDFWMSWVRQAPGKGLEWVATISQAGSEKDYVDSVKGRFTISRDNAKKSLYLQMNSLRAEDTAVYYCASGVYSFDYRGQGTLVTVSSGTGGGGSGGGGSGGGGSEFDVVMTQTPLSLPVSLGDQASISCRSSQSLVHSNGNTYLRWYLQKPGQSPKVLIYKVSNRVSGVPDRFSGSGSGTDFTLKINRVEAEDLGVYFCSQSTHVPWTFGGGTKLEIKLEIQNPDPAVYQLRDSKSSDKSVCLFTDFDSQTNVSQSKDSDVYITDKCVLDMRSMDFKSNSAVAWSNKSDFACANAFNNSIIPEDTFFPSPESSDSTDHVKPKETENTKQPSKSCHKPKAIVHTEKVNMMSLTVLGLRMLFAKTVAVNFLLTAKLFFLRAKRSGSGVKQTLNFDLLKLAGDVESNPGPTSMDWIWRILFLVGAATGAHSFEGVKLDETGGGLVQPGGAMKLSCVTSGFTFGHYWMNWVRQSPEKGLEWVAQFRNKPYNYETYYSDSVKGRFTISRDDSKSSVYLQMNNLRVEDTGIYYCTGASYGMEYLGQGTSVTVSTTREDLKNVFPPEVAVFEPSEAEISHTQKATLVCLATGFYPDHVELSWWVNGKEVHSGVCTDPQPLKEQPALNDSRYCLSSRLRVSATFWQNPRNHFRCQVQFYGLSENDEWTQDRAKPVTQIVSAEAWGRADDVIKIHWQEKKSNTILGSQEGNTMKTNDTYMKFSWLTVPEKSLDKEHRCIVRHENNKNGVDQEIIFPPIKTDVITMDPKDNCSKDANDTLLLQLTNTSAYYMYLLLLLKSVVYFAIITCCLLRRTAFCCNGEKS

SEQ ID NO: 16045 - protein, 870 aa, synthetic construct
MALPVTALLLPLALLLHAARPEVQLVESGGGLVQPGGSLRLSCAASGFSFSDFWMSWVRQAPGKGLEWVATISQAGSEKDYVDSVKGRFTISRDNAKKSLYLQMNSLRAEDTAVYYCASGVYSFDYRGQGTLVTVSSGTGGGGSGGGGSGGGGSEFQVQLVESGGNLVQPGGSLRLSCAASGFTFGSFSMSWVRQAPGGGLEWVAGLSARSSLTHYADSVKGRFTISRDNAKNSVYLQMNSLRVEDTAVYYCARRSYDSSGYWGHFYSYMDVWGQGTLVTVSLEIQNPDPAVYQLRDSKSSDKSVCLFTDFDSQTNVSQSKDSDVYITDKCVLDMRSMDFKSNSAVAWSNKSDFACANAFNNSIIPEDTFFPSPESSDSTDHVKPKETENTKQPSKSCHKPKAIVHTEKVNMMSLTVLGLRMLFAKTVAVNFLLTAKLFFLRAKRSGSGVKQTLNFDLLKLAGDVESNPGPTSMDWIWRILFLVGAATGAHSFESVLTQPSSVSAAPGQKVTISCSGSTSNIGNNYVSWYQQHPGKAPKLMIYDVSKRPSGVPDRFSGSKSGNSASLDISGLQSEDEADYYCAAWDDSLSEFLFGTGTKLTVLGTREDLKNVFPPEVAVFEPSEAEISHTQKATLVCLATGFYPDHVELSWWVNGKEVHSGVCTDPQPLKEQPALNDSRYCLSSRLRVSATFWQNPRNHFRCQVQFYGLSENDEWTQDRAKPVTQIVSAEAWGRADDVIKIHWQEKKSNTILGSQEGNTMKTNDTYMKFSWLTVPEKSLDKEHRCIVRHENNKNGVDQEIIFPPIKTDVITMDPKDNCSKDANDTLLLQLTNTSAYYMYLLLLLKSVVYFAIITCCLLRRTAFCCNGEKS

SEQ ID NO: 16046 - protein, 865 aa, synthetic construct
MALPVTALLLPLALLLHAARPEVQLVESGGGLVQPGGSLRLSCAASGFSFSDFWMSWVRQAPGKGLEWVATISQAGSEKDYVDSVKGRFTISRDNAKKSLYLQMNSLRAEDTAVYYCASGVYSFDYRGQGTLVTVSSGTGGGGSGGGGSGGGGSEFDVVMTQSPSSLSASVGDRVTITCQSSLDISHYLNWYQQKPGKAPKLLIYDASNLETGVPSRFSGSGSGTHFTFTISSLQPEDFATYYCQQYDNLPLTFGGGTKLEIKRLEIQNPDPAVYQLRDSKSSDKSVCLFTDFDSQTNVSQSKDSDVYITDKCVLDMRSMDFKSNSAVAWSNKSDFACANAFNNSIIPEDTFFPSPESSDSTDHVKPKETENTKQPSKSCHKPKAIVHTEKVNMMSLTVLGLRMLFAKTVAVNFLLTAKLFFLRAKRSGSGVKQTLNFDLLKLAGDVESNPGPTSMDWIWRILFLVGAATGAHSFEQVQLVQSGGGVVQPGGSLRVSCAASGVTLSDYGMHWVRQAPGKGLEWVAFIRNDGSDKYYADSVKGRFTISRDNSEKTVSLQMSSLRAEDTAVYYCAKNGESGPLDYWYLDLWGRGTLVTVSSTREDLKNVFPPEVAVFEPSEAEISHTQKATLVCLATGFYPDHVELSWWVNGKEVHSGVCTDPQPLKEQPALNDSRYCLSSRLRVSATFWQNPRNHFRCQVQFYGLSENDEWTQDRAKPVTQIVSAEAWGRADDVIKIHWQEKKSNTILGSQEGNTMKTNDTYMKFSWLTVPEKSLDKEHRCIVRHENNKNGVDQEIIFPPIKTDVITMDPKDNCSKDANDTLLLQLTNTSAYYMYLLLLLKSVVYFAIITCCLLRRTAFCCNGEKS

SEQ ID NO: 16047 - protein, 869 aa, synthetic construct
MALPVTALLLPLALLLHAARPEVQLVESGGGLVQPGGSLRLSCAASGFSFSDFWMSWVRQAPGKGLEWVATISQAGSEKDYVDSVKGRFTISRDNAKKSLYLQMNSLRAEDTAVYYCASGVYSFDYRGQGTLVTVSSGTGGGGSGGGGSGGGGSEFSYELTQPPSVSGTPGQRVAISCSGSSSNIGTRMVTWYQHVPGTAPKLLIFNNNQRPSGVPDRFSASKSGTSASLAIIGLQSDDEADYYCATWDDNVKSYVFGTGTKVTVLGSRLEIQNPDPAVYQLRDSKSSDKSVCLFTDFDSQTNVSQSKDSDVYITDKCVLDMRSMDFKSNSAVAWSNKSDFACANAFNNSIIPEDTFFPSPESSDSTDHVKPKETENTKQPSKSCHKPKAIVHTEKVNMMSLTVLGLRMLFAKTVAVNFLLTAKLFFLRAKRSGSGVKQTLNFDLLKLAGDVESNPGPTSMDWIWRILFLVGAATGAHSFELEMAQVQLQQWGAGLLKPSETLSLTCAVYGGSFSGYYWSWIRQPPGKGLEWIGEINHSGSTNYNPSLKSRVTISVDTSKNQFSLKLSSVTAADTAVYYCARAPQSWYVGDVWGQGTLVTVSSTREDLKNVFPPEVAVFEPSEAEISHTQKATLVCLATGFYPDHVELSWWVNGKEVHSGVCTDPQPLKEQPALNDSRYCLSSRLRVSATFWQNPRNHFRCQVQFYGLSENDEWTQDRAKPVTQIVSAEAWGRADDVIKIHWQEKKSNTILGSQEGNTMKTNDTYMKFSWLTVPEKSLDKEHRCIVRHENNKNGVDQEIIFPPIKTDVITMDPKDNCSKDANDTLLLQLTNTSAYYMYLLLLLKSVVYFAIITCCLLRRTAFCCNGEKS

SEQ ID NO: 16048 - protein, 866 aa, synthetic construct
MALPVTALLLPLALLLHAARPEVQLVESGGGLVQPGGSLRLSCAASGFSFSDFWMSWVRQAPGKGLEWVATISQAGSEKDYVDSVKGRFTISRDNAKKSLYLQMNSLRAEDTAVYYCASGVYSFDYRGQGTLVTVSSGTGGGGSGGGGSGGGGSEFQSVLTQPPSLSVAPGKTASITCGGNNIGMKSVHWYQQRPGQAPVLVIYYDSDRPSGIPGRFSGSNSGNTATLTISRVEAGDEADYYCQVWDTTGDHPGYVFGTGTKVTVLLEIQNPDPAVYQLRDSKSSDKSVCLFTDFDSQTNVSQSKDSDVYITDKCVLDMRSMDFKSNSAVAWSNKSDFACANAFNNSIIPEDTFFPSPESSDSTDHVKPKETENTKQPSKSCHKPKAIVHTEKVNMMSLTVLGLRMLFAKTVAVNFLLTAKLFFLRAKRSGSGVKQTLNFDLLKLAGDVESNPGPTSMDWIWRILFLVGAATGAHSFEQVQLVQSGAEVKKPGSSVKVSCKASGGTFSSYAISWVRQAPGQGLEWMGGIIPIFGTANYAQKFQGRVTITADESTSTAYMELSSLRSEDTAVYYCARGVYGYSGSAPYDEWGQGTLVTVSSTREDLKNVFPPEVAVFEPSEAEISHTQKATLVCLATGFYPDHVELSWWVNGKEVHSGVCTDPQPLKEQPALNDSRYCLSSRLRVSATFWQNPRNHFRCQVQFYGLSENDEWTQDRAKPVTQIVSAEAWGRADDVIKIHWQEKKSNTILGSQEGNTMKTNDTYMKFSWLTVPEKSLDKEHRCIVRHENNKNGVDQEIIFPPIKTDVITMDPKDNCSKDANDTLLLQLTNTSAYYMYLLLLLKSVVYFAIITCCLLRRTAFCCNGEKS

SEQ ID NO: 16049 - protein, 864 aa, synthetic construct
MALPVTALLLPLALLLHAARPEVQLVESGGGLVQPGGSLRLSCAASGFSFSDFWMSWVRQAPGKGLEWVATISQAGSEKDYVDSVKGRFTISRDNAKKSLYLQMNSLRAEDTAVYYCASGVYSFDYRGQGTLVTVSSGTGGGGSGGGGSGGGGSEFEVQLVESGGGLVQPGRSLRLSCAASGFTFDDYAMHWVRQAPGKGLEWVSGISWNSGSIGYADSVKGRFTISRDNAKNSLYLQMNSLRAEDTALYYCAKDKGGGYYDFWSGSDYWGQGTLVTVSSLEIQNPDPAVYQLRDSKSSDKSVCLFTDFDSQTNVSQSKDSDVYITDKCVLDMRSMDFKSNSAVAWSNKSDFACANAFNNSIIPEDTFFPSPESSDSTDHVKPKETENTKQPSKSCHKPKAIVHTEKVNMMSLTVLGLRMLFAKTVAVNFLLTAKLFFLRAKRSGSGVKQTLNFDLLKLAGDVESNPGPTSMDWIWRILFLVGAATGAHSFESSELTQDPAVSVALGQTVRITCQGDSLRSYYASWYQQKPGQAPVLVIYGKNNRPSGIPDRFSGSSSGNTASLTITGAQAEDEADYYCNSRDSSGWVFGGGTKLTVLTREDLKNVFPPEVAVFEPSEAEISHTQKATLVCLATGFYPDHVELSWWVNGKEVHSGVCTDPQPLKEQPALNDSRYCLSSRLRVSATFWQNPRNHFRCQVQFYGLSENDEWTQDRAKPVTQIVSAEAWGRADDVIKIHWQEKKSNTILGSQEGNTMKTNDTYMKFSWLTVPEKSLDKEHRCIVRHENNKNGVDQEIIFPPIKTDVITMDPKDNCSKDANDTLLLQLTNTSAYYMYLLLLLKSVVYFAIITCCLLRRTAFCCNGEKS

SEQ ID NO: 16050 - protein, 873 aa, synthetic construct
MALPVTALLLPLALLLHAARPEVQLVESGGGLVQPGGSLRLSCAASGFSFSDFWMSWVRQAPGKGLEWVATISQAGSEKDYVDSVKGRFTISRDNAKKSLYLQMNSLRAEDTAVYYCASGVYSFDYRGQGTLVTVSSGTGGGGSGGGGSGGGGSEFEVQLQQSGPGLVKPSQTLSLTCAISGDSVLSNSDTWNWIRQSPSRGLEWLGRTYHRSTWYDDYASSVRGRVSINVDTSKNQYSLQLNAVTPEDTGVYYCARDRLQDGNSWSDAFDVWGQGTMVTVSSLEIQNPDPAVYQLRDSKSSDKSVCLFTDFDSQTNVSQSKDSDVYITDKCVLDMRSMDFKSNSAVAWSNKSDFACANAFNNSIIPEDTFFPSPESSDSTDHVKPKETENTKQPSKSCHKPKAIVHTEKVNMMSLTVLGLRMLFAKTVAVNFLLTAKLFFLRAKRSGSGVKQTLNFDLLKLAGDVESNPGPTSMDWIWRILFLVGAATGAHSFEQSALTQPASVSGSPGQSITISCTGTSSDVGGYNYVSWYQQHPGKAPKLMIYDVSNRPSGVSNRFSGSKSGNTASLTISGLQAEDEADYYCSSYTSSSTLVYVFGTGTKVTVLTREDLKNVFPPEVAVFEPSEAEISHTQKATLVCLATGFYPDHVELSWWVNGKEVHSGVCTDPQPLKEQPALNDSRYCLSSRLRVSATFWQNPRNHFRCQVQFYGLSENDEWTQDRAKPVTQIVSAEAWGRADDVIKIHWQEKKSNTILGSQEGNTMKTNDTYMKFSWLTVPEKSLDKEHRCIVRHENNKNGVDQEIIFPPIKTDVITMDPKDNCSKDANDTLLLQLTNTSAYYMYLLLLLKSVVYFAIITCCLLRRTAFCCNGEKS

SEQ ID NO: 16051 - protein, 851 aa, synthetic construct
MALPVTALLLPLALLLHAARPEVQLVESGGGLVQPGGSLRLSCAASGFSFSDFWMSWVRQAPGKGLEWVATISQAGSEKDYVDSVKGRFTISRDNAKKSLYLQMNSLRAEDTAVYYCASGVYSFDYRGQGTLVTVSSGTGGGGSGGGGSGGGGSEFQVQLVQSGAEVKKPGASVKVSCKASGYTFTSYDINWVRQATGQGLEWMGWMNPNSGNTGYAQKFQGRVTMTRNTSISTAYMELSSLRSEDTAVYYCARGDSTKVEIKLEIQNPDPAVYQLRDSKSSDKSVCLFTDFDSQTNVSQSKDSDVYITDKCVLDMRSMDFKSNSAVAWSNKSDFACANAFNNSIIPEDTFFPSPESSDSTDHVKPKETENTKQPSKSCHKPKAIVHTEKVNMMSLTVLGLRMLFAKTVAVNFLLTAKLFFLRAKRSGSGVKQTLNFDLLKLAGDVESNPGPTSMDWIWRILFLVGAATGAHSFEQSVLTQPRSVSGSPGQSVTISCTGTSSDVGGYNYVSWYQQHPGEAPKLIIYDADKRPSGISNRFSSGKSGNTASLTISGLQVEDEADYYCCSYAGGSTWVFGGGTKVTVLTREDLKNVFPPEVAVFEPSEAEISHTQKATLVCLATGFYPDHVELSWWVNGKEVHSGVCTDPQPLKEQPALNDSRYCLSSRLRVSATFWQNPRNHFRCQVQFYGLSENDEWTQDRAKPVTQIVSAEAWGRADDVIKIHWQEKKSNTILGSQEGNTMKTNDTYMKFSWLTVPEKSLDKEHRCIVRHENNKNGVDQEIIFPPIKTDVITMDPKDNCSKDANDTLLLQLTNTSAYYMYLLLLLKSVVYFAIITCCLLRRTAFCCNGEKS

SEQ ID NO: 16052 - protein, 873 aa, synthetic construct
MALPVTALLLPLALLLHAARPEVQLVESGGGLVQPGGSLRLSCAASGFSFSDFWMSWVRQAPGKGLEWVATISQAGSEKDYVDSVKGRFTISRDNAKKSLYLQMNSLRAEDTAVYYCASGVYSFDYRGQGTLVTVSSGTGGGGSGGGGSGGGGSEFEVQLQQSGPGLVKPSQTLSLTCAISGDSVSSNSAAWNWIRQSPSRGLEWLGRTYYRSKWYSDYAVSVKSRITINPDTSKNQFSLQLNSVTPEDTAVYYCARDPYDFWSGYPDAFDIWGQGTMVTVSSLEIQNPDPAVYQLRDSKSSDKSVCLFTDFDSQTNVSQSKDSDVYITDKCVLDMRSMDFKSNSAVAWSNKSDFACANAFNNSIIPEDTFFPSPESSDSTDHVKPKETENTKQPSKSCHKPKAIVHTEKVNMMSLTVLGLRMLFAKTVAVNFLLTAKLFFLRAKRSGSGVKQTLNFDLLKLAGDVESNPGPTSMDWIWRILFLVGAATGAHSFEQSALTQPASVSGSPGQSITISCTGTSSDVGGYNYVSWYQQHPGKAPKVIISEVNNRPSGVSHRFSGSKSGNTASLTISGLQAEDEADYFCSSYTSGRTLYVFGTGSKVTVLGTREDLKNVFPPEVAVFEPSEAEISHTQKATLVCLATGFYPDHVELSWWVNGKEVHSGVCTDPQPLKEQPALNDSRYCLSSRLRVSATFWQNPRNHFRCQVQFYGLSENDEWTQDRAKPVTQIVSAEAWGRADDVIKIHWQEKKSNTILGSQEGNTMKTNDTYMKFSWLTVPEKSLDKEHRCIVRHENNKNGVDQEIIFPPIKTDVITMDPKDNCSKDANDTLLLQLTNTSAYYMYLLLLLKSVVYFAIITCCLLRRTAFCCNGEKS

SEQ ID NO: 16053 - protein, 872 aa, synthetic construct
MALPVTALLLPLALLLHAARPEVQLVESGGGLVQPGGSLRLSCAASGFSFSDFWMSWVRQAPGKGLEWVATISQAGSEKDYVDSVKGRFTISRDNAKKSLYLQMNSLRAEDTAVYYCASGVYSFDYRGQGTLVTVSSGTGGGGSGGGGSGGGGSEFQSALTQPASASGSPGQSVTISCTGTSSDVGGYNYVSWYQQHPGKAPKLMIYDVSNRPSGVSNRFSGSKSGNTASLTISGLQAEDEADYYCSSYTSSSTLYVFGTGTQLTVLLEIQNPDPAVYQLRDSKSSDKSVCLFTDFDSQTNVSQSKDSDVYITDKCVLDMRSMDFKSNSAVAWSNKSDFACANAFNNSIIPEDTFFPSPESSDSTDHVKPKETENTKQPSKSCHKPKAIVHTEKVNMMSLTVLGLRMLFAKTVAVNFLLTAKLFFLRAKRSGSGVKQTLNFDLLKLAGDVESNPGPTSMDWIWRILFLVGAATGAHSFEEVQLQQSGPGLVKPSQTLSLTCAISGDSMLSNSDTWNWIRQSPSRGLEWLGRTYHRSTWYDDYASSVRGRVSINVDTSKNQYSLQLNAVTPEDTGVYYCARVRLQDGNSWSDAFDVWGQGTMVTVSSTREDLKNVFPPEVAVFEPSEAEISHTQKATLVCLATGFYPDHVELSWWVNGKEVHSGVCTDPQPLKEQPALNDSRYCLSSRLRVSATFWQNPRNHFRCQVQFYGLSENDEWTQDRAKPVTQIVSAEAWGRADDVIKIHWQEKKSNTILGSQEGNTMKTNDTYMKFSWLTVPEKSLDKEHRCIVRHENNKNGVDQEIIFPPIKTDVITMDPKDNCSKDANDTLLLQLTNTSAYYMYLLLLLKSVVYFAIITCCLLRRTAFCCNGEKS

SEQ ID NO: 16054 - protein, 872 aa, synthetic construct
MALPVTALLLPLALLLHAARPEVQLVESGGGLVQPGGSLRLSCAASGFSFSDFWMSWVRQAPGKGLEWVATISQAGSEKDYVDSVKGRFTISRDNAKKSLYLQMNSLRAEDTAVYYCASGVYSFDYRGQGTLVTVSSGTGGGGSGGGGSGGGGSEFDVMLTQTPLSLPVSLGDQASISCRSSQSILHSTGDTYLEWYLQKPGQSPKLLINKVSNRLSGVPDRFSGSGSGTDFTLKISRVEAEDLGVYYCFQGSHVPWTFGGGTKLEIKRADAAPTVSIFPLEIQNPDPAVYQLRDSKSSDKSVCLFTDFDSQTNVSQSKDSDVYITDKCVLDMRSMDFKSNSAVAWSNKSDFACANAFNNSIIPEDTFFPSPESSDSTDHVKPKETENTKQPSKSCHKPKAIVHTEKVNMMSLTVLGLRMLFAKTVAVNFLLTAKLFFLRAKRSGSGVKQTLNFDLLKLAGDVESNPGPTSMDWIWRILFLVGAATGAHSFEQVKLQQSGPSLVKPGASVKMSCKASGYTFTDFYMKWVKQSHGKSLEWIGDINPNIGDTFYNQKFKGKATLTVDKSSSTAYMQLNSLTSEDSAVYFCSVGYFDVWGAGTTVTVSSTREDLKNVFPPEVAVFEPSEAEISHTQKATLVCLATGFYPDHVELSWWVNGKEVHSGVCTDPQPLKEQPALNDSRYCLSSRLRVSATFWQNPRNHFRCQVQFYGLSENDEWTQDRAKPVTQIVSAEAWGRADDVIKIHWQEKKSNTILGSQEGNTMKTNDTYMKFSWLTVPEKSLDKEHRCIVRHENNKNGVDQEIIFPPIKTDVITMDPKDNCSKDANDTLLLQLTNTSAYYMYLLLLLKSVVYFAIITCCLLRRTAFCCNGEKS

SEQ ID NO: 16055 - protein, 868 aa, synthetic construct
MALPVTALLLPLALLLHAARPEVQLVESGGGLVQPGGSLRLSCAASGFSFSDFWMSWVRQAPGKGLEWVATISQAGSEKDYVDSVKGRFTISRDNAKKSLYLQMNSLRAEDTAVYYCASGVYSFDYRGQGTLVTVSSGTGGGGSGGGGSGGGGSEFEIVLTQSPATLSLSPGERATLSCRASQSVSIYLAWYQQKPGQAPRLLIYDASNRATGIPARFSGSGSGTDFTLTISSLEPEDFAVYYCQQRSNWPPFTFGPGTKVDIKLEIQNPDPAVYQLRDSKSSDKSVCLFTDFDSQTNVSQSKDSDVYITDKCVLDMRSMDFKSNSAVAWSNKSDFACANAFNNSIIPEDTFFPSPESSDSTDHVKPKETENTKQPSKSCHKPKAIVHTEKVNMMSLTVLGLRMLFAKTVAVNFLLTAKLFFLRAKRSGSGVKQTLNFDLLKLAGDVESNPGPTSMDWIWRILFLVGAATGAHSFEQVQLVESGGGVVQPGRSLRLSCAASGFTFSSYGMHWVRQAPGKGLEWVAVIWDDGSNKYYVDSVKGRFTISRDNSKNTLYLQMNSLRAEDTAVYYCARDDYYGSGSFNSYYGTDVWGQGTTVTVSSTREDLKNVFPPEVAVFEPSEAEISHTQKATLVCLATGFYPDHVELSWWVNGKEVHSGVCTDPQPLKEQPALNDSRYCLSSRLRVSATFWQNPRNHFRCQVQFYGLSENDEWTQDRAKPVTQIVSAEAWGRADDVIKIHWQEKKSNTILGSQEGNTMKTNDTYMKFSWLTVPEKSLDKEHRCIVRHENNKNGVDQEIIFPPIKTDVITMDPKDNCSKDANDTLLLQLTNTSAYYMYLLLLLKSVVYFAIITCCLLRRTAFCCNGEKS

SEQ ID NO: 16056 - protein, 853 aa, synthetic construct
MALPVTALLLPLALLLHAARPEVQLVESGGGLVQPGGSLRLSCAASGFSFSDFWMSWVRQAPGKGLEWVATISQAGSEKDYVDSVKGRFTISRDNAKKSLYLQMNSLRAEDTAVYYCASGVYSFDYRGQGTLVTVSSGTGGGGSGGGGSGGGGSEFDIQMTQSPSSLSASVGDRVTITCRASQGISSWLAWYQQKPEKAPKSLIYAASSLQSGVPSRFSGSGSGTDFTLTISSLQPEDFATYYCQQYNSYPYTFGQGTKLEIKLEIQNPDPAVYQLRDSKSSDKSVCLFTDFDSQTNVSQSKDSDVYITDKCVLDMRSMDFKSNSAVAWSNKSDFACANAFNNSIIPEDTFFPSPESSDSTDHVKPKETENTKQPSKSCHKPKAIVHTEKVNMMSLTVLGLRMLFAKTVAVNFLLTAKLFFLRAKRSGSGVKQTLNFDLLKLAGDVESNPGPTSMDWIWRILFLVGAATGAHSFEEVQLVQSGGGLVHPGGSLRLSCAGSGFTFSTYLMYWVRQAPGKTLEWVSAIGSGGDTYYADSVKGRFTISRDNAKNSLYLQMNSLRAEDMAVYYCARGLGYWGQGTLVTVSSTREDLKNVFPPEVAVFEPSEAEISHTQKATLVCLATGFYPDHVELSWWVNGKEVHSGVCTDPQPLKEQPALNDSRYCLSSRLRVSATFWQNPRNHFRCQVQFYGLSENDEWTQDRAKPVTQIVSAEAWGRADDVIKIHWQEKKSNTILGSQEGNTMKTNDTYMKFSWLTVPEKSLDKEHRCIVRHENNKNGVDQEIIFPPIKTDVITMDPKDNCSKDANDTLLLQLTNTSAYYMYLLLLLKSVVYFAIITCCLLRRTAFCCNGEKS

SEQ ID NO: 16057 - protein, 872 aa, synthetic construct
MALPVTALLLPLALLLHAARPEVQLVESGGGLVQPGGSLRLSCAASGFSFSDFWMSWVRQAPGKGLEWVATISQAGSEKDYVDSVKGRFTISRDNAKKSLYLQMNSLRAEDTAVYYCASGVYSFDYRGQGTLVTVSSGTGGGGSGGGGSGGGGSEFLPVLTQPPSVSVAPGKTARITCGGNNIGSKSVHWYQQKPGQAPVLVVYDDSDRPSGIPERFSGSNSGNTATLTISRVEAGDEADYYCQVWDSSSDYVVFGGGTKLTVLLEIQNPDPAVYQLRDSKSSDKSVCLFTDFDSQTNVSQSKDSDVYITDKCVLDMRSMDFKSNSAVAWSNKSDFACANAFNNSIIPEDTFFPSPESSDSTDHVKPKETENTKQPSKSCHKPKAIVHTEKVNMMSLTVLGLRMLFAKTVAVNFLLTAKLFFLRAKRSGSGVKQTLNFDLLKLAGDVESNPGPTSMDWIWRILFLVGAATGAHSFEEVQLVQSGAEVKKPGESLKISCKGSGYSFTSYWIGWVRQMPGKGLEWMGIIYPGDSDTRYSPSFQGQVTISADKSISTAYLQWSSLKASDTAMYYCARQVWGWQGGMYPRSNWWYNLDSWGQGTLVTVSSTREDLKNVFPPEVAVFEPSEAEISHTQKATLVCLATGFYPDHVELSWWVNGKEVHSGVCTDPQPLKEQPALNDSRYCLSSRLRVSATFWQNPRNHFRCQVQFYGLSENDEWTQDRAKPVTQIVSAEAWGRADDVIKIHWQEKKSNTILGSQEGNTMKTNDTYMKFSWLTVPEKSLDKEHRCIVRHENNKNGVDQEIIFPPIKTDVITMDPKDNCSKDANDTLLLQLTNTSAYYMYLLLLLKSVVYFAIITCCLLRRTAFCCNGEKS

SEQ ID NO: 16058 - protein, 865 aa, synthetic construct
MALPVTALLLPLALLLHAARPEVQLVESGGGLVQPGGSLRLSCAASGFSFSDFWMSWVRQAPGKGLEWVATISQAGSEKDYVDSVKGRFTISRDNAKKSLYLQMNSLRAEDTAVYYCASGVYSFDYRGQGTLVTVSSGTGGGGSGGGGSGGGGSEFELVMTQSPASLAVSLGQRATISCRASESVDSYGKSFMHWYQLKPGQPPKLLIYRASNLESGVPARFSGSGSRTDFTLTIDPVEADDAATYYCQQNNEDPWTFGGGTKLEIKLEIQNPDPAVYQLRDSKSSDKSVCLFTDFDSQTNVSQSKDSDVYITDKCVLDMRSMDFKSNSAVAWSNKSDFACANAFNNSIIPEDTFFPSPESSDSTDHVKPKETENTKQPSKSCHKPKAIVHTEKVNMMSLTVLGLRMLFAKTVAVNFLLTAKLFFLRAKRSGSGVKQTLNFDLLKLAGDVESNPGPTSMDWIWRILFLVGAATGAHSFEEVQLEQSGPELVKPGASVKMSCKASGYTFTNYYMKWVKQSHGKSLEWIGDLNPNNGDTFYNQKFKGKATLTVDKSSNTAYMQLNSLTSEDSAVYYCARTGRYEENAMDYWGQGTSVTVSSTREDLKNVFPPEVAVFEPSEAEISHTQKATLVCLATGFYPDHVELSWWVNGKEVHSGVCTDPQPLKEQPALNDSRYCLSSRLRVSATFWQNPRNHFRCQVQFYGLSENDEWTQDRAKPVTQIVSAEAWGRADDVIKIHWQEKKSNTILGSQEGNTMKTNDTYMKFSWLTVPEKSLDKEHRCIVRHENNKNGVDQEIIFPPIKTDVITMDPKDNCSKDANDTLLLQLTNTSAYYMYLLLLLKSVVYFAIITCCLLRRTAFCCNGEKS

SEQ ID NO: 16059 - protein, 859 aa, synthetic construct
MALPVTALLLPLALLLHAARPEVQLVESGGGLVQPGGSLRLSCAASGFSFSDFWMSWVRQAPGKGLEWVATISQAGSEKDYVDSVKGRFTISRDNAKKSLYLQMNSLRAEDTAVYYCASGVYSFDYRGQGTLVTVSSGTGGGGSGGGGSGGGGSEFDVVMTQSPSSLSASVGDRVTITCMASEDIYIRLAWYQQKPGNAPKLLIYAATSLETGVPSRFSGSGSGTDFTLTISSLQPEDFATYYCQQYWSSPWTFGGGTKVEIKLEIQNPDPAVYQLRDSKSSDKSVCLFTDFDSQTNVSQSKDSDVYITDKCVLDMRSMDFKSNSAVAWSNKSDFACANAFNNSIIPEDTFFPSPESSDSTDHVKPKETENTKQPSKSCHKPKAIVHTEKVNMMSLTVLGLRMLFAKTVAVNFLLTAKLFFLRAKRSGSGVKQTLNFDLLKLAGDVESNPGPTSMDWIWRILFLVGAATGAHSFEQVQLQESGPGLVKPSQTLSLTCTVSGYSITSDYTWNWIRQPPGNGLEWIGYITYSGSTSYNPSLKSRVLISVDTSKNQVSLKLSSVTAADTAVYYCARLGRRYTMDYWGQGTTVTVSSTREDLKNVFPPEVAVFEPSEAEISHTQKATLVCLATGFYPDHVELSWWVNGKEVHSGVCTDPQPLKEQPALNDSRYCLSSRLRVSATFWQNPRNHFRCQVQFYGLSENDEWTQDRAKPVTQIVSAEAWGRADDVIKIHWQEKKSNTILGSQEGNTMKTNDTYMKFSWLTVPEKSLDKEHRCIVRHENNKNGVDQEIIFPPIKTDVITMDPKDNCSKDANDTLLLQLTNTSAYYMYLLLLLKSVVYFAIITCCLLRRTAFCCNGEKS

SEQ ID NO: 16060 - protein, 863 aa, synthetic construct; identical to SEQ ID NO: 15923

SEQ ID NO: 16061 - protein, 863 aa, synthetic construct
MALPVTALLLPLALLLHAARPEVQLVESGGGLVQPGGSLRLSCAASGFSFSDFWMSWVRQAPGKGLEWVATISQAGSEKDYVDSVKGRFTISRDNAKKSLYLQMNSLRAEDTAVYYCASGVYSFDYRGQGTLVTVSSGTGGGGSGGGGSGGGGSEFDIVLTQSPATLSLSPGDRATLSCRASESVTILGSHLIYWYQQKPGQAPRLLIQLASNVQTGIPARFSGSGSRTDFTLTISSLEPEDFAVYYCLQSRTIPRTFGQGTKLEIKRLEIQNPDPAVYQLRDSKSSDKSVCLFTDFDSQTNVSQSKDSDVYITDKCVLDMRSMDFKSNSAVAWSNKSDFACANAFNNSIIPEDTFFPSPESSDSTDHVKPKETENTKQPSKSCHKPKAIVHTEKVNMMSLTVLGLRMLFAKTVAVNFLLTAKLFFLRAKRSGSGVKQTLNFDLLKLAGDVESNPGPTSMDWIWRILFLVGAATGAHSFEQVQLVQSGSELKKPGESVKISCKASGYTFTHYSMNWVRQAPGQGLEWMGRINTETGEPLYADDFKGRFVFSLDTSASTAYLQISSLKAEDTAVYYCSNDYLYSLDYWGQGTLVTVSSTREDLKNVFPPEVAVFEPSEAEISHTQKATLVCLATGFYPDHVELSWWVNGKEVHSGVCTDPQPLKEQPALNDSRYCLSSRLRVSATFWQNPRNHFRCQVQFYGLSENDEWTQDRAKPVTQIVSAEAWGRADDVIKIHWQEKKSNTILGSQEGNTMKTNDTYMKFSWLTVPEKSLDKEHRCIVRHENNKNGVDQEIIFPPIKTDVITMDPKDNCSKDANDTLLLQLTNTSAYYMYLLLLLKSVVYFAIITCCLLRRTAFCCNGEKS

SEQ ID NO: 16062 - protein, 864 aa, synthetic construct
MALPVTALLLPLALLLHAARPEVQLVESGGGLVQPGGSLRLSCAASGFSFSDFWMSWVRQAPGKGLEWVATISQAGSEKDYVDSVKGRFTISRDNAKKSLYLQMNSLRAEDTAVYYCASGVYSFDYRGQGTLVTVSSGTGGGGSGGGGSGGGGSEFDIQLTQSPSFLSASVGDRVTITCRASQGISTDLNWYQQKPGKAPKLLIYAASNLESGVPSRFSGSGSGTEFTLTISSLQPEDFATYYCQQSYNWPYTFGGGTKVEIKRLEIQNPDPAVYQLRDSKSSDKSVCLFTDFDSQTNVSQSKDSDVYITDKCVLDMRSMDFKSNSAVAWSNKSDFACANAFNNSIIPEDTFFPSPESSDSTDHVKPKETENTKQPSKSCHKPKAIVHTEKVNMMSLTVLGLRMLFAKTVAVNFLLTAKLFFLRAKRSGSGVKQTLNFDLLKLAGDVESNPGPTSMDWIWRILFLVGAATGAHSFEEVQLVESGGGLVKPGGSLRLSCAASGFTFSNFEMNWVRQAPGKGLEWVSGISSNGRYINYADSVKGRFTISRDNAKNSLYLQMNSLRAEDTAVYYCARVVDFDQDYNGFDYWGQGTLVTVSSTREDLKNVFPPEVAVFEPSEAEISHTQKATLVCLATGFYPDHVELSWWVNGKEVHSGVCTDPQPLKEQPALNDSRYCLSSRLRVSATFWQNPRNHFRCQVQFYGLSENDEWTQDRAKPVTQIVSAEAWGRADDVIKIHWQEKKSNTILGSQEGNTMKTNDTYMKFSWLTVPEKSLDKEHRCIVRHENNKNGVDQEIIFPPIKTDVITMDPKDNCSKDANDTLLLQLTNTSAYYMYLLLLLKSVVYFAIITCCLLRRTAFCCNGEKS

SEQ ID NO: 16063 - protein, 862 aa, synthetic construct
MALPVTALLLPLALLLHAARPEVQLVESGGGLVQPGGSLRLSCAASGFSFSDFWMSWVRQAPGKGLEWVATISQAGSEKDYVDSVKGRFTISRDNAKKSLYLQMNSLRAEDTAVYYCASGVYSFDYRGQGTLVTVSSGTGGGGSGGGGSGGGGSEFDIQLTQSPSFLSASVGDRVTITCSLSLGISTWRDWFPPRLGRGLEPLTYAASTLQSGVPSRFSGSGSGTEFTLTISSLQPEDFATYYCQQLNSYPLTFGGGTKVEIKRLEIQNPDPAVYQLRDSKSSDKSVCLFTDFDSQTNVSQSKDSDVYITDKCVLDMRSMDFKSNSAVAWSNKSDFACANAFNNSIIPEDTFFPSPESSDSTDHVKPKETENTKQPSKSCHKPKAIVHTEKVNMMSLTVLGLRMLFAKTVAVNFLLTAKLFFLRAKRSGSGVKQTLNFDLLKLAGDVESNPGPTSMDWIWRILFLVGAATGAHSFEEVQLVESGGGLVKPGGSLRLSCAASGFTFSTYGMSWVRQAPGKGLEWVAYINNGSGYIYYADSVKGRFTISRDNAKNSLYLQMNSLRAEDTAVYYCARGQWWSGGDFDYWGQGTLVTVSSTREDLKNVFPPEVAVFEPSEAEISHTQKATLVCLATGFYPDHVELSWWVNGKEVHSGVCTDPQPLKEQPALNDSRYCLSSRLRVSATFWQNPRNHFRCQVQFYGLSENDEWTQDRAKPVTQIVSAEAWGRADDVIKIHWQEKKSNTILGSQEGNTMKTNDTYMKFSWLTVPEKSLDKEHRCIVRHENNKNGVDQEIIFPPIKTDVITMDPKDNCSKDANDTLLLQLTNTSAYYMYLLLLLKSVVYFAIITCCLLRRTAFCCNGEKS

SEQ ID NO: 16064 - protein, 863 aa, synthetic construct
MALPVTALLLPLALLLHAARPEVQLVESGGGLVQPGGSLRLSCAASGFSFSDFWMSWVRQAPGKGLEWVATISQAGSEKDYVDSVKGRFTISRDNAKKSLYLQMNSLRAEDTAVYYCASGVYSFDYRGQGTLVTVSSGTGGGGSGGGGSGGGGSEFEIVLTQSPATLSLSPGERATLSCSASSSVSYMYWYQQKPGQAPRLLIYRTSNLASGIPARFSGSGSGTDFTLTISSLEPEDFAVYYCQQYHSYPTTFGQGTKVEIKRTVLEIQNPDPAVYQLRDSKSSDKSVCLFTDFDSQTNVSQSKDSDVYITDKCVLDMRSMDFKSNSAVAWSNKSDFACANAFNNSIIPEDTFFPSPESSDSTDHVKPKETENTKQPSKSCHKPKAIVHTEKVNMMSLTVLGLRMLFAKTVAVNFLLTAKLFFLRAKRSGSGVKQTLNFDLLKLAGDVESNPGPTSMDWIWRILFLVGAATGAHSFEEVQLVESGGGLVQPGGSLRLSCAASGFSFNTYAMNWVRQAPGKGLEWVSHIRSKSNNFATYYADSVKDRFTISRDNAKNSLYLQMNSLRAEDTAVYYCARQGGDFPMDYWGQGTLVTVSSTREDLKNVFPPEVAVFEPSEAEISHTQKATLVCLATGFYPDHVELSWWVNGKEVHSGVCTDPQPLKEQPALNDSRYCLSSRLRVSATFWQNPRNHFRCQVQFYGLSENDEWTQDRAKPVTQIVSAEAWGRADDVIKIHWQEKKSNTILGSQEGNTMKTNDTYMKFSWLTVPEKSLDKEHRCIVRHENNKNGVDQEIIFPPIKTDVITMDPKDNCSKDANDTLLLQLTNTSAYYMYLLLLLKSVVYFAIITCCLLRRTAFCCNGEKS

SEQ ID NO: 16065 - protein, 859 aa, synthetic construct
MALPVTALLLPLALLLHAARPEVQLVESGGGLVQPGGSLRLSCAASGFSFSDFWMSWVRQAPGKGLEWVATISQAGSEKDYVDSVKGRFTISRDNAKKSLYLQMNSLRAEDTAVYYCASGVYSFDYRGQGTLVTVSSGTGGGGSGGGGSGGGGSEFDVVMTQSPSSLSASVGDRVTITCKASEDIYIRLAWYQQKPGKAPKLLIYAATSLETGVPSRFSGSGSGTDFTLTISSLQPEDFATYYCQQYWTTPWTFGGGTKVEIKLEIQNPDPAVYQLRDSKSSDKSVCLFTDFDSQTNVSQSKDSDVYITDKCVLDMRSMDFKSNSAVAWSNKSDFACANAFNNSIIPEDTFFPSPESSDSTDHVKPKETENTKQPSKSCHKPKAIVHTEKVNMMSLTVLGLRMLFAKTVAVNFLLTAKLFFLRAKRSGSGVKQTLNFDLLKLAGDVESNPGPTSMDWIWRILFLVGAATGAHSFEQVQLQESGPGLVKPSQTLSLTCTVSGYSITIDYTWNWIRQPPGKGLEWIGYITYSGSTDYNPSLKSRVLISVDTSKNQVSLKLSSVTAADTAVYYCARLGRRYALDYWGQGTTVTVSSTREDLKNVFPPEVAVFEPSEAEISHTQKATLVCLATGFYPDHVELSWWVNGKEVHSGVCTDPQPLKEQPALNDSRYCLSSRLRVSATFWQNPRNHFRCQVQFYGLSENDEWTQDRAKPVTQIVSAEAWGRADDVIKIHWQEKKSNTILGSQEGNTMKTNDTYMKFSWLTVPEKSLDKEHRCIVRHENNKNGVDQEIIFPPIKTDVITMDPKDNCSKDANDTLLLQLTNTSAYYMYLLLLLKSVVYFAIITCCLLRRTAFCCNGEKS

SEQ ID NO: 16066 - protein, 863 aa, synthetic construct
MALPVTALLLPLALLLHAARPEVQLVESGGGLVQPGGSLRLSCAASGFSFSDFWMSWVRQAPGKGLEWVATISQAGSEKDYVDSVKGRFTISRDNAKKSLYLQMNSLRAEDTAVYYCASGVYSFDYRGQGTLVTVSSGTGGGGSGGGGSGGGGSEFDIQMTQTTSSLSASLGDRVTISCRASQDISNYLNWYQQKPDGTVKLLIYYTSILHSGVPSRFSGSGSGTDYSLTISNLEQEDFATYFCQQGNTLPWTFGGGTKLEIKALEIQNPDPAVYQLRDSKSSDKSVCLFTDFDSQTNVSQSKDSDVYITDKCVLDMRSMDFKSNSAVAWSNKSDFACANAFNNSIIPEDTFFPSPESSDSTDHVKPKETENTKQPSKSCHKPKAIVHTEKVNMMSLTVLGLRMLFAKTVAVNFLLTAKLFFLRAKRSGSGVKQTLNFDLLKLAGDVESNPGPTSMDWIWRILFLVGAATGAHSFEVQLVESGGGLVKPGGSLKLSCAASGFAFSIYDMSWVRQTPEKRLEWVAYISSGGGTYYPDTVKGRFTISRDNAKNTLYLQMSSLKSEDTAMYYCARHSGYGTHWGVLFAYWGQGTLVTVSATREDLKNVFPPEVAVFEPSEAEISHTQKATLVCLATGFYPDHVELSWWVNGKEVHSGVCTDPQPLKEQPALNDSRYCLSSRLRVSATFWQNPRNHFRCQVQFYGLSENDEWTQDRAKPVTQIVSAEAWGRADDVIKIHWQEKKSNTILGSQEGNTMKTNDTYMKFSWLTVPEKSLDKEHRCIVRHENNKNGVDQEIIFPPIKTDVITMDPKDNCSKDANDTLLLQLTNTSAYYMYLLLLLKSVVYFAIITCCLLRRTAFCCNGEKS

SEQ ID NO: 16067 - protein, 874 aa, synthetic construct
MALPVTALLLPLALLLHAARPEVQLVESGGGLVQPGGSLRLSCAASGFSFSDFWMSWVRQAPGKGLEWVATISQAGSEKDYVDSVKGRFTISRDNAKKSLYLQMNSLRAEDTAVYYCASGVYSFDYRGQGTLVTVSSGTGGGGSGGGGSGGGGSEFDIVMTQSPDSLAVSLGERATINCKSSQSLLYRSNQKNYLAWYQQKPGQPPKLLIYWASTRESGVPDRFSGSGSGTDFTLTISSLQAEDVAVYYCQQYYNYPRTFGQGTKVEIKRTVLEIQNPDPAVYQLRDSKSSDKSVCLFTDFDSQTNVSQSKDSDVYITDKCVLDMRSMDFKSNSAVAWSNKSDFACANAFNNSIIPEDTFFPSPESSDSTDHVKPKETENTKQPSKSCHKPKAIVHTEKVNMMSLTVLGLRMLFAKTVAVNFLLTAKLFFLRAKRSGSGVKQTLNFDLLKLAGDVESNPGPTSMDWIWRILFLVGAATGAHSFEEVQLLESGGGLVQPGGSLRLSCAASGYSITSDYAWNWVRQAPGKGLEWVSYISNSGSTSYNPSLKSRFTISRDNSKNTLYLQMNSLRAEDTAVYYCAKERNYDYDDYYYAMDYWGQGTLVTVSSTREDLKNVFPPEVAVFEPSEAEISHTQKATLVCLATGFYPDHVELSWWVNGKEVHSGVCTDPQPLKEQPALNDSRYCLSSRLRVSATFWQNPRNHFRCQVQFYGLSENDEWTQDRAKPVTQIVSAEAWGRADDVIKIHWQEKKSNTILGSQEGNTMKTNDTYMKFSWLTVPEKSLDKEHRCIVRHENNKNGVDQEIIFPPIKTDVITMDPKDNCSKDANDTLLLQLTNTSAYYMYLLLLLKSVVYFAIITCCLLRRTAFCCNGEKS

SEQ ID NO: 16068 - protein, 867 aa, synthetic construct
MALPVTALLLPLALLLHAARPEVQLVESGGGLVQPGGSLRLSCAASGFSFSDFWMSWVRQAPGKGLEWVATISQAGSEKDYVDSVKGRFTISRDNAKKSLYLQMNSLRAEDTAVYYCASGVYSFDYRGQGTLVTVSSGTGGGGSGGGGSGGGGSEFDVVMTQSPLSLPVTLGQPASISCRSSQSLLHSSGNTYLEWYQQRPGQSPRPLIYKISTRFSGVPDRFSGSGSGTDFTLKISRVEAEDVGVYYCFQGSHVPYTFGGGTKVEIKRLEIQNPDPAVYQLRDSKSSDKSVCLFTDFDSQTNVSQSKDSDVYITDKCVLDMRSMDFKSNSAVAWSNKSDFACANAFNNSIIPEDTFFPSPESSDSTDHVKPKETENTKQPSKSCHKPKAIVHTEKVNMMSLTVLGLRMLFAKTVAVNFLLTAKLFFLRAKRSGSGVKQTLNFDLLKLAGDVESNPGPTSMDWIWRILFLVGAATGAHSFEQVQLVQSGAEVKKPGASVKVSCKASGLTIEDYYMHWVRQAPGQGLEWMGWIDPENGDTEYGPKFQGRVTMTRDTSINTAYMELSRLRSDDTAVYYCAVHNAHYGTWFAYWGQGTLVTVSSTREDLKNVFPPEVAVFEPSEAEISHTQKATLVCLATGFYPDHVELSWWVNGKEVHSGVCTDPQPLKEQPALNDSRYCLSSRLRVSATFWQNPRNHFRCQVQFYGLSENDEWTQDRAKPVTQIVSAEAWGRADDVIKIHWQEKKSNTILGSQEGNTMKTNDTYMKFSWLTVPEKSLDKEHRCIVRHENNKNGVDQEIIFPPIKTDVITMDPKDNCSKDANDTLLLQLTNTSAYYMYLLLLLKSVVYFAIITCCLLRRTAFCCNGEKS

SEQ ID NO: 16069 - protein, 859 aa, synthetic construct
MALPVTALLLPLALLLHAARPEVQLVESGGGLVQPGGSLRLSCAASGFSFSDFWMSWVRQAPGKGLEWVATISQAGSEKDYVDSVKGRFTISRDNAKKSLYLQMNSLRAEDTAVYYCASGVYSFDYRGQGTLVTVSSGTGGGGSGGGGSGGGGSEFDIQMTQSPSSLSASVGDRVTITCRASENIYSNLAWYQQKPGKAPKLLIYAATNLADGVPSRFSGSGSGTDFTLTISSLQPEDFATYYCQHFWGTPTFGQGTKVEIKRTVLEIQNPDPAVYQLRDSKSSDKSVCLFTDFDSQTNVSQSKDSDVYITDKCVLDMRSMDFKSNSAVAWSNKSDFACANAFNNSIIPEDTFFPSPESSDSTDHVKPKETENTKQPSKSCHKPKAIVHTEKVNMMSLTVLGLRMLFAKTVAVNFLLTAKLFFLRAKRSGSGVKQTLNFDLLKLAGDVESNPGPTSMDWIWRILFLVGAATGAHSFEEVQLVESGGGLVQPGGSLRLSCAASGFSLTNYGVHWVRQAPGKGLEWVSVIWSGGSTDYNAAFISRFTISADTSKNTAYLQMNSLRAEDTAVYYCARELIHAMDNWGQGTLVTVSSTREDLKNVFPPEVAVFEPSEAEISHTQKATLVCLATGFYPDHVELSWWVNGKEVHSGVCTDPQPLKEQPALNDSRYCLSSRLRVSATFWQNPRNHFRCQVQFYGLSENDEWTQDRAKPVTQIVSAEAWGRADDVIKIHWQEKKSNTILGSQEGNTMKTNDTYMKFSWLTVPEKSLDKEHRCIVRHENNKNGVDQEIIFPPIKTDVITMDPKDNCSKDANDTLLLQLTNTSAYYMYLLLLLKSVVYFAIITCCLLRRTAFCCNGEKS

SEQ ID NO: 16070 - protein, 866 aa, synthetic construct
MALPVTALLLPLALLLHAARPEVQLVESGGGLVQPGGSLRLSCAASGFSFSDFWMSWVRQAPGKGLEWVATISQAGSEKDYVDSVKGRFTISRDNAKKSLYLQMNSLRAEDTAVYYCASGVYSFDYRGQGTLVTVSSGTGGGGSGGGGSGGGGSEFDFVMTQSPLSLPVTPGEPASISCRSSQSIVHSNGNTYLEWYLQKPGQSPQLLIYKVSNRFSGVPDRFSGSGSGTDFTLKISRVEAEDVGVYYCFQGSHVPLTFGQGTKLEIKRLEIQNPDPAVYQLRDSKSSDKSVCLFTDFDSQTNVSQSKDSDVYITDKCVLDMRSMDFKSNSAVAWSNKSDFACANAFNNSIIPEDTFFPSPESSDSTDHVKPKETENTKQPSKSCHKPKAIVHTEKVNMMSLTVLGLRMLFAKTVAVNFLLTAKLFFLRAKRSGSGVKQTLNFDLLKLAGDVESNPGPTSMDWIWRILFLVGAATGAHSFEEVQLVESGAEVKKPGASVKVSCKASGYTFTSYWIHWVRQAPGQGLEWMGENDPSNGRTNYNEKFKNRVTLTVDTSISTAYMELSRLRSDDTAVYYCARGPNYFYSMDYWGQGTMVTVSSTREDLKNVFPPEVAVFEPSEAEISHTQKATLVCLATGFYPDHVELSWWVNGKEVHSGVCTDPQPLKEQPALNDSRYCLSSRLRVSATFWQNPRNHFRCQVQFYGLSENDEWTQDRAKPVTQIVSAEAWGRADDVIKIHWQEKKSNTILGSQEGNTMKTNDTYMKFSWLTVPEKSLDKEHRCIVRHENNKNGVDQEIIFPPIKTDVITMDPKDNCSKDANDTLLLQLTNTSAYYMYLLLLLKSVVYFAIITCCLLRRTAFCCNGEKS

SEQ ID NO: 16071 - protein, 859 aa, synthetic construct
MALPVTALLLPLALLLHAARPEVQLVESGGGLVQPGGSLRLSCAASGFSFSDFWMSWVRQAPGKGLEWVATISQAGSEKDYVDSVKGRFTISRDNAKKSLYLQMNSLRAEDTAVYYCASGVYSFDYRGQGTLVTVSSGTGGGGSGGGGSGGGGSEFDIQLTQSPSFLSASVGDRVTITCSARSSISFMYWYQQKPGKAPKLLIYDTSNLASGVPSRFSGSGSGTEFTLTISSLEAEDAATYYCQQWSSYPLTFGQGTKLEIKLEIQNPDPAVYQLRDSKSSDKSVCLFTDFDSQTNVSQSKDSDVYITDKCVLDMRSMDFKSNSAVAWSNKSDFACANAFNNSIIPEDTFFPSPESSDSTDHVKPKETENTKQPSKSCHKPKAIVHTEKVNMMSLTVLGLRMLFAKTVAVNFLLTAKLFFLRAKRSGSGVKQTLNFDLLKLAGDVESNPGPTSMDWIWRILFLVGAATGAHSFEQVQLVQSGAEVKKPGASVKVSCKASGYTFTGSWMNWVRQAPGQGLEWIGRIYPGDGETNYNGKFKDRVTITADKSTSTAYMELSSLRSEDTAVYYCARIYGNNVYFDVWGQGTTVTVSSTREDLKNVFPPEVAVFEPSEAEISHTQKATLVCLATGFYPDHVELSWWVNGKEVHSGVCTDPQPLKEQPALNDSRYCLSSRLRVSATFWQNPRNHFRCQVQFYGLSENDEWTQDRAKPVTQIVSAEAWGRADDVIKIHWQEKKSNTILGSQEGNTMKTNDTYMKFSWLTVPEKSLDKEHRCIVRHENNKNGVDQEIIFPPIKTDVITMDPKDNCSKDANDTLLLQLTNTSAYYMYLLLLLKSVVYFAIITCCLLRRTAFCCNGEKS

SEQ ID NO: 16072 - protein, 867 aa, synthetic construct
MALPVTALLLPLALLLHAARPEVQLVESGGGLVQPGGSLRLSCAASGFSFSDFWMSWVRQAPGKGLEWVATISQAGSEKDYVDSVKGRFTISRDNAKKSLYLQMNSLRAEDTAVYYCASGVYSFDYRGQGTLVTVSSGTGGGGSGGGGSGGGGSEFQLVLTQSPSASASLGSSVKLTCTLSSGHKTDTIDWYQQQPGKAPRYLMKLEGSGSYNKGSGVPDRFSGSSSGADWYLTISSLQSEDEADYYCGTDYPGNYLFGGGTQLTVLGLEIQNPDPAVYQLRDSKSSDKSVCLFTDFDSQTNVSQSKDSDVYITDKCVLDMRSMDFKSNSAVAWSNKSDFACANAFNNSIIPEDTFFPSPESSDSTDHVKPKETENTKQPSKSCHKPKAIVHTEKVNMMSLTVLGLRMLFAKTVAVNFLLTAKLFFLRAKRSGSGVKQTLNFDLLKLAGDVESNPGPTSMDWIWRILFLVGAATGAHSFEQEQLVESGGGLVQPGGSLRLSCAASGFTFSDYYMSWIRQAPGKGLEWVATIYPSSGKTYYADSAKGRLTISSDNAKDSLYLQMNSLRAEDTAVYYCTRDSYADDAALFDIWGQGTTVTVSSTREDLKNVFPPEVAVFEPSEAEISHTQKATLVCLATGFYPDHVELSWWVNGKEVHSGVCTDPQPLKEQPALNDSRYCLSSRLRVSATFWQNPRNHFRCQVQFYGLSENDEWTQDRAKPVTQIVSAEAWGRADDVIKIHWQEKKSNTILGSQEGNTMKTNDTYMKFSWLTVPEKSLDKEHRCIVRHENNKNGVDQEIIFPPIKTDVITMDPKDNCSKDANDTLLLQLTNTSAYYMYLLLLLKSVVYFAIITCCLLRRTAFCCNGEKS

SEQ ID NO: 16073 - protein, 859 aa, synthetic construct; identical to SEQ ID NO: 16069

SEQ ID NO: 16074 - protein, 866 aa, synthetic construct; identical to SEQ ID NO: 16070

SEQ ID NO: 16075 - protein, 859 aa, synthetic construct; identical to SEQ ID NO: 16071

SEQ ID NO: 16076 - protein, 867 aa, synthetic construct; identical to SEQ ID NO: 16072

SEQ ID NO: 16077 - protein, 866 aa, synthetic construct
MALPVTALLLPLALLLHAARPEVQLVESGGGLVQPGGSLRLSCAASGFSFSDFWMSWVRQAPGKGLEWVATISQAGSEKDYVDSVKGRFTISRDNAKKSLYLQMNSLRAEDTAVYYCASGVYSFDYRGQGTLVTVSSGTGGGGSGGGGSGGGGSEFDIQLTQSPSSLSASVGDRVSFTCQASQDINNFLNWYQQKPGKAPKLLIYDASNLETGVPSRFSGSGSGTDFTFTISSLQPEDIATYYCQQYGNLPFTFGGGTKVEIKRLEIQNPDPAVYQLRDSKSSDKSVCLFTDFDSQTNVSQSKDSDVYITDKCVLDMRSMDFKSNSAVAWSNKSDFACANAFNNSIIPEDTFFPSPESSDSTDHVKPKETENTKQPSKSCHKPKAIVHTEKVNMMSLTVLGLRMLFAKTVAVNFLLTAKLFFLRAKRSGSGVKQTLNFDLLKLAGDVESNPGPTSMDWIWRILFLVGAATGAHSFEQVQLQESGPGLVKPSQTLSLTCTVSGGSISSGGFYWSWIRQHPGKGLEWIGYIHHSGSTHYNPSLKSRVTISIDTSKNLFSLRLSSVTAADTAVYYCASLVYCGGDCYSGFDYWGQGTLVTVSSTREDLKNVFPPEVAVFEPSEAEISHTQKATLVCLATGFYPDHVELSWWVNGKEVHSGVCTDPQPLKEQPALNDSRYCLSSRLRVSATFWQNPRNHFRCQVQFYGLSENDEWTQDRAKPVTQIVSAEAWGRADDVIKIHWQEKKSNTILGSQEGNTMKTNDTYMKFSWLTVPEKSLDKEHRCIVRHENNKNGVDQEIIFPPIKTDVITMDPKDNCSKDANDTLLLQLTNTSAYYMYLLLLLKSVVYFAIITCCLLRRTAFCCNGEKS

SEQ ID NO: 16078 - protein, 862 aa, synthetic construct
MALPVTALLLPLALLLHAARPEVQLVESGGGLVQPGGSLRLSCAASGFSFSDFWMSWVRQAPGKGLEWVATISQAGSEKDYVDSVKGRFTISRDNAKKSLYLQMNSLRAEDTAVYYCASGVYSFDYRGQGTLVTVSSGTGGGGSGGGGSGGGGSEFDIQMTQSPSSLSASVGDRVTITCKSSQSVLYSSNQKNYLAWFQQKPGKAPKLLIYWASTRESGVPSRFSGSGSGTDFTLTISSLQPEDFATYFCHQYLSSYTFGQGTKVEIKRLEIQNPDPAVYQLRDSKSSDKSVCLFTDFDSQTNVSQSKDSDVYITDKCVLDMRSMDFKSNSAVAWSNKSDFACANAFNNSIIPEDTFFPSPESSDSTDHVKPKETENTKQPSKSCHKPKAIVHTEKVNMMSLTVLGLRMLFAKTVAVNFLLTAKLFFLRAKRSGSGVKQTLNFDLLKLAGDVESNPGPTSMDWIWRILFLVGAATGAHSFEEVQLVESGGGLVQPGGSLRLSCAASGYTFTTYWMHWVRQAPGKGLEWVGYIRPSTGYTEYNQKFKDRFTISADTSKNTAYLQMNSLRAEDTAVYYCARSRWLLDYWGQGTLVTVSTREDLKNVFPPEVAVFEPSEAEISHTQKATLVCLATGFYPDHVELSWWVNGKEVHSGVCTDPQPLKEQPALNDSRYCLSSRLRVSATFWQNPRNHFRCQVQFYGLSENDEWTQDRAKPVTQIVSAEAWGRADDVIKIHWQEKKSNTILGSQEGNTMKTNDTYMKFSWLTVPEKSLDKEHRCIVRHENNKNGVDQEIIFPPIKTDVITMDPKDNCSKDANDTLLLQLTNTSAYYMYLLLLLKSVVYFAIITCCLLRRTAFCCNGEKS

SEQ ID NO: 16079 - protein, 859 aa, synthetic construct
MALPVTALLLPLALLLHAARPEVQLVESGGGLVQPGGSLRLSCAASGFSFSDFWMSWVRQAPGKGLEWVATISQAGSEKDYVDSVKGRFTISRDNAKKSLYLQMNSLRAEDTAVYYCASGVYSFDYRGQGTLVTVSSGTGGGGSGGGGSGGGGSEFDIQMTQSPSSLSASVGDRVTITCRASQDISNYLNWYQQKPGKAPKLLIYYTSRLHSGVPSRFSGSGSGTDFTLTISSLQPEDFATYYCQQGNTLPYTFGQGTKVEIKRLEIQNPDPAVYQLRDSKSSDKSVCLFTDFDSQTNVSQSKDSDVYITDKCVLDMRSMDFKSNSAVAWSNKSDFACANAFNNSIIPEDTFFPSPESSDSTDHVKPKETENTKQPSKSCHKPKAIVHTEKVNMMSLTVLGLRMLFAKTVAVNFLLTAKLFFLRAKRSGSGVKQTLNFDLLKLAGDVESNPGPTSMDWIWRILFLVGAATGAHSFEEVQLVESGGGLVQPGGSLRLSCAASGFTFSDYFMSWVRQAPGKGLEWVATISNGGTYTYYPDSVKGRFTISRDNSKNTLYLQMNSLRAEDTAVYYCARFDGYIFDYWGQGTLVTVSSTREDLKNVFPPEVAVFEPSEAEISHTQKATLVCLATGFYPDHVELSWWVNGKEVHSGVCTDPQPLKEQPALNDSRYCLSSRLRVSATFWQNPRNHFRCQVQFYGLSENDEWTQDRAKPVTQIVSAEAWGRADDVIKIHWQEKKSNTILGSQEGNTMKTNDTYMKFSWLTVPEKSLDKEHRCIVRHENNKNGVDQEIIFPPIKTDVITMDPKDNCSKDANDTLLLQLTNTSAYYMYLLLLLKSVVYFAIITCCLLRRTAFCCNGEKS

SEQ ID NO: 16080 - protein, 993 aa, synthetic construct
MALPVTALLLPLALLLHAARPEVQLVESGGGLVQPGGSLRLSCAASGFSFSDFWMSWVRQAPGKGLEWVATISQAGSEKDYVDSVKGRFTISRDNAKKSLYLQMNSLRAEDTAVYYCASGVYSFDYRGQGTLVTVSSGTGGGGSGGGGSGGGGSEFDIQMTQTTSSLSASLGDRVTISCRASQDISKYLNWYQQKPDGTVKLLIYHTSRLHSGVPSRFSGSGSGTDYSLTISNLEQEDIATYFCQQGNTLPYTFGGGTKLEITLEDLKNVFPPEVAVFEPSEAEISHTQKATLVCLATGFYPDHVELSWWVNGKEVHSGVCTDPQPLKEQPALNDSRYCLSSRLRVSATFWQNPRNHFRCQVQFYGLSENDEWTQDRAKPVTQIVSAEAWGRADDVIKIHWQEKKSNTILGSQEGNTMKTNDTYMKFSWLTVPEKSLDKEHRCIVRHENNKNGVDQEIIFPPIKTDVITMDPKDNCSKDANDTLLLQLTNTSAYYMYLLLLLKSVVYFAIITCCLLRRTAFCCNGEKSRAKRSGSGATNFSLLKQAGDVEENPGPTSMDWIWRILFLVGAATGAHSGPQLQLQESGPGLVKPSETLSLTCTVSGDSISSGDYYWGWIRQPPGKGLEWIGHIYYSGVTYYNPSLKSRVTISVDTSRNQFSLKLSSVTAADTAVYYCTREDSSNWRSRGQGTLVTVSSGSGGGGSGGGGSGGGGSFEVKLQESGPGLVAPSQSLSVTCTVSGVSLPDYGVSWIRQPPRKGLEWLGVIWGSETTYYNSALKSRLTIIKDNSKSQVFLKMNSLQTDDTAIYYCAKHYYYGGSYAMDYWGQGTSVTVSSTRIQNPDPAVYQLRDSKSSDKSVCLFTDFDSQTNVSQSKDSDVYITDKCVLDMRSMDFKSNSAVAWSNKSDFACANAFNNSIIPEDTFFPSPESSDSTDHVKPKETENTKQPSKSCHKPKAIVHTEKVNMMSLTVLGLRMLFAKTVAVNFLLTAKLFFL

SEQ ID NO: 16081 - protein, 994 aa, synthetic construct
MALPVTALLLPLALLLHAARPEVQLVESGGGLVQPGGSLRLSCAASGFSFSDFWMSWVRQAPGKGLEWVATISQAGSEKDYVDSVKGRFTISRDNAKKSLYLQMNSLRAEDTAVYYCASGVYSFDYRGQGTLVTVSSGTGGGGSGGGGSGGGGSEFEIVMTQSPATLSLSPGERATLSCRASQDISKYLNWYQQKPGQAPRLLIYHTSRLHSGIPARFSGSGSGTDYTLTISSLQPEDFAVYFCQQGNTLPYTFGQGTKLEIKLEDLKNVFPPEVAVFEPSEAEISHTQKATLVCLATGFYPDHVELSWWVNGKEVHSGVCTDPQPLKEQPALNDSRYCLSSRLRVSATFWQNPRNHFRCQVQFYGLSENDEWTQDRAKPVTQIVSAEAWGRADDVIKIHWQEKKSNTILGSQEGNTMKTNDTYMKFSWLTVPEKSLDKEHRCIVRHENNKNGVDQEIIFPPIKTDVITMDPKDNCSKDANDTLLLQLTNTSAYYMYLLLLLKSVVYFAIITCCLLRRTAFCCNGEKSRAKRSGSGATNFSLLKQAGDVEENPGPTSMDWIWRILFLVGAATGAHSGPQLQLQESGPGLVKPSETLSLTCTVSGDSISSGDYYWGWIRQPPGKGLEWIGHIYYSGVTYYNPSLKSRVTISVDTSRNQFSLKLSSVTAADTAVYYCTREDSSNWRSRGQGTLVTVSSGSGGGGSGGGGSGGGGSFEQVQLQESGPGLVKPSETLSLTCTVSGVSLPDYGVSWIRQPPGKGLEWIGVIWGSETTYYNSSLKSRVTISKDNSKNQVSLKLSSVTAADTAVYYCAKHYYYGGSYAMDYWGQGTLVTVSSTRIQNPDPAVYQLRDSKSSDKSVCLFTDFDSQTNVSQSKDSDVYITDKCVLDMRSMDFKSNSAVAWSNKSDFACANAFNNSIIPEDTFFPSPESSDSTDHVKPKETENTKQPSKSCHKPKAIVHTEKVNMMSLTVLGLRMLFAKTVAVNFLLTAKLFFL

SEQ ID NO: 16082 - protein, 995 aa, synthetic construct
MALPVTALLLPLALLLHAARPEVQLVESGGGLVQPGGSLRLSCAASGFSFSDFWMSWVRQAPGKGLEWVATISQAGSEKDYVDSVKGRFTISRDNAKKSLYLQMNSLRAEDTAVYYCASGVYSFDYRGQGTLVTVSSGTGGGGSGGGGSGGGGSEFDEIVLTQSPATLSLSPGERATLSCSASSSVSYMHWYQQKPGQAPRLLIYDTSKLASGIPARFSGSGSGTDFTLTISSLEPEDVAVYYCFQGSVYPFTFGQGTKLEIKRLEDLKNVFPPEVAVFEPSEAEISHTQKATLVCLATGFYPDHVELSWWVNGKEVHSGVCTDPQPLKEQPALNDSRYCLSSRLRVSATFWQNPRNHFRCQVQFYGLSENDEWTQDRAKPVTQIVSAEAWGRADDVIKIHWQEKKSNTILGSQEGNTMKTNDTYMKFSWLTVPEKSLDKEHRCIVRHENNKNGVDQEIIFPPIKTDVITMDPKDNCSKDANDTLLLQLTNTSAYYMYLLLLLKSVVYFAIITCCLLRRTAFCCNGEKSRAKRSGSGATNFSLLKQAGDVEENPGPTSMDWIWRILFLVGAATGAHSGPQLQLQESGPGLVKPSETLSLTCTVSGDSISSGDYYWGWIRQPPGKGLEWIGHIYYSGVTYYNPSLKSRVTISVDTSRNQFSLKLSSVTAADTAVYYCTREDSSNWRSRGQGTLVTVSSGSGGGGSGGGGSGGGGSFEQVQLQESGPGLVKPSQTLSLTCTVSGGSISTSGMGVGWIRQHPGKGLEWIGHIWWDDDKRYNPALKSRVTISVDTSKNQFSLKLSSVTAADTAVYYCARMELWSYYFDYWGQGTLVTVSSTRIQNPDPAVYQLRDSKSSDKSVCLFTDFDSQTNVSQSKDSDVYITDKCVLDMRSMDFKSNSAVAWSNKSDFACANAFNNSIIPEDTFFPSPESSDSTDHVKPKETENTKQPSKSCHKPKAIVHTEKVNMMSLTVLGLRMLFAKTVAVNFLLTAKLFFL

SEQ ID NO: 16083 - protein, 993 aa, synthetic construct
MALPVTALLLPLALLLHAARPEVQLVESGGGLVQPGGSLRLSCAASGFSFSDFWMSWVRQAPGKGLEWVATISQAGSEKDYVDSVKGRFTISRDNAKKSLYLQMNSLRAEDTAVYYCASGVYSFDYRGQGTLVTVSSGTGGGGSGGGGSGGGGSEFDYIHVTQSPSSLSVSIGDRVTINCQTSQGVGSDLHWYQHKPGRAPKLLIHHASSVEDGVPSRFSGTGFHTSFNLTINDLQADDIGTYYCQVLQSFGRGSRLDTKLEDLKNVFPPEVAVFEPSEAEISHTQKATLVCLATGFYPDHVELSWWVNGKEVHSGVCTDPQPLKEQPALNDSRYCLSSRLRVSATFWQNPRNHFRCQVQFYGLSENDEWTQDRAKPVTQIVSAEAWGRADDVIKIHWQEKKSNTILGSQEGNTMKTNDTYMKFSWLTVPEKSLDKEHRCIVRHENNKNGVDQEIIFPPIKTDVITMDPKDNCSKDANDTLLLQLTNTSAYYMYLLLLLKSVVYFAIITCCLLRRTAFCCNGEKSRAKRSGSGATNFSLLKQAGDVEENPGPTSMDWIWRILFLVGAATGAHSGPQLQLQESGPGLVKPSETLSLTCTVSGDSISSGDYYWGWIRQPPGKGLEWIGHIYYSGVTYYNPSLKSRVTISVDTSRNQFSLKLSSVTAADTAVYYCTREDSSNWRSRGQGTLVTVSSGSGGGGSGGGGSGGGGSFERAHLVQSGTAMKKPGASVRVSCQTSGYTFTAHILFWFRQAPGRGLEWVGWIKPQYGAVNFGGGFRDRVTLTRDVYREIAYMDIRGLKPDDTAVYYCARDRSYGDSSWALDAWGQGTTVVVSATRIQNPDPAVYQLRDSKSSDKSVCLFTDFDSQTNVSQSKDSDVYITDKCVLDMRSMDFKSNSAVAWSNKSDFACANAFNNSIIPEDTFFPSPESSDSTDHVKPKETENTKQPSKSCHKPKAIVHTEKVNMMSLTVLGLRMLFAKTVAVNFLLTAKLFFL

SEQ ID NO: 16084 - protein, 1003 aa, synthetic construct
MALPVTALLLPLALLLHAARPEVQLVESGGGLVQPGGSLRLSCAASGFSFSDFWMSWVRQAPGKGLEWVATISQAGSEKDYVDSVKGRFTISRDNAKKSLYLQMNSLRAEDTAVYYCASGVYSFDYRGQGTLVTVSSGTGGGGSGGGGSGGGGSEFDVQMIQTPDSLAVSLGQRATISCRASESVDNYGISFMHWYQQKPGQSPKLLIYRASNLESGIPARFSGSGSRTDFTLTINPVETDDVATYYCQQNNKDPPTFGGGTKLEIKLEDLKNVFPPEVAVFEPSEAEISHTQKATLVCLATGFYPDHVELSWWVNGKEVHSGVCTDPQPLKEQPALNDSRYCLSSRLRVSATFWQNPRNHFRCQVQFYGLSENDEWTQDRAKPVTQIVSAEAWGRADDVIKIHWQEKKSNTILGSQEGNTMKTNDTYMKFSWLTVPEKSLDKEHRCIVRHENNKNGVDQEIIFPPIKTDVITMDPKDNCSKDANDTLLLQLTNTSAYYMYLLLLLKSVVYFAIITCCLLRRTAFCCNGEKSRAKRSGSGATNFSLLKQAGDVEENPGPTSMDWIWRILFLVGAATGAHSGPQLQLQESGPGLVKPSETLSLTCTVSGDSISSGDYYWGWIRQPPGKGLEWIGHIYYSGVTYYNPSLKSRVTISVDTSRNQFSLKLSSVTAADTAVYYCTREDSSNWRSRGQGTLVTVSSGSGGGGSGGGGSGGGGSFEGGGGSQVQLQQSGAELVKPGASVKISCKASGYAFSSYWMNWVKQRPGKGLEWIGQIYPGDGDTTYNGKFKGKATLTADKSSSTVYMQLNSLTSEDSAVYFCVRYYYGSSGYFDYWGQGTTLTVSSTRIQNPDPAVYQLRDSKSSDKSVCLFTDFDSQTNVSQSKDSDVYITDKCVLDMRSMDFKSNSAVAWSNKSDFACANAFNNSIIPEDTFFPSPESSDSTDHVKPKETENTKQPSKSCHKPKAIVHTEKVNMMSLTVLGLRMLFAKTVAVNFLLTAKLFFL

SEQ ID NO: 16085 - protein, 994 aa, synthetic construct
MALPVTALLLPLALLLHAARPEVQLVESGGGLVQPGGSLRLSCAASGFSFSDFWMSWVRQAPGKGLEWVATISQAGSEKDYVDSVKGRFTISRDNAKKSLYLQMNSLRAEDTAVYYCASGVYSFDYRGQGTLVTVSSGTGGGGSGGGGSGGGGSEFDVQMIQTPSSLSASLGDRVTISCRASQDIGNYLNWYQQKPDGTVKLLIYYTSRLHSGVPSRFSGSGSGTEYSLTISNLEQEDIATYFCQQGSALPPTFGGGTKLEINLEDLKNVFPPEVAVFEPSEAEISHTQKATLVCLATGFYPDHVELSWWVNGKEVHSGVCTDPQPLKEQPALNDSRYCLSSRLRVSATFWQNPRNHFRCQVQFYGLSENDEWTQDRAKPVTQIVSAEAWGRADDVIKIHWQEKKSNTILGSQEGNTMKTNDTYMKFSWLTVPEKSLDKEHRCIVRHENNKNGVDQEIIFPPIKTDVITMDPKDNCSKDANDTLLLQLTNTSAYYMYLLLLLKSVVYFAIITCCLLRRTAFCCNGEKSRAKRSGSGATNFSLLKQAGDVEENPGPTSMDWIWRILFLVGAATGAHSGPQLQLQESGPGLVKPSETLSLTCTVSGDSISSGDYYWGWIRQPPGKGLEWIGHIYYSGVTYYNPSLKSRVTISVDTSRNQFSLKLSSVTAADTAVYYCTREDSSNWRSRGQGTLVTVSSGSGGGGSGGGGSGGGGSFEALQLQQSGAELVRPGASVTLSCKASGYTFTDYEMHWVKQTPVHGLEWIGAIDPETGGTAYNQKFEGKAILTADKSSSTAYMELRSLTSEDSPVYYCARRRYYGSSSFDYWGQGTTLTVSSTRIQNPDPAVYQLRDSKSSDKSVCLFTDFDSQTNVSQSKDSDVYITDKCVLDMRSMDFKSNSAVAWSNKSDFACANAFNNSIIPEDTFFPSPESSDSTDHVKPKETENTKQPSKSCHKPKAIVHTEKVNMMSLTVLGLRMLFAKTVAVNFLLTAKLFFL

SEQ ID NO: 16086 - protein, 998 aa, synthetic construct
MALPVTALLLPLALLLHAARPEVQLVESGGGLVQPGGSLRLSCAASGFSFSDFWMSWVRQAPGKGLEWVATISQAGSEKDYVDSVKGRFTISRDNAKKSLYLQMNSLRAEDTAVYYCASGVYSFDYRGQGTLVTVSSGTGGGGSGGGGSGGGGSEFDIVLTQSPASLAVSLGQRATISCRASKSVSTSGYSYLHWYQQKPGQPPKLLIYLASNLESGVPARFSGSGSGTDFTLNIHPVEEEDAATYYCQHSRELPFTFGSGTKLEIKLEDLKNVFPPEVAVFEPSEAEISHTQKATLVCLATGFYPDHVELSWWVNGKEVHSGVCTDPQPLKEQPALNDSRYCLSSRLRVSATFWQNPRNHFRCQVQFYGLSENDEWTQDRAKPVTQIVSAEAWGRADDVIKIHWQEKKSNTILGSQEGNTMKTNDTYMKFSWLTVPEKSLDKEHRCIVRHENNKNGVDQEIIFPPIKTDVITMDPKDNCSKDANDTLLLQLTNTSAYYMYLLLLLKSVVYFAIITCCLLRRTAFCCNGEKSRAKRSGSGATNFSLLKQAGDVEENPGPTSMDWIWRILFLVGAATGAHSGPQLQLQESGPGLVKPSETLSLTCTVSGDSISSGDYYWGWIRQPPGKGLEWIGHIYYSGVTYYNPSLKSRVTISVDTSRNQFSLKLSSVTAADTAVYYCTREDSSNWRSRGQGTLVTVSSGSGGGGSGGGGSGGGGSFEQVQLVESGGGLVQPGGSLKLSCAASGFDFSRYWMSWVRQAPGKGLEWIGEINPTSSTINFTPSLKDKVFISRDNAKNTLYLQMSKVRSEDTALYYCARGNYYRYGDAMDYWGQGTSVTVSTRIQNPDPAVYQLRDSKSSDKSVCLFTDFDSQTNVSQSKDSDVYITDKCVLDMRSMDFKSNSAVAWSNKSDFACANAFNNSIIPEDTFFPSPESSDSTDHVKPKETENTKQPSKSCHKPKAIVHTEKVNMMSLTVLGLRMLFAKTVAVNFLLTAKLFFL

SEQ ID NO: 16087 - protein, 996 aa, synthetic construct
MALPVTALLLPLALLLHAARPEVQLVESGGGLVQPGGSLRLSCAASGFSFSDFWMSWVRQAPGKGLEWVATISQAGSEKDYVDSVKGRFTISRDNAKKSLYLQMNSLRAEDTAVYYCASGVYSFDYRGQGTLVTVSSGTGGGGSGGGGSGGGGSEFDIQMTQSPSSLSASVGDRVTITCSASQDISNYLNWYQQKPGKAPKLLIYYTSNLHSGVPSRFSGSGSGTDFTLTISSLQPEDFATYYCQQYRKLPWTFGQGTKLEIKRLEDLKNVFPPEVAVFEPSEAEISHTQKATLVCLATGFYPDHVELSWWVNGKEVHSGVCTDPQPLKEQPALNDSRYCLSSRLRVSATFWQNPRNHFRCQVQFYGLSENDEWTQDRAKPVTQIVSAEAWGRADDVIKIHWQEKKSNTILGSQEGNTMKTNDTYMKFSWLTVPEKSLDKEHRCIVRHENNKNGVDQEIIFPPIKTDVITMDPKDNCSKDANDTLLLQLTNTSAYYMYLLLLLKSVVYFAIITCCLLRRTAFCCNGEKSRAKRSGSGATNFSLLKQAGDVEENPGPTSMDWIWRILFLVGAATGAHSGPQLQLQESGPGLVKPSETLSLTCTVSGDSISSGDYYWGWIRQPPGKGLEWIGHIYYSGVTYYNPSLKSRVTISVDTSRNQFSLKLSSVTAADTAVYYCTREDSSNWRSRGQGTLVTVSSGSGGGGSGGGGSGGGGSFEQVQLVQSGAEVKKPGSSVKVSCKASGGTFSNYWMHWVRQAPGQGLEWMGATYRGHSDTYYNQKFKGRVTITADKSTSTAYMELSSLRSEDTAVYYCARGAIYDGYDVLDNWGQGTLVTVSSTRIQNPDPAVYQLRDSKSSDKSVCLFTDFDSQTNVSQSKDSDVYITDKCVLDMRSMDFKSNSAVAWSNKSDFACANAFNNSIIPEDTFFPSPESSDSTDHVKPKETENTKQPSKSCHKPKAIVHTEKVNMMSLTVLGLRMLFAKTVAVNFLLTAKLFFL

SEQ ID NO: 16088 - protein, 996 aa, synthetic construct
MALPVTALLLPLALLLHAARPEVQLVESGGGLVQPGGSLRLSCAASGFSFSDFWMSWVRQAPGKGLEWVATISQAGSEKDYVDSVKGRFTISRDNAKKSLYLQMNSLRAEDTAVYYCASGVYSFDYRGQGTLVTVSSGTGGGGSGGGGSGGGGSEFDIVLTQSPATLSLSPGDRATISCRASESVTILGSHLIYWYQQKPGQPPRLLIQLASNVQTGVPARFSGSGSRTDFTLTISSVEPEDFAVYYCLQSRTIPRTFGQGTKLEIKRLEDLKNVFPPEVAVFEPSEAEISHTQKATLVCLATGFYPDHVELSWWVNGKEVHSGVCTDPQPLKEQPALNDSRYCLSSRLRVSATFWQNPRNHFRCQVQFYGLSENDEWTQDRAKPVTQIVSAEAWGRADDVIKIHWQEKKSNTILGSQEGNTMKTNDTYMKFSWLTVPEKSLDKEHRCIVRHENNKNGVDQEIIFPPIKTDVITMDPKDNCSKDANDTLLLQLTNTSAYYMYLLLLLKSVVYFAIITCCLLRRTAFCCNGEKSRAKRSGSGATNFSLLKQAGDVEENPGPTSMDWIWRILFLVGAATGAHSGPQLQLQESGPGLVKPSETLSLTCTVSGDSISSGDYYWGWIRQPPGKGLEWIGHIYYSGVTYYNPSLKSRVTISVDTSRNQFSLKLSSVTAADTAVYYCTREDSSNWRSRGQGTLVTVSSGSGGGGSGGGGSGGGGSFEQVQLVQSGPEVKKPGESVKISCKASGYTFRHYSMNWVKQAPGQGLKWMGRINTESGVPIYADDFKGRFSFTVDTSASTAYLEISSLTSEDTAVYFCSNDYLYSLDFWGQGTTLTVSSTRIQNPDPAVYQLRDSKSSDKSVCLFTDFDSQTNVSQSKDSDVYITDKCVLDMRSMDFKSNSAVAWSNKSDFACANAFNNSIIPEDTFFPSPESSDSTDHVKPKETENTKQPSKSCHKPKAIVHTEKVNMMSLTVLGLRMLFAKTVAVNFLLTAKLFFL

SEQ ID NO: 16089 - protein, 997 aa, synthetic construct
MALPVTALLLPLALLLHAARPEVQLVESGGGLVQPGGSLRLSCAASGFSFSDFWMSWVRQAPGKGLEWVATISQAGSEKDYVDSVKGRFTISRDNAKKSLYLQMNSLRAEDTAVYYCASGVYSFDYRGQGTLVTVSSGTGGGGSGGGGSGGGGSEFQSVLTQPPSVSGAPGQRVTISCTGSSSNIGAGFDVHWYQQLPGTAPKLLIYGNSNRPSGVPDRFSGSKSGTSASLAITGLQAEDEADYYCQSYDSSLSGYVFGTGTKVTVLGLEDLKNVFPPEVAVFEPSEAEISHTQKATLVCLATGFYPDHVELSWWVNGKEVHSGVCTDPQPLKEQPALNDSRYCLSSRLRVSATFWQNPRNHFRCQVQFYGLSENDEWTQDRAKPVTQIVSAEAWGRADDVIKIHWQEKKSNTILGSQEGNTMKTNDTYMKFSWLTVPEKSLDKEHRCIVRHENNKNGVDQEIIFPPIKTDVITMDPKDNCSKDANDTLLLQLTNTSAYYMYLLLLLKSVVYFAIITCCLLRRTAFCCNGEKSRAKRSGSGATNFSLLKQAGDVEENPGPTSMDWIWRILFLVGAATGAHSGPQLQLQESGPGLVKPSETLSLTCTVSGDSISSGDYYWGWIRQPPGKGLEWIGHIYYSGVTYYNPSLKSRVTISVDTSRNQFSLKLSSVTAADTAVYYCTREDSSNWRSRGQGTLVTVSSGSGGGGSGGGGSGGGGSFEQVQLVQSGAEVKKPGASVKVSCKASGYTFTDYYMHWVRQAPGQRLEWMGWINPNSGGTNYAQKFQDRITVTRDTSSNTGYMELTRLRSDDTAVYYCARSPYSGVLDKWGQGTLVTVSSTRIQNPDPAVYQLRDSKSSDKSVCLFTDFDSQTNVSQSKDSDVYITDKCVLDMRSMDFKSNSAVAWSNKSDFACANAFNNSIIPEDTFFPSPESSDSTDHVKPKETENTKQPSKSCHKPKAIVHTEKVNMMSLTVLGLRMLFAKTVAVNFLLTAKLFFL

SEQ ID NO: 16090 - protein, 994 aa, synthetic construct
MALPVTALLLPLALLLHAARPEVQLVESGGGLVQPGGSLRLSCAASGFSFSDFWMSWVRQAPGKGLEWVATISQAGSEKDYVDSVKGRFTISRDNAKKSLYLQMNSLRAEDTAVYYCASGVYSFDYRGQGTLVTVSSGTGGGGSGGGGSGGGGSEFQAVLTQPPSASGTPGQRVTISCSGSSSNIGSYTVSWYQQLPGTAPKFLIYSNNQRPSGVPDRFSGSKSGTSASLAISGLQSEDEADYYCAAWDDSLNGYVFGTGTKVTVLGLEDLKNVFPPEVAVFEPSEAEISHTQKATLVCLATGFYPDHVELSWWVNGKEVHSGVCTDPQPLKEQPALNDSRYCLSSRLRVSATFWQNPRNHFRCQVQFYGLSENDEWTQDRAKPVTQIVSAEAWGRADDVIKIHWQEKKSNTILGSQEGNTMKTNDTYMKFSWLTVPEKSLDKEHRCIVRHENNKNGVDQEIIFPPIKTDVITMDPKDNCSKDANDTLLLQLTNTSAYYMYLLLLLKSVVYFAIITCCLLRRTAFCCNGEKSRAKRSGSGATNFSLLKQAGDVEENPGPTSMDWIWRILFLVGAATGAHSGPQLQLQESGPGLVKPSETLSLTCTVSGDSISSGDYYWGWIRQPPGKGLEWIGHIYYSGVTYYNPSLKSRVTISVDTSRNQFSLKLSSVTAADTAVYYCTREDSSNWRSRGQGTLVTVSSGSGGGGSGGGGSGGGGSFEVQLVQSGAEVKKPGESLKISCKGSGYDFTTYWIGWVRQMPGKGLEWMGIIYPGDSDTRYSPSVRGRVTISADKSINTAYLQWSSLEASDTAMYYCARMWTFSQDGWGQGTLVTVSSTRIQNPDPAVYQLRDSKSSDKSVCLFTDFDSQTNVSQSKDSDVYITDKCVLDMRSMDFKSNSAVAWSNKSDFACANAFNNSIIPEDTFFPSPESSDSTDHVKPKETENTKQPSKSCHKPKAIVHTEKVNMMSLTVLGLRMLFAKTVAVNFLLTAKLFFL

SEQ ID NO: 16091 - protein, 997 aa, synthetic construct
MALPVTALLLPLALLLHAARPEVQLVESGGGLVQPGGSLRLSCAASGFSFSDFWMSWVRQAPGKGLEWVATISQAGSEKDYVDSVKGRFTISRDNAKKSLYLQMNSLRAEDTAVYYCASGVYSFDYRGQGTLVTVSSGTGGGGSGGGGSGGGGSEFDIVMTQSPDSLAVSLGERATINCKSSQSILYSSNQKNYLAWYQQKPGQSPKLLIYWASTRESGVPDRFSGSGSGTDFTLTISSLQAEDVAVYYCHQYISSYTFGQGTKLEIKLEDLKNVFPPEVAVFEPSEAEISHTQKATLVCLATGFYPDHVELSWWVNGKEVHSGVCTDPQPLKEQPALNDSRYCLSSRLRVSATFWQNPRNHFRCQVQFYGLSENDEWTQDRAKPVTQIVSAEAWGRADDVIKIHWQEKKSNTILGSQEGNTMKTNDTYMKFSWLTVPEKSLDKEHRCIVRHENNKNGVDQEIIFPPIKTDVITMDPKDNCSKDANDTLLLQLTNTSAYYMYLLLLLKSVVYFAIITCCLLRRTAFCCNGEKSRAKRSGSGATNFSLLKQAGDVEENPGPTSMDWIWRILFLVGAATGAHSGPQLQLQESGPGLVKPSETLSLTCTVSGDSISSGDYYWGWIRQPPGKGLEWIGHIYYSGVTYYNPSLKSRVTISVDTSRNQFSLKLSSVTAADTAVYYCTREDSSNWRSRGQGTLVTVSSGSGGGGSGGGGSGGGGSFEQVQLVQSGAEVKKPGASVKVSCKASGYTFASQWMHWMRQAPGQGLEWIGWINPGNVNTKYNEKFKGRATLTVDTSTNTAYMELSSLRSEDTAVYYCARSTWYRPLDYWGQGTLVTVSSTRIQNPDPAVYQLRDSKSSDKSVCLFTDFDSQTNVSQSKDSDVYITDKCVLDMRSMDFKSNSAVAWSNKSDFACANAFNNSIIPEDTFFPSPESSDSTDHVKPKETENTKQPSKSCHKPKAIVHTEKVNMMSLTVLGLRMLFAKTVAVNFLLTAKLFFL

SEQ ID NO: 16092 - protein, 997 aa, synthetic construct
MALPVTALLLPLALLLHAARPEVQLVESGGGLVQPGGSLRLSCAASGFSFSDFWMSWVRQAPGKGLEWVATISQAGSEKDYVDSVKGRFTISRDNAKKSLYLQMNSLRAEDTAVYYCASGVYSFDYRGQGTLVTVSSGTGGGGSGGGGSGGGGSEFDHIVLTQSPSSLSASLGDRVTISCRASQDISTYLNWYQQKPDGTVKLLIFYTSRLHAGVPSRFSGSGSGTHHSLTISNLEQEDIATYFCQQGNSLPFTFGSGTKLEIKRLEDLKNVFPPEVAVFEPSEAEISHTQKATLVCLATGFYPDHVELSWWVNGKEVHSGVCTDPQPLKEQPALNDSRYCLSSRLRVSATFWQNPRNHFRCQVQFYGLSENDEWTQDRAKPVTQIVSAEAWGRADDVIKIHWQEKKSNTILGSQEGNTMKTNDTYMKFSWLTVPEKSLDKEHRCIVRHENNKNGVDQEIIFPPIKTDVITMDPKDNCSKDANDTLLLQLTNTSAYYMYLLLLLKSVVYFAIITCCLLRRTAFCCNGEKSRAKRSGSGATNFSLLKQAGDVEENPGPTSMDWIWRILFLVGAATGAHSGPQLQLQESGPGLVKPSETLSLTCTVSGDSISSGDYYWGWIRQPPGKGLEWIGHIYYSGVTYYNPSLKSRVTISVDTSRNQFSLKLSSVTAADTAVYYCTREDSSNWRSRGQGTLVTVSSGSGGGGSGGGGSGGGGSFEQVQLKESGPELEKPGASVKISCKASGYSFTAYSMNWVKQNNGMSLEWIGSIDPYYGDTKYAQKFKGKATLTVDKASSTAYLQLKSLTSEDSAVYYCARRMITTGDWYFDVWGAGTTVTVSSTRIQNPDPAVYQLRDSKSSDKSVCLFTDFDSQTNVSQSKDSDVYITDKCVLDMRSMDFKSNSAVAWSNKSDFACANAFNNSIIPEDTFFPSPESSDSTDHVKPKETENTKQPSKSCHKPKAIVHTEKVNMMSLTVLGLRMLFAKTVAVNFLLTAKLFFL

SEQ ID NO: 16093 - protein, 997 aa, synthetic construct; identical to SEQ ID NO: 16092

SEQ ID NO: 16094 - protein, 997 aa, synthetic construct
MALPVTALLLPLALLLHAARPEVQLVESGGGLVQPGGSLRLSCAASGFSFSDFWMSWVRQAPGKGLEWVATISQAGSEKDYVDSVKGRFTISRDNAKKSLYLQMNSLRAEDTAVYYCASGVYSFDYRGQGTLVTVSSGTGGGGSGGGGSGGGGSEFDEIVLTQSPATLSLSPGERATLSCRASQSVSSYLAWYQQKPGQAPRLLIYDASNRATGIPARFSGSGSGTDFTLTISSLEPEDFAVYYCQQRSNWPITFGQGTRLEIKLEDLKNVFPPEVAVFEPSEAEISHTQKATLVCLATGFYPDHVELSWWVNGKEVHSGVCTDPQPLKEQPALNDSRYCLSSRLRVSATFWQNPRNHFRCQVQFYGLSENDEWTQDRAKPVTQIVSAEAWGRADDVIKIHWQEKKSNTILGSQEGNTMKTNDTYMKFSWLTVPEKSLDKEHRCIVRHENNKNGVDQEIIFPPIKTDVITMDPKDNCSKDANDTLLLQLTNTSAYYMYLLLLLKSVVYFAIITCCLLRRTAFCCNGEKSRAKRSGSGATNFSLLKQAGDVEENPGPTSMDWIWRILFLVGAATGAHSGPQLQLQESGPGLVKPSETLSLTCTVSGDSISSGDYYWGWIRQPPGKGLEWIGHIYYSGVTYYNPSLKSRVTISVDTSRNQFSLKLSSVTAADTAVYYCTREDSSNWRSRGQGTLVTVSSGSGGGGSGGGGSGGGGSFEEVQLVESGGGLVQPGRSLRLSCAASGFTFNDYAMHWVRQAPGKGLEWVSTISWNSGSIGYADSVKGRFTISRDNAKKSLYLQMNSLRAEDTALYYCAKDIQYGNYYYGMDVWGQGTTVTVSSTRIQNPDPAVYQLRDSKSSDKSVCLFTDFDSQTNVSQSKDSDVYITDKCVLDMRSMDFKSNSAVAWSNKSDFACANAFNNSIIPEDTFFPSPESSDSTDHVKPKETENTKQPSKSCHKPKAIVHTEKVNMMSLTVLGLRMLFAKTVAVNFLLTAKLFFL

SEQ ID NO: 16095 - protein, 999 aa, synthetic construct
MALPVTALLLPLALLLHAARPEVQLVESGGGLVQPGGSLRLSCAASGFSFSDFWMSWVRQAPGKGLEWVATISQAGSEKDYVDSVKGRFTISRDNAKKSLYLQMNSLRAEDTAVYYCASGVYSFDYRGQGTLVTVSSGTGGGGSGGGGSGGGGSEFDIVMTQTPLSLPVTPGEPASISCRSSKSLLHSNGITYLYWYLQKPGQSPQLLIYQMSNLVSGVPDRFSGSGSGTDFTLKISRVEAEDVGVYYCAQNLELPYTFGGGTKVEIKRLEDLKNVFPPEVAVFEPSEAEISHTQKATLVCLATGFYPDHVELSWWVNGKEVHSGVCTDPQPLKEQPALNDSRYCLSSRLRVSATFWQNPRNHFRCQVQFYGLSENDEWTQDRAKPVTQIVSAEAWGRADDVIKIHWQEKKSNTILGSQEGNTMKTNDTYMKFSWLTVPEKSLDKEHRCIVRHENNKNGVDQEIIFPPIKTDVITMDPKDNCSKDANDTLLLQLTNTSAYYMYLLLLLKSVVYFAIITCCLLRRTAFCCNGEKSRAKRSGSGATNFSLLKQAGDVEENPGPTSMDWIWRILFLVGAATGAHSGPQLQLQESGPGLVKPSETLSLTCTVSGDSISSGDYYWGWIRQPPGKGLEWIGHIYYSGVTYYNPSLKSRVTISVDTSRNQFSLKLSSVTAADTAVYYCTREDSSNWRSRGQGTLVTVSSGSGGGGSGGGGSGGGGSFEQVQLVQSGAEVKKPGSSVKVSCKASGYAFSYSWINWVRQAPGQGLEWMGRIFPGDGDTDYNGKFKGRVTITADKSTSTAYMELSSLRSEDTAVYYCARNVFDGYWLVYWGQGTLVTVSSTRIQNPDPAVYQLRDSKSSDKSVCLFTDFDSQTNVSQSKDSDVYITDKCVLDMRSMDFKSNSAVAWSNKSDFACANAFNNSIIPEDTFFPSPESSDSTDHVKPKETENTKQPSKSCHKPKAIVHTEKVNMMSLTVLGLRMLFAKTVAVNFLLTAKLFFL

SEQ ID NO: 16096 - protein, 1000 aa, synthetic construct
MALPVTALLLPLALLLHAARPEVQLVESGGGLVQPGGSLRLSCAASGFSFSDFWMSWVRQAPGKGLEWVATISQAGSEKDYVDSVKGRFTISRDNAKKSLYLQMNSLRAEDTAVYYCASGVYSFDYRGQGTLVTVSSGTGGGGSGGGGSGGGGSEFDIQMTQSPSSLSASVGDRVTITCRSSQSIVHSVGNTFLEWYQQKPGKAPKLLIYKVSNRFSGVPSRFSGSGSGTDFTLTISSLQPEDFATYYCFQGSQFPYTFGQGTKVEIKRLEDLKNVFPPEVAVFEPSEAEISHTQKATLVCLATGFYPDHVELSWWVNGKEVHSGVCTDPQPLKEQPALNDSRYCLSSRLRVSATFWQNPRNHFRCQVQFYGLSENDEWTQDRAKPVTQIVSAEAWGRADDVIKIHWQEKKSNTILGSQEGNTMKTNDTYMKFSWLTVPEKSLDKEHRCIVRHENNKNGVDQEIIFPPIKTDVITMDPKDNCSKDANDTLLLQLTNTSAYYMYLLLLLKSVVYFAIITCCLLRRTAFCCNGEKSRAKRSGSGATNFSLLKQAGDVEENPGPTSMDWIWRILFLVGAATGAHSGPQLQLQESGPGLVKPSETLSLTCTVSGDSISSGDYYWGWIRQPPGKGLEWIGHIYYSGVTYYNPSLKSRVTISVDTSRNQFSLKLSSVTAADTAVYYCTREDSSNWRSRGQGTLVTVSSGSGGGGSGGGGSGGGGSFEEVQLVESGGGLVQPGGSLRLSCAASGYEFSRSWMNWVRQAPGKGLEWVGRIYPGDGDTNYSGKFKGRFTISADTSKNTAYLQMNSLRAEDTAVYYCARDGSSWDWYFDVWGQGTLVTVSSTRIQNPDPAVYQLRDSKSSDKSVCLFTDFDSQTNVSQSKDSDVYITDKCVLDMRSMDFKSNSAVAWSNKSDFACANAFNNSIIPEDTFFPSPESSDSTDHVKPKETENTKQPSKSCHKPKAIVHTEKVNMMSLTVLGLRMLFAKTVAVNFLLTAKLFFL

SEQ ID NO: 16097 - protein, 998 aa, synthetic construct
MALPVTALLLPLALLLHAARPEVQLVESGGGLVQPGGSLRLSCAASGFSFSDFWMSWVRQAPGKGLEWVATISQAGSEKDYVDSVKGRFTISRDNAKKSLYLQMNSLRAEDTAVYYCASGVYSFDYRGQGTLVTVSSGTGGGGSGGGGSGGGGSEFDIQMTQSPSSLSASVGDRVTITCRASQTIWSYLNWYQQRPGKAPNLLIYAASSLQSGVPSRFSGRGSGTDFTLTISSLQAEDFATYYCQQSYSIPQIFGQGTKLEIKLEDLKNVFPPEVAVFEPSEAEISHTQKATLVCLATGFYPDHVELSWWVNGKEVHSGVCTDPQPLKEQPALNDSRYCLSSRLRVSATFWQNPRNHFRCQVQFYGLSENDEWTQDRAKPVTQIVSAEAWGRADDVIKIHWQEKKSNTILGSQEGNTMKTNDTYMKFSWLTVPEKSLDKEHRCIVRHENNKNGVDQEIIFPPIKTDVITMDPKDNCSKDANDTLLLQLTNTSAYYMYLLLLLKSVVYFAIITCCLLRRTAFCCNGEKSRAKRSGSGATNFSLLKQAGDVEENPGPTSMDWIWRILFLVGAATGAHSGPQLQLQESGPGLVKPSETLSLTCTVSGDSISSGDYYWGWIRQPPGKGLEWIGHIYYSGVTYYNPSLKSRVTISVDTSRNQFSLKLSSVTAADTAVYYCTREDSSNWRSRGQGTLVTVSSGSGGGGSGGGGSGGGGSFEQVQLQQSGPGLVKPSQTLSLTCAISGDSVSSNSAAWNWIRQSPSRGLEWLGRTYYRSKWYNDYAVSVKSRITINPDTSKNQFSLQLNSVTPEDTAVYYCAREVTGDLEDAFDIWGQGTMVTVSSTRIQNPDPAVYQLRDSKSSDKSVCLFTDFDSQTNVSQSKDSDVYITDKCVLDMRSMDFKSNSAVAWSNKSDFACANAFNNSIIPEDTFFPSPESSDSTDHVKPKETENTKQPSKSCHKPKAIVHTEKVNMMSLTVLGLRMLFAKTVAVNFLLTAKLFFL

SEQ ID NO: 16098 - protein, 991 aa, synthetic construct
MALPVTALLLPLALLLHAARPEVQLVESGGGLVQPGGSLRLSCAASGFSFSDFWMSWVRQAPGKGLEWVATISQAGSEKDYVDSVKGRFTISRDNAKKSLYLQMNSLRAEDTAVYYCASGVYSFDYRGQGTLVTVSSGTGGGGSGGGGSGGGGSEFDIQMTQSPATIENTSLSASVGDRVTITCRASQGISSWLTWYQQKPEKAPKSLIYAASSLQSGVPSRFSGSGSGTDFTLTISSLQPEDFATYYCQQYDSYPITFGQGTRLEIKLEDLKNVFPPEVAVFEPSEAEISHTQKATLVCLATGFYPDHVELSWWVNGKEVHSGVCTDPQPLKEQPALNDSRYCLSSRLRVSATFWQNPRNHFRCQVQFYGLSENDEWTQDRAKPVTQIVSAEAWGRADDVIKIHWQEKKSNTILGSQEGNTMKTNDTYMKFSWLTVPEKSLDKEHRCIVRHENNKNGVDQEIIFPPIKTDVITMDPKDNCSKDANDTLLLQLTNTSAYYMYLLLLLKSVVYFAIITCCLLRRTAFCCNGEKSRAKRSGSGATNFSLLKQAGDVEENPGPTSMDWIWRILFLVGAATGAHSGPQLQLQESGPGLVKPSETLSLTCTVSGDSISSGDYYWGWIRQPPGKGLEWIGHIYYSGVTYYNPSLKSRVTISVDTSRNQFSLKLSSVTAADTAVYYCTREDSSNWRSRGQGTLVTVSSGSGGGGSGGGGSGGGGSFEQVQLQQWGAGLLKPSETLSLTCAVYGGSFSAYYWSWIRQPPGKGLEWIGDINHGGGTNYNPSLKSRVTISVDTSKNQFSLKLNSVTAADTAVYYCASLTAYWGQGSLVTVSSTRIQNPDPAVYQLRDSKSSDKSVCLFTDFDSQTNVSQSKDSDVYITDKCVLDMRSMDFKSNSAVAWSNKSDFACANAFNNSIIPEDTFFPSPESSDSTDHVKPKETENTKQPSKSCHKPKAIVHTEKVNMMSLTVLGLRMLFAKTVAVNFLLTAKLFFL

SEQ ID NO: 16099 - protein, 996 aa, synthetic construct
MALPVTALLLPLALLLHAARPEVQLVESGGGLVQPGGSLRLSCAASGFSFSDFWMSWVRQAPGKGLEWVATISQAGSEKDYVDSVKGRFTISRDNAKKSLYLQMNSLRAEDTAVYYCASGVYSFDYRGQGTLVTVSSGTGGGGSGGGGSGGGGSEFDEIVLTQSPDSLAVSLGERATINCKASQSVDFDGDSYLNWYQQKPGQPPKVLIYAASTLQSGVPSRFSGSGSGTDFTLTINSLEAEDAATYYCQQSNEDPWTFGGGTKVEIKLEDLKNVFPPEVAVFEPSEAEISHTQKATLVCLATGFYPDHVELSWWVNGKEVHSGVCTDPQPLKEQPALNDSRYCLSSRLRVSATFWQNPRNHFRCQVQFYGLSENDEWTQDRAKPVTQIVSAEAWGRADDVIKIHWQEKKSNTILGSQEGNTMKTNDTYMKFSWLTVPEKSLDKEHRCIVRHENNKNGVDQEIIFPPIKTDVITMDPKDNCSKDANDTLLLQLTNTSAYYMYLLLLLKSVVYFAIITCCLLRRTAFCCNGEKSRAKRSGSGATNFSLLKQAGDVEENPGPTSMDWIWRILFLVGAATGAHSGPQLQLQESGPGLVKPSETLSLTCTVSGDSISSGDYYWGWIRQPPGKGLEWIGHIYYSGVTYYNPSLKSRVTISVDTSRNQFSLKLSSVTAADTAVYYCTREDSSNWRSRGQGTLVTVSSGSGGGGSGGGGSGGGGSFEQVQLVQSGAEVKKPGASVKVSCKVSGYTFTDYYITWVRQAPGQALEWMGWIYPGSGNTKYSQKFQGRFVFSVDTSASTAYLQLSSLKAEDTAVYYCANYGNYWFAYWGQGTLVTVSSTRIQNPDPAVYQLRDSKSSDKSVCLFTDFDSQTNVSQSKDSDVYITDKCVLDMRSMDFKSNSAVAWSNKSDFACANAFNNSIIPEDTFFPSPESSDSTDHVKPKETENTKQPSKSCHKPKAIVHTEKVNMMSLTVLGLRMLFAKTVAVNFLLTAKLFFL

SEQ ID NO: 16100 - protein, 993 aa, synthetic construct
MALPVTALLLPLALLLHAARPEVQLVESGGGLVQPGGSLRLSCAASGFSFSDFWMSWVRQAPGKGLEWVATISQAGSEKDYVDSVKGRFTISRDNAKKSLYLQMNSLRAEDTAVYYCASGVYSFDYRGQGTLVTVSSGTGGGGSGGGGSGGGGSEFDIQMTQSPSSLSASVGDRVTITCRASQGISSWLAWYQQKPEKAPKSLIYAASSLQSGVPSRFSGSGSGTDFTLTISSLQPEDFATYYCQQYNSYPPTFGGGTKVEIKLEDLKNVFPPEVAVFEPSEAEISHTQKATLVCLATGFYPDHVELSWWVNGKEVHSGVCTDPQPLKEQPALNDSRYCLSSRLRVSATFWQNPRNHFRCQVQFYGLSENDEWTQDRAKPVTQIVSAEAWGRADDVIKIHWQEKKSNTILGSQEGNTMKTNDTYMKFSWLTVPEKSLDKEHRCIVRHENNKNGVDQEIIFPPIKTDVITMDPKDNCSKDANDTLLLQLTNTSAYYMYLLLLLKSVVYFAIITCCLLRRTAFCCNGEKSRAKRSGSGATNFSLLKQAGDVEENPGPTSMDWIWRILFLVGAATGAHSGPQLQLQESGPGLVKPSETLSLTCTVSGDSISSGDYYWGWIRQPPGKGLEWIGHIYYSGVTYYNPSLKSRVTISVDTSRNQFSLKLSSVTAADTAVYYCTREDSSNWRSRGQGTLVTVSSGSGGGGSGGGGSGGGGSFEEVQLVQSGGGLVHPGGSLRLSCAGSGFAFSSSTMHWIRQAPGKGLEWISLIGSGGGIYYGDSVKGRFTISRDNAKNSLYLQMNSLRAEDMAVYYCVRGYFDWVDYFDYWGQGTLVTVSSTRIQNPDPAVYQLRDSKSSDKSVCLFTDFDSQTNVSQSKDSDVYITDKCVLDMRSMDFKSNSAVAWSNKSDFACANAFNNSIIPEDTFFPSPESSDSTDHVKPKETENTKQPSKSCHKPKAIVHTEKVNMMSLTVLGLRMLFAKTVAVNFLLTAKLFFL

SEQ ID NO: 16101 - protein, 1003 aa, synthetic construct
MALPVTALLLPLALLLHAARPEVQLVESGGGLVQPGGSLRLSCAASGFSFSDFWMSWVRQAPGKGLEWVATISQAGSEKDYVDSVKGRFTISRDNAKKSLYLQMNSLRAEDTAVYYCASGVYSFDYRGQGTLVTVSSGTGGGGSGGGGSGGGGSEFDDIVMTQSPDSLTVSLGERTTINCKSSQSVLDSSKNKNSLAWYQQKPGQPPKLLLSWASTRESGIPDRFSGSGSGTDFTLTIDSLQPEDSATYYCQQSAHFPITFGQGTRLEIKLEDLKNVFPPEVAVFEPSEAEISHTQKATLVCLATGFYPDHVELSWWVNGKEVHSGVCTDPQPLKEQPALNDSRYCLSSRLRVSATFWQNPRNHFRCQVQFYGLSENDEWTQDRAKPVTQIVSAEAWGRADDVIKIHWQEKKSNTILGSQEGNTMKTNDTYMKFSWLTVPEKSLDKEHRCIVRHENNKNGVDQEIIFPPIKTDVITMDPKDNCSKDANDTLLLQLTNTSAYYMYLLLLLKSVVYFAIITCCLLRRTAFCCNGEKSRAKRSGSGATNFSLLKQAGDVEENPGPTSMDWIWRILFLVGAATGAHSGPQLQLQESGPGLVKPSETLSLTCTVSGDSISSGDYYWGWIRQPPGKGLEWIGHIYYSGVTYYNPSLKSRVTISVDTSRNQFSLKLSSVTAADTAVYYCTREDSSNWRSRGQGTLVTVSSGSGGGGSGGGGSGGGGSFEQVQLVQSGAEVKKPGASVKVSCKASGYTFTNYGMNWVKQAPGQGLKWMGWINTYTGEPTYADDFKGRVTMTSDTSTSTAYLELHNLRSDDTAVYYCARWSWSDGYYVYFDYWGQGTTVTVSSTRIQNPDPAVYQLRDSKSSDKSVCLFTDFDSQTNVSQSKDSDVYITDKCVLDMRSMDFKSNSAVAWSNKSDFACANAFNNSIIPEDTFFPSPESSDSTDHVKPKETENTKQPSKSCHKPKAIVHTEKVNMMSLTVLGLRMLFAKTVAVNFLLTAKLFFL

SEQ ID NO: 16102 - protein, 999 aa, synthetic construct
MALPVTALLLPLALLLHAARPEVQLVESGGGLVQPGGSLRLSCAASGFSFSDFWMSWVRQAPGKGLEWVATISQAGSEKDYVDSVKGRFTISRDNAKKSLYLQMNSLRAEDTAVYYCASGVYSFDYRGQGTLVTVSSGTGGGGSGGGGSGGGGSEFDEIVLTQSPGSLAVSPGERVTMSCKSSQSVFFSSSQKNYLAWYQQIPGQSPRLLIYWASTRESGVPDRFTGSGSGTDFTLTISSVQPEDLAIYYCHQYLSSRTFGQGTKLEIKRLEDLKNVFPPEVAVFEPSEAEISHTQKATLVCLATGFYPDHVELSWWVNGKEVHSGVCTDPQPLKEQPALNDSRYCLSSRLRVSATFWQNPRNHFRCQVQFYGLSENDEWTQDRAKPVTQIVSAEAWGRADDVIKIHWQEKKSNTILGSQEGNTMKTNDTYMKFSWLTVPEKSLDKEHRCIVRHENNKNGVDQEIIFPPIKTDVITMDPKDNCSKDANDTLLLQLTNTSAYYMYLLLLLKSVVYFAIITCCLLRRTAFCCNGEKSRAKRSGSGATNFSLLKQAGDVEENPGPTSMDWIWRILFLVGAATGAHSGPQLQLQESGPGLVKPSETLSLTCTVSGDSISSGDYYWGWIRQPPGKGLEWIGHIYYSGVTYYNPSLKSRVTISVDTSRNQFSLKLSSVTAADTAVYYCTREDSSNWRSRGQGTLVTVSSGSGGGGSGGGGSGGGGSFEQVQLQQPGAEVVKPGASVKMSCKASGYTFTSYYIHWIKQTPGQGLEWVGVIYPGNDDISYNQKFQGKATLTADKSSTTAYMQLSSLTSEDSAVYYCAREVRLRYFDVWGQGTTVTVSSTRIQNPDPAVYQLRDSKSSDKSVCLFTDFDSQTNVSQSKDSDVYITDKCVLDMRSMDFKSNSAVAWSNKSDFACANAFNNSIIPEDTFFPSPESSDSTDHVKPKETENTKQPSKSCHKPKAIVHTEKVNMMSLTVLGLRMLFAKTVAVNFLLTAKLFFL

SEQ ID NO: 16103 - protein, 1003 aa, synthetic construct
MALPVTALLLPLALLLHAARPEVQLVESGGGLVQPGGSLRLSCAASGFSFSDFWMSWVRQAPGKGLEWVATISQAGSEKDYVDSVKGRFTISRDNAKKSLYLQMNSLRAEDTAVYYCASGVYSFDYRGQGTLVTVSSGTGGGGSGGGGSGGGGSEFDVLLTQSPLSLPVTLGQPASISCRSSQTIVHSNGNTYLEWFQQRPGQSPRLLIYQVSNRFSGVPDRFSGSGSGTDFTLKISRVEAEDVGVYYCFQGSHVPRTFGGGTKVEIKRALEDLKNVFPPEVAVFEPSEAEISHTQKATLVCLATGFYPDHVELSWWVNGKEVHSGVCTDPQPLKEQPALNDSRYCLSSRLRVSATFWQNPRNHFRCQVQFYGLSENDEWTQDRAKPVTQIVSAEAWGRADDVIKIHWQEKKSNTILGSQEGNTMKTNDTYMKFSWLTVPEKSLDKEHRCIVRHENNKNGVDQEIIFPPIKTDVITMDPKDNCSKDANDTLLLQLTNTSAYYMYLLLLLKSVVYFAIITCCLLRRTAFCCNGEKSRAKRSGSGATNFSLLKQAGDVEENPGPTSMDWIWRILFLVGAATGAHSGPQLQLQESGPGLVKPSETLSLTCTVSGDSISSGDYYWGWIRQPPGKGLEWIGHIYYSGVTYYNPSLKSRVTISVDTSRNQFSLKLSSVTAADTAVYYCTREDSSNWRSRGQGTLVTVSSGSGGGGSGGGGSGGGGSFEQIQLVQSGSELKKPGASVKVSCKASGYTFTNYGMNWVRQAPGQGLKWMGWINTNTGEPKYAEEFKGRFALSLDTSVSTAYLQINSLKAEDTAVYFCARGYGNYARGAWLAYWGQGTLVTVSSTRIQNPDPAVYQLRDSKSSDKSVCLFTDFDSQTNVSQSKDSDVYITDKCVLDMRSMDFKSNSAVAWSNKSDFACANAFNNSIIPEDTFFPSPESSDSTDHVKPKETENTKQPSKSCHKPKAIVHTEKVNMMSLTVLGLRMLFAKTVAVNFLLTAKLFFL

SEQ ID NO: 16104 - protein, 988 aa, synthetic construct
MALPVTALLLPLALLLHAARPEVQLVESGGGLVQPGGSLRLSCAASGFSFSDFWMSWVRQAPGKGLEWVATISQAGSEKDYVDSVKGRFTISRDNAKKSLYLQMNSLRAEDTAVYYCASGVYSFDYRGQGTLVTVSSGTGGGGSGGGGSGGGGSEFDEIVLTQSPATLSLSPGERATLSCSASSSINYIYWLQQKPGQAPRILIYLTSNLASGVPARFSGSGSGTDFTLTISSLEPEDFAVYYCLQWSSNPLTFGGGTKVEIKLEDLKNVFPPEVAVFEPSEAEISHTQKATLVCLATGFYPDHVELSWWVNGKEVHSGVCTDPQPLKEQPALNDSRYCLSSRLRVSATFWQNPRNHFRCQVQFYGLSENDEWTQDRAKPVTQIVSAEAWGRADDVIKIHWQEKKSNTILGSQEGNTMKTNDTYMKFSWLTVPEKSLDKEHRCIVRHENNKNGVDQEIIFPPIKTDVITMDPKDNCSKDANDTLLLQLTNTSAYYMYLLLLLKSVVYFAIITCCLLRRTAFCCNGEKSRAKRSGSGATNFSLLKQAGDVEENPGPTSMDWIWRILFLVGAATGAHSGPQLQLQESGPGLVKPSETLSLTCTVSGDSISSGDYYWGWIRQPPGKGLEWIGHIYYSGVTYYNPSLKSRVTISVDTSRNQFSLKLSSVTAADTAVYYCTREDSSNWRSRGQGTLVTVSSGSGGGGSGGGGSGGGGSFEEVQLVESGGGLVKPGGSLRLSCAASGFTFSSYDMSWVRQAPGKGLEWVSTISSGGSYTYYLDSIKGRFTISRDNAKNSLYLQMNSLRAEDTAVYYCARQGLDYWGRGTLVTVSSTRIQNPDPAVYQLRDSKSSDKSVCLFTDFDSQTNVSQSKDSDVYITDKCVLDMRSMDFKSNSAVAWSNKSDFACANAFNNSIIPEDTFFPSPESSDSTDHVKPKETENTKQPSKSCHKPKAIVHTEKVNMMSLTVLGLRMLFAKTVAVNFLLTAKLFFL

SEQ ID NO: 16105 - protein, 997 aa, synthetic construct
MALPVTALLLPLALLLHAARPEVQLVESGGGLVQPGGSLRLSCAASGFSFSDFWMSWVRQAPGKGLEWVATISQAGSEKDYVDSVKGRFTISRDNAKKSLYLQMNSLRAEDTAVYYCASGVYSFDYRGQGTLVTVSSGTGGGGSGGGGSGGGGSEFDIVMTQSPDSLAVSLGERATINCRASKSVSTSGYSFMHWYQQKPGQPPKLLIYLASNLESGVPDRFSGSGSGTDFTLTISSLQAEDVAVYYCQHSREVPWTFGQGTKVEIKRLEDLKNVFPPEVAVFEPSEAEISHTQKATLVCLATGFYPDHVELSWWVNGKEVHSGVCTDPQPLKEQPALNDSRYCLSSRLRVSATFWQNPRNHFRCQVQFYGLSENDEWTQDRAKPVTQIVSAEAWGRADDVIKIHWQEKKSNTILGSQEGNTMKTNDTYMKFSWLTVPEKSLDKEHRCIVRHENNKNGVDQEIIFPPIKTDVITMDPKDNCSKDANDTLLLQLTNTSAYYMYLLLLLKSVVYFAIITCCLLRRTAFCCNGEKSRAKRSGSGATNFSLLKQAGDVEENPGPTSMDWIWRILFLVGAATGAHSGPQLQLQESGPGLVKPSETLSLTCTVSGDSISSGDYYWGWIRQPPGKGLEWIGHIYYSGVTYYNPSLKSRVTISVDTSRNQFSLKLSSVTAADTAVYYCTREDSSNWRSRGQGTLVTVSSGSGGGGSGGGGSGGGGSFEQVQLVQSGAEVKKPGASVKVSCKASGYTFTNYGMNWVRQAPGQGLEWMGWINTYTGEPTYADAFKGRFAFSLDTSTSTAYLQINSLRSDDTAVYYCARDYGDYGMDYWGQGTTVTVSSTRIQNPDPAVYQLRDSKSSDKSVCLFTDFDSQTNVSQSKDSDVYITDKCVLDMRSMDFKSNSAVAWSNKSDFACANAFNNSIIPEDTFFPSPESSDSTDHVKPKETENTKQPSKSCHKPKAIVHTEKVNMMSLTVLGLRMLFAKTVAVNFLLTAKLFFL

SEQ ID NO: 16106 - protein, 993 aa, synthetic construct
MALPVTALLLPLALLLHAARPEVQLVESGGGLVQPGGSLRLSCAASGFSFSDFWMSWVRQAPGKGLEWVATISQAGSEKDYVDSVKGRFTISRDNAKKSLYLQMNSLRAEDTAVYYCASGVYSFDYRGQGTLVTVSSGTGGGGSGGGGSGGGGSEFDIVMTQTPLTLSVTIGQPASISCKSSQSLLDSDGKTYLNWLLQRPGQSPERLIYLVSKLDSGVPDRFTGSGSGTDFTLKISRVEAEDLGVYCCWQGTHFPYTFGGGTKVEIKGLEDLKNVFPPEVAVFEPSEAEISHTQKATLVCLATGFYPDHVELSWWVNGKEVHSGVCTDPQPLKEQPALNDSRYCLSSRLRVSATFWQNPRNHFRCQVQFYGLSENDEWTQDRAKPVTQIVSAEAWGRADDVIKIHWQEKKSNTILGSQEGNTMKTNDTYMKFSWLTVPEKSLDKEHRCIVRHENNKNGVDQEIIFPPIKTDVITMDPKDNCSKDANDTLLLQLTNTSAYYMYLLLLLKSVVYFAIITCCLLRRTAFCCNGEKSRAKRSGSGATNFSLLKQAGDVEENPGPTSMDWIWRILFLVGAATGAHSGPQLQLQESGPGLVKPSETLSLTCTVSGDSISSGDYYWGWIRQPPGKGLEWIGHIYYSGVTYYNPSLKSRVTISVDTSRNQFSLKLSSVTAADTAVYYCTREDSSNWRSRGQGTLVTVSSGSGGGGSGGGGSGGGGSFEQVQLQQPGAELVRPGASVKLSCKASGYTFTSYWMNWVKQRPGQGLEWIGMIDPSDSETHYNHIFKDKATLTVDKSSSTAYLQLSSLTSEDSAVYYCARNLYLWGQGTSVTVSSTRIQNPDPAVYQLRDSKSSDKSVCLFTDFDSQTNVSQSKDSDVYITDKCVLDMRSMDFKSNSAVAWSNKSDFACANAFNNSIIPEDTFFPSPESSDSTDHVKPKETENTKQPSKSCHKPKAIVHTEKVNMMSLTVLGLRMLFAKTVAVNFLLTAKLFFL

SEQ ID NO: 16107 - protein, 1001 aa, synthetic construct
MALPVTALLLPLALLLHAARPEVQLVESGGGLVQPGGSLRLSCAASGFSFSDFWMSWVRQAPGKGLEWVATISQAGSEKDYVDSVKGRFTISRDNAKKSLYLQMNSLRAEDTAVYYCASGVYSFDYRGQGTLVTVSSGTGGGGSGGGGSGGGGSEFDIVMTQSPDSLAVSLGERATINCESSQSLLNSGNQKNYLTWYQQKPGQPPKPLIYWASTRESGVPDRFSGSGSGTDFTLTISSLQAEDVAVYYCQNDYSYPYTFGQGTKLEIKRLEDLKNVFPPEVAVFEPSEAEISHTQKATLVCLATGFYPDHVELSWWVNGKEVHSGVCTDPQPLKEQPALNDSRYCLSSRLRVSATFWQNPRNHFRCQVQFYGLSENDEWTQDRAKPVTQIVSAEAWGRADDVIKIHWQEKKSNTILGSQEGNTMKTNDTYMKFSWLTVPEKSLDKEHRCIVRHENNKNGVDQEIIFPPIKTDVITMDPKDNCSKDANDTLLLQLTNTSAYYMYLLLLLKSVVYFAIITCCLLRRTAFCCNGEKSRAKRSGSGATNFSLLKQAGDVEENPGPTSMDWIWRILFLVGAATGAHSGPQLQLQESGPGLVKPSETLSLTCTVSGDSISSGDYYWGWIRQPPGKGLEWIGHIYYSGVTYYNPSLKSRVTISVDTSRNQFSLKLSSVTAADTAVYYCTREDSSNWRSRGQGTLVTVSSGSGGGGSGGGGSGGGGSFEEVQLVQSGAEVKKPGESLKISCKGSGYSFTDYYMKWARQMPGKGLEWMGDIIPSNGATFYNQKFKGQVTISADKSISTTYLQWSSLKASDTAMYYCARSHLLRASWFAYWGQGTMVTVSSTRIQNPDPAVYQLRDSKSSDKSVCLFTDFDSQTNVSQSKDSDVYITDKCVLDMRSMDFKSNSAVAWSNKSDFACANAFNNSIIPEDTFFPSPESSDSTDHVKPKETENTKQPSKSCHKPKAIVHTEKVNMMSLTVLGLRMLFAKTVAVNFLLTAKLFFL

SEQ ID NO: 16108 - protein, 996 aa, synthetic construct
MALPVTALLLPLALLLHAARPEVQLVESGGGLVQPGGSLRLSCAASGFSFSDFWMSWVRQAPGKGLEWVATISQAGSEKDYVDSVKGRFTISRDNAKKSLYLQMNSLRAEDTAVYYCASGVYSFDYRGQGTLVTVSSGTGGGGSGGGGSGGGGSEFDIQMTQSTSSLSASLGDRVTISCSASQGINNYLNWYQQKPDGTVELLIYYTSTLQSGVPSRFSGSGSGTDYSLTISNLEPEDIGTYYCQQYSKLPRTFGGGTKLEIKLEDLKNVFPPEVAVFEPSEAEISHTQKATLVCLATGFYPDHVELSWWVNGKEVHSGVCTDPQPLKEQPALNDSRYCLSSRLRVSATFWQNPRNHFRCQVQFYGLSENDEWTQDRAKPVTQIVSAEAWGRADDVIKIHWQEKKSNTILGSQEGNTMKTNDTYMKFSWLTVPEKSLDKEHRCIVRHENNKNGVDQEIIFPPIKTDVITMDPKDNCSKDANDTLLLQLTNTSAYYMYLLLLLKSVVYFAIITCCLLRRTAFCCNGEKSRAKRSGSGATNFSLLKQAGDVEENPGPTSMDWIWRILFLVGAATGAHSGPQLQLQESGPGLVKPSETLSLTCTVSGDSISSGDYYWGWIRQPPGKGLEWIGHIYYSGVTYYNPSLKSRVTISVDTSRNQFSLKLSSVTAADTAVYYCTREDSSNWRSRGQGTLVTVSSGSGGGGSGGGGSGGGGSFEQVQLQQSGSELMMPGASVKISCKATGYTFSNYWIEWVKQRPGHGLEWIGEILPGTGRTIYNEKFKGKATFTADISSNTVQMQLSSLTSEDSAVYYCARRDYYGNFYYAMDYWGQGTSVTVSSTRIQNPDPAVYQLRDSKSSDKSVCLFTDFDSQTNVSQSKDSDVYITDKCVLDMRSMDFKSNSAVAWSNKSDFACANAFNNSIIPEDTFFPSPESSDSTDHVKPKETENTKQPSKSCHKPKAIVHTEKVNMMSLTVLGLRMLFAKTVAVNFLLTAKLFFL

SEQ ID NO: 16109 - protein, 991 aa, synthetic construct
MALPVTALLLPLALLLHAARPEVQLVESGGGLVQPGGSLRLSCAASGFSFSDFWMSWVRQAPGKGLEWVATISQAGSEKDYVDSVKGRFTISRDNAKKSLYLQMNSLRAEDTAVYYCASGVYSFDYRGQGTLVTVSSGTGGGGSGGGGSGGGGSEFDIQMTQSPASLSVSVGETVTITCRASENIYSNLAWYQQKQGKSPQLLVYAATNLADGVPSRFSGSGSGTQYSLKINSLQSEDFGSYYCQHFWGTWTFGGGTTLEIKLEDLKNVFPPEVAVFEPSEAEISHTQKATLVCLATGFYPDHVELSWWVNGKEVHSGVCTDPQPLKEQPALNDSRYCLSSRLRVSATFWQNPRNHFRCQVQFYGLSENDEWTQDRAKPVTQIVSAEAWGRADDVIKIHWQEKKSNTILGSQEGNTMKTNDTYMKFSWLTVPEKSLDKEHRCIVRHENNKNGVDQEIIFPPIKTDVITMDPKDNCSKDANDTLLLQLTNTSAYYMYLLLLLKSVVYFAIITCCLLRRTAFCCNGEKSRAKRSGSGATNFSLLKQAGDVEENPGPTSMDWIWRILFLVGAATGAHSGPQLQLQESGPGLVKPSETLSLTCTVSGDSISSGDYYWGWIRQPPGKGLEWIGHIYYSGVTYYNPSLKSRVTISVDTSRNQFSLKLSSVTAADTAVYYCTREDSSNWRSRGQGTLVTVSSGSGGGGSGGGGSGGGGSFEEVQLQQSGPELVKPGASVKMSCKASGYTFTDYYMKWMKQSHGKSLEWIGDINPNNGGTTYNQKFKGKATLTVDKSSSTAYMQLNSLTSEDSAVYYCARDYGYGYFDYWGQGTTLTVSSTRIQNPDPAVYQLRDSKSSDKSVCLFTDFDSQTNVSQSKDSDVYITDKCVLDMRSMDFKSNSAVAWSNKSDFACANAFNNSIIPEDTFFPSPESSDSTDHVKPKETENTKQPSKSCHKPKAIVHTEKVNMMSLTVLGLRMLFAKTVAVNFLLTAKLFFL

SEQ ID NO: 16110 - protein, 994 aa, synthetic construct
MALPVTALLLPLALLLHAARPEVQLVESGGGLVQPGGSLRLSCAASGFSFSDFWMSWVRQAPGKGLEWVATISQAGSEKDYVDSVKGRFTISRDNAKKSLYLQMNSLRAEDTAVYYCASGVYSFDYRGQGTLVTVSSGTGGGGSGGGGSGGGGSEFEIVLTQSPGTLSLSPGERATLSCRASQSVGGYLAWYQQKPGQAPRLLIYDASNRATGIPARFSGSGSGTDFTLTISSLEPEDFAVYYCQQRNNWPPMYTFGQGTKLEIKRLEDLKNVFPPEVAVFEPSEAEISHTQKATLVCLATGFYPDHVELSWWVNGKEVHSGVCTDPQPLKEQPALNDSRYCLSSRLRVSATFWQNPRNHFRCQVQFYGLSENDEWTQDRAKPVTQIVSAEAWGRADDVIKIHWQEKKSNTILGSQEGNTMKTNDTYMKFSWLTVPEKSLDKEHRCIVRHENNKNGVDQEIIFPPIKTDVITMDPKDNCSKDANDTLLLQLTNTSAYYMYLLLLLKSVVYFAIITCCLLRRTAFCCNGEKSRAKRSGSGATNFSLLKQAGDVEENPGPTSMDWIWRILFLVGAATGAHSGPQLQLQESGPGLVKPSETLSLTCTVSGDSISSGDYYWGWIRQPPGKGLEWIGHIYYSGVTYYNPSLKSRVTISVDTSRNQFSLKLSSVTAADTAVYYCTREDSSNWRSRGQGTLVTVSSGSGGGGSGGGGSGGGGSFEQVQLVQSGAEVKKPGSSVKVSCKASGGTFSSYAISWVRQAPGQGLEWMGGIIPILGTANYAQKFQGRVTITADESTSTAYMELSSLRSEDTAVYYCARWGGGAFDIWGQGTMVTVSSTRIQNPDPAVYQLRDSKSSDKSVCLFTDFDSQTNVSQSKDSDVYITDKCVLDMRSMDFKSNSAVAWSNKSDFACANAFNNSIIPEDTFFPSPESSDSTDHVKPKETENTKQPSKSCHKPKAIVHTEKVNMMSLTVLGLRMLFAKTVAVNFLLTAKLFFL

SEQ ID NO: 16111 - protein, 989 aa, synthetic construct
MALPVTALLLPLALLLHAARPEVQLVESGGGLVQPGGSLRLSCAASGFSFSDFWMSWVRQAPGKGLEWVATISQAGSEKDYVDSVKGRFTISRDNAKKSLYLQMNSLRAEDTAVYYCASGVYSFDYRGQGTLVTVSSGTGGGGSGGGGSGGGGSEFQIVLTQSPALMSASPGEKVTMTCSASSSVRYMYWYQQKPRSSPKPWIHLTSNLASGVPARFSGSGSGTSYSLTISSMEAEDAATYYCQQWSSHPFTFGSGTKLEIKLEDLKNVFPPEVAVFEPSEAEISHTQKATLVCLATGFYPDHVELSWWVNGKEVHSGVCTDPQPLKEQPALNDSRYCLSSRLRVSATFWQNPRNHFRCQVQFYGLSENDEWTQDRAKPVTQIVSAEAWGRADDVIKIHWQEKKSNTILGSQEGNTMKTNDTYMKFSWLTVPEKSLDKEHRCIVRHENNKNGVDQEIIFPPIKTDVITMDPKDNCSKDANDTLLLQLTNTSAYYMYLLLLLKSVVYFAIITCCLLRRTAFCCNGEKSRAKRSGSGATNFSLLKQAGDVEENPGPTSMDWIWRILFLVGAATGAHSGPQLQLQESGPGLVKPSETLSLTCTVSGDSISSGDYYWGWIRQPPGKGLEWIGHIYYSGVTYYNPSLKSRVTISVDTSRNQFSLKLSSVTAADTAVYYCTREDSSNWRSRGQGTLVTVSSGSGGGGSGGGGSGGGGSFEDVQLQESGPGLVKPSQSLSLTCTVTGFSITSDYSWNWIRQFPGNKLEWMGYISYSGHTSYNPSLESRISITRDTSKNQFFLQLNSVTTEDTATYYCTRGNWDVVYWGQGTLVTVSATRIQNPDPAVYQLRDSKSSDKSVCLFTDFDSQTNVSQSKDSDVYITDKCVLDMRSMDFKSNSAVAWSNKSDFACANAFNNSIIPEDTFFPSPESSDSTDHVKPKETENTKQPSKSCHKPKAIVHTEKVNMMSLTVLGLRMLFAKTVAVNFLLTAKLFFL

SEQ ID NO: 16112 - protein, 999 aa, synthetic construct
MALPVTALLLPLALLLHAARPEVQLVESGGGLVQPGGSLRLSCAASGFSFSDFWMSWVRQAPGKGLEWVATISQAGSEKDYVDSVKGRFTISRDNAKKSLYLQMNSLRAEDTAVYYCASGVYSFDYRGQGTLVTVSSGTGGGGSGGGGSGGGGSEFDVVMTQSPLSLPVTLGQPASISCRSSQSIVHSDGNTYLEWYQQRPGQSPRRLIYKVSNRFSGVPDRFSGSGSGTDFTLKISRVEAEDVGVYYCFQGSHAPWTFGGGTKVEIKLEDLKNVFPPEVAVFEPSEAEISHTQKATLVCLATGFYPDHVELSWWVNGKEVHSGVCTDPQPLKEQPALNDSRYCLSSRLRVSATFWQNPRNHFRCQVQFYGLSENDEWTQDRAKPVTQIVSAEAWGRADDVIKIHWQEKKSNTILGSQEGNTMKTNDTYMKFSWLTVPEKSLDKEHRCIVRHENNKNGVDQEIIFPPIKTDVITMDPKDNCSKDANDTLLLQLTNTSAYYMYLLLLLKSVVYFAIITCCLLRRTAFCCNGEKSRAKRSGSGATNFSLLKQAGDVEENPGPTSMDWIWRILFLVGAATGAHSGPQLQLQESGPGLVKPSETLSLTCTVSGDSISSGDYYWGWIRQPPGKGLEWIGHIYYSGVTYYNPSLKSRVTISVDTSRNQFSLKLSSVTAADTAVYYCTREDSSNWRSRGQGTLVTVSSGSGGGGSGGGGSGGGGSFEEVQLVESGGGLVQPGGSLRLSCAASGFTFSSYGMHWVRQAPGKGLEWVAYITTRSSTIYYADSVKGRFTISRDNAKNSLYLQMNSLRAEDTAVYYCTREPLTGYYAMDYWGQGTSVTVSSTRIQNPDPAVYQLRDSKSSDKSVCLFTDFDSQTNVSQSKDSDVYITDKCVLDMRSMDFKSNSAVAWSNKSDFACANAFNNSIIPEDTFFPSPESSDSTDHVKPKETENTKQPSKSCHKPKAIVHTEKVNMMSLTVLGLRMLFAKTVAVNFLLTAKLFFL

SEQ ID NO: 16113 - protein, 991 aa, synthetic construct
MALPVTALLLPLALLLHAARPEVQLVESGGGLVQPGGSLRLSCAASGFSFSDFWMSWVRQAPGKGLEWVATISQAGSEKDYVDSVKGRFTISRDNAKKSLYLQMNSLRAEDTAVYYCASGVYSFDYRGQGTLVTVSSGTGGGGSGGGGSGGGGSEFDIQMTQSPSSLSASVGDRVTITCRASQSISLWLNWYQQKPGKAPKLLIYAASTLQSGVPSRFSGSGSGTDFTLTISSLQPEDFATYYCQQYYTSPYTFGQGTKVEIKRLEDLKNVFPPEVAVFEPSEAEISHTQKATLVCLATGFYPDHVELSWWVNGKEVHSGVCTDPQPLKEQPALNDSRYCLSSRLRVSATFWQNPRNHFRCQVQFYGLSENDEWTQDRAKPVTQIVSAEAWGRADDVIKIHWQEKKSNTILGSQEGNTMKTNDTYMKFSWLTVPEKSLDKEHRCIVRHENNKNGVDQEIIFPPIKTDVITMDPKDNCSKDANDTLLLQLTNTSAYYMYLLLLLKSVVYFAIITCCLLRRTAFCCNGEKSRAKRSGSGATNFSLLKQAGDVEENPGPTSMDWIWRILFLVGAATGAHSGPQLQLQESGPGLVKPSETLSLTCTVSGDSISSGDYYWGWIRQPPGKGLEWIGHIYYSGVTYYNPSLKSRVTISVDTSRNQFSLKLSSVTAADTAVYYCTREDSSNWRSRGQGTLVTVSSGSGGGGSGGGGSGGGGSFEQVQLLESGGGLVQPGGSLRLSCAASGFTFSSYAMSWVRQAPGKGLEWVSVIRSSGSSTYYADSVKGRFTISRDNSKNTLYLQMNSLRAEDTAVYYCARGGGYFDYWGQGTLVTVSSTRIQNPDPAVYQLRDSKSSDKSVCLFTDFDSQTNVSQSKDSDVYITDKCVLDMRSMDFKSNSAVAWSNKSDFACANAFNNSIIPEDTFFPSPESSDSTDHVKPKETENTKQPSKSCHKPKAIVHTEKVNMMSLTVLGLRMLFAKTVAVNFLLTAKLFFL

SEQ ID NO: 16114 - protein, 994 aa, synthetic construct
MALPVTALLLPLALLLHAARPEVQLVESGGGLVQPGGSLRLSCAASGFSFSDFWMSWVRQAPGKGLEWVATISQAGSEKDYVDSVKGRFTISRDNAKKSLYLQMNSLRAEDTAVYYCASGVYSFDYRGQGTLVTVSSGTGGGGSGGGGSGGGGSEFDIQMTQSPSSLSASVGDRVTITCRASQSISSYLNWYQQKPGKAPKLLIYAVSTLQSGVPSRFSGSGSGTDFTLTISSLQPEDFATYYCQQSGTFPPTTFGQGTKVEIKRLEDLKNVFPPEVAVFEPSEAEISHTQKATLVCLATGFYPDHVELSWWVNGKEVHSGVCTDPQPLKEQPALNDSRYCLSSRLRVSATFWQNPRNHFRCQVQFYGLSENDEWTQDRAKPVTQIVSAEAWGRADDVIKIHWQEKKSNTILGSQEGNTMKTNDTYMKFSWLTVPEKSLDKEHRCIVRHENNKNGVDQEIIFPPIKTDVITMDPKDNCSKDANDTLLLQLTNTSAYYMYLLLLLKSVVYFAIITCCLLRRTAFCCNGEKSRAKRSGSGATNFSLLKQAGDVEENPGPTSMDWIWRILFLVGAATGAHSGPQLQLQESGPGLVKPSETLSLTCTVSGDSISSGDYYWGWIRQPPGKGLEWIGHIYYSGVTYYNPSLKSRVTISVDTSRNQFSLKLSSVTAADTAVYYCTREDSSNWRSRGQGTLVTVSSGSGGGGSGGGGSGGGGSFEQVQLLESGGGLVQPGGSLRLSCAASGFTFSSHGMHWVRQAPGKGLEWVSVISGSGSNTGYADSVKGRFTISRDNSKNTLYLQMNSLRAEDTAVYYCARQWGSYAFDSWGQGTLVTVSSTRIQNPDPAVYQLRDSKSSDKSVCLFTDFDSQTNVSQSKDSDVYITDKCVLDMRSMDFKSNSAVAWSNKSDFACANAFNNSIIPEDTFFPSPESSDSTDHVKPKETENTKQPSKSCHKPKAIVHTEKVNMMSLTVLGLRMLFAKTVAVNFLLTAKLFFL

SEQ ID NO: 16115 - protein, 1004 aa, synthetic construct
MALPVTALLLPLALLLHAARPEVQLVESGGGLVQPGGSLRLSCAASGFSFSDFWMSWVRQAPGKGLEWVATISQAGSEKDYVDSVKGRFTISRDNAKKSLYLQMNSLRAEDTAVYYCASGVYSFDYRGQGTLVTVSSGTGGGGSGGGGSGGGGSEFDIVMSQSPSSLAVSVGEKVTMSCKSSQSLLHSSNQKNYLAWYQQKPGQSPKVLIYWASTRESGVPDRFTGSGSGTDFTLTITSVKSEDLAVYYCQQYYSYPWTFGGGTRLEIKRLEDLKNVFPPEVAVFEPSEAEISHTQKATLVCLATGFYPDHVELSWWVNGKEVHSGVCTDPQPLKEQPALNDSRYCLSSRLRVSATFWQNPRNHFRCQVQFYGLSENDEWTQDRAKPVTQIVSAEAWGRADDVIKIHWQEKKSNTILGSQEGNTMKTNDTYMKFSWLTVPEKSLDKEHRCIVRHENNKNGVDQEIIFPPIKTDVITMDPKDNCSKDANDTLLLQLTNTSAYYMYLLLLLKSVVYFAIITCCLLRRTAFCCNGEKSRAKRSGSGATNFSLLKQAGDVEENPGPTSMDWIWRILFLVGAATGAHSGPQLQLQESGPGLVKPSETLSLTCTVSGDSISSGDYYWGWIRQPPGKGLEWIGHIYYSGVTYYNPSLKSRVTISVDTSRNQFSLKLSSVTAADTAVYYCTREDSSNWRSRGQGTLVTVSSGSGGGGSGGGGSGGGGSFEEVQLQQSVAELVKPGASVKMSCKVSGYTLTDHTIHWMKQRPEQGLEWIGYIYPRDGITGYNEKFKGKATLTADTSSSTAYMQLNSLTSEDSAVYFCARWGYSYRNYAYYYDYWGQGTTLTVSSTRIQNPDPAVYQLRDSKSSDKSVCLFTDFDSQTNVSQSKDSDVYITDKCVLDMRSMDFKSNSAVAWSNKSDFACANAFNNSIIPEDTFFPSPESSDSTDHVKPKETENTKQPSKSCHKPKAIVHTEKVNMMSLTVLGLRMLFAKTVAVNFLLTAKLFFL

SEQ ID NO: 16116 - protein, 1001 aa, synthetic construct
MALPVTALLLPLALLLHAARPEVQLVESGGGLVQPGGSLRLSCAASGFSFSDFWMSWVRQAPGKGLEWVATISQAGSEKDYVDSVKGRFTISRDNAKKSLYLQMNSLRAEDTAVYYCASGVYSFDYRGQGTLVTVSSGTGGGGSGGGGSGGGGSEFEIVLTQSPGTLSLSPGERATLSCRASQSVSSSYLAWYQQKPGQAPRLLIYGTSSRATGIPDRFSGSGSGTDFTLTISRLEPEDFAVYYCQQYGSSPFTFGGGTKVEIKRLEDLKNVFPPEVAVFEPSEAEISHTQKATLVCLATGFYPDHVELSWWVNGKEVHSGVCTDPQPLKEQPALNDSRYCLSSRLRVSATFWQNPRNHFRCQVQFYGLSENDEWTQDRAKPVTQIVSAEAWGRADDVIKIHWQEKKSNTILGSQEGNTMKTNDTYMKFSWLTVPEKSLDKEHRCIVRHENNKNGVDQEIIFPPIKTDVITMDPKDNCSKDANDTLLLQLTNTSAYYMYLLLLLKSVVYFAIITCCLLRRTAFCCNGEKSRAKRSGSGATNFSLLKQAGDVEENPGPTSMDWIWRILFLVGAATGAHSGPQLQLQESGPGLVKPSETLSLTCTVSGDSISSGDYYWGWIRQPPGKGLEWIGHIYYSGVTYYNPSLKSRVTISVDTSRNQFSLKLSSVTAADTAVYYCTREDSSNWRSRGQGTLVTVSSGSGGGGSGGGGSGGGGSFEQVQLQESGPGLAKPSETLSLTCTVSGDSITSYYWSWIRQPPGKGLEWIGYIYYSGSTNYNPSLKSRVTISVDTSKNQFSLKLSSVTAADTAVYYCARDQRRIAAAGTHFYGMDVWGQGTTVTVSSTRIQNPDPAVYQLRDSKSSDKSVCLFTDFDSQTNVSQSKDSDVYITDKCVLDMRSMDFKSNSAVAWSNKSDFACANAFNNSIIPEDTFFPSPESSDSTDHVKPKETENTKQPSKSCHKPKAIVHTEKVNMMSLTVLGLRMLFAKTVAVNFLLTAKLFFL

SEQ ID NO: 16117 - protein, 993 aa, synthetic construct
MALPVTALLLPLALLLHAARPEVQLVESGGGLVQPGGSLRLSCAASGFSFSDFWMSWVRQAPGKGLEWVATISQAGSEKDYVDSVKGRFTISRDNAKKSLYLQMNSLRAEDTAVYYCASGVYSFDYRGQGTLVTVSSGTGGGGSGGGGSGGGGSEFDILLTQSPVILSVSPGERVSFSCRASQSIGTNIHWYQQRTNGSPRLLIKYASESISGIPSRFSGSGSGTDFTLSINSVESEDIADYYCQQNNNWPTTFGAGTKLELKLEDLKNVFPPEVAVFEPSEAEISHTQKATLVCLATGFYPDHVELSWWVNGKEVHSGVCTDPQPLKEQPALNDSRYCLSSRLRVSATFWQNPRNHFRCQVQFYGLSENDEWTQDRAKPVTQIVSAEAWGRADDVIKIHWQEKKSNTILGSQEGNTMKTNDTYMKFSWLTVPEKSLDKEHRCIVRHENNKNGVDQEIIFPPIKTDVITMDPKDNCSKDANDTLLLQLTNTSAYYMYLLLLLKSVVYFAIITCCLLRRTAFCCNGEKSRAKRSGSGATNFSLLKQAGDVEENPGPTSMDWIWRILFLVGAATGAHSGPQLQLQESGPGLVKPSETLSLTCTVSGDSISSGDYYWGWIRQPPGKGLEWIGHIYYSGVTYYNPSLKSRVTISVDTSRNQFSLKLSSVTAADTAVYYCTREDSSNWRSRGQGTLVTVSSGSGGGGSGGGGSGGGGSFEQVQLKQSGPGLVQPSQSLSITCTVSGFSLTNYGVHWVRQSPGKGLEWLGVIWSGGNTDYNTPFTSRLSINKDNSKSQVFFKMNSLQSNDTAIYYCARALTYYDYEFAYWGQGTLVTVSATRIQNPDPAVYQLRDSKSSDKSVCLFTDFDSQTNVSQSKDSDVYITDKCVLDMRSMDFKSNSAVAWSNKSDFACANAFNNSIIPEDTFFPSPESSDSTDHVKPKETENTKQPSKSCHKPKAIVHTEKVNMMSLTVLGLRMLFAKTVAVNFLLTAKLFFL

SEQ ID NO: 16118 - protein, 986 aa, synthetic construct
MALPVTALLLPLALLLHAARPEVQLVESGGGLVQPGGSLRLSCAASGFSFSDFWMSWVRQAPGKGLEWVATISQAGSEKDYVDSVKGRFTISRDNAKKSLYLQMNSLRAEDTAVYYCASGVYSFDYRGQGTLVTVSSGTGGGGSGGGGSGGGGSEFMTQSPKFLLVSAGDRVTLTCKASQSVNNDVYWYQQEPGQSPKLLIYWASTRESGVPDRFTGSGSGTDFTLTISSVQAEDLAVYYCKQSYNLYTFGGGTKLEIKRLEDLKNVFPPEVAVFEPSEAEISHTQKATLVCLATGFYPDHVELSWWVNGKEVHSGVCTDPQPLKEQPALNDSRYCLSSRLRVSATFWQNPRNHFRCQVQFYGLSENDEWTQDRAKPVTQIVSAEAWGRADDVIKIHWQEKKSNTILGSQEGNTMKTNDTYMKFSWLTVPEKSLDKEHRCIVRHENNKNGVDQEIIFPPIKTDVITMDPKDNCSKDANDTLLLQLTNTSAYYMYLLLLLKSVVYFAIITCCLLRRTAFCCNGEKSRAKRSGSGATNFSLLKQAGDVEENPGPTSMDWIWRILFLVGAATGAHSGPQLQLQESGPGLVKPSETLSLTCTVSGDSISSGDYYWGWIRQPPGKGLEWIGHIYYSGVTYYNPSLKSRVTISVDTSRNQFSLKLSSVTAADTAVYYCTREDSSNWRSRGQGTLVTVSSGSGGGGSGGGGSGGGGSFEESGRGLVQPGGSRKLSCAASGFTFSTSGMHWVRQAPEKGLEWVAYISSGSTTIYHADTVKGRFTISRDNPKNTLFLQMTSLRSEDTAMYYCCARSGQFGNYFDYWGQGTTLTVSSTRIQNPDPAVYQLRDSKSSDKSVCLFTDFDSQTNVSQSKDSDVYITDKCVLDMRSMDFKSNSAVAWSNKSDFACANAFNNSIIPEDTFFPSPESSDSTDHVKPKETENTKQPSKSCHKPKAIVHTEKVNMMSLTVLGLRMLFAKTVAVNFLLTAKLFFL

SEQ ID NO: 16119 - protein, 991 aa, synthetic construct
MALPVTALLLPLALLLHAARPEVQLVESGGGLVQPGGSLRLSCAASGFSFSDFWMSWVRQAPGKGLEWVATISQAGSEKDYVDSVKGRFTISRDNAKKSLYLQMNSLRAEDTAVYYCASGVYSFDYRGQGTLVTVSSGTGGGGSGGGGSGGGGSEFQSPSSLAVSAGEKVTMSCKSSQSLLNSRTRKNYLAWYQQKPGQSPKLLIYWASTRESGVPDRFTGSGSGTDFTLTISSVQAEDLAVYYCKQSNLYTFGGGTKLEIKLEDLKNVFPPEVAVFEPSEAEISHTQKATLVCLATGFYPDHVELSWWVNGKEVHSGVCTDPQPLKEQPALNDSRYCLSSRLRVSATFWQNPRNHFRCQVQFYGLSENDEWTQDRAKPVTQIVSAEAWGRADDVIKIHWQEKKSNTILGSQEGNTMKTNDTYMKFSWLTVPEKSLDKEHRCIVRHENNKNGVDQEIIFPPIKTDVITMDPKDNCSKDANDTLLLQLTNTSAYYMYLLLLLKSVVYFAIITCCLLRRTAFCCNGEKSRAKRSGSGATNFSLLKQAGDVEENPGPTSMDWIWRILFLVGAATGAHSGPQLQLQESGPGLVKPSETLSLTCTVSGDSISSGDYYWGWIRQPPGKGLEWIGHIYYSGVTYYNPSLKSRVTISVDTSRNQFSLKLSSVTAADTAVYYCTREDSSNWRSRGQGTLVTVSSGSGGGGSGGGGSGGGGSFEQVQLEESGPELVKPGASVKLSCKASGYTFTEYIIHWVKQRSGQGLEWIGWFYPGSGSIKYNEKFKDKATLTADKSSSTVYMELSGLTSEDSAVYFCARHDGYSYFDYWGQGTTLTVSSTRIQNPDPAVYQLRDSKSSDKSVCLFTDFDSQTNVSQSKDSDVYITDKCVLDMRSMDFKSNSAVAWSNKSDFACANAFNNSIIPEDTFFPSPESSDSTDHVKPKETENTKQPSKSCHKPKAIVHTEKVNMMSLTVLGLRMLFAKTVAVNFLLTAKLFFL

SEQ ID NO: 16120 - protein, 994 aa, synthetic construct
MALPVTALLLPLALLLHAARPEVQLVESGGGLVQPGGSLRLSCAASGFSFSDFWMSWVRQAPGKGLEWVATISQAGSEKDYVDSVKGRFTISRDNAKKSLYLQMNSLRAEDTAVYYCASGVYSFDYRGQGTLVTVSSGTGGGGSGGGGSGGGGSEFDIQMTQSPSSLSASLGERVSLTCRATQELSGYLSWLQQKPDGTIKRLIYAASTLDSGVPKRFSGNRSGSDYSLTISSLESEDFADYYCLQYAIYPYTFGGGTKLEIKLEDLKNVFPPEVAVFEPSEAEISHTQKATLVCLATGFYPDHVELSWWVNGKEVHSGVCTDPQPLKEQPALNDSRYCLSSRLRVSATFWQNPRNHFRCQVQFYGLSENDEWTQDRAKPVTQIVSAEAWGRADDVIKIHWQEKKSNTILGSQEGNTMKTNDTYMKFSWLTVPEKSLDKEHRCIVRHENNKNGVDQEIIFPPIKTDVITMDPKDNCSKDANDTLLLQLTNTSAYYMYLLLLLKSVVYFAIITCCLLRRTAFCCNGEKSRAKRSGSGATNFSLLKQAGDVEENPGPTSMDWIWRILFLVGAATGAHSGPQLQLQESGPGLVKPSETLSLTCTVSGDSISSGDYYWGWIRQPPGKGLEWIGHIYYSGVTYYNPSLKSRVTISVDTSRNQFSLKLSSVTAADTAVYYCTREDSSNWRSRGQGTLVTVSSGSGGGGSGGGGSGGGGSFEEVQLQQSGPELVKPGASVKMSCKASGYTFTSYFIHWVKQKPGQGLEWIGFINPYNDGSKYNEKFKGKATLTSDKSSSTAYMELSSLTSEDSAVYYCTRDDGYYGYAMDYWGQGTSVTVSSTRIQNPDPAVYQLRDSKSSDKSVCLFTDFDSQTNVSQSKDSDVYITDKCVLDMRSMDFKSNSAVAWSNKSDFACANAFNNSIIPEDTFFPSPESSDSTDHVKPKETENTKQPSKSCHKPKAIVHTEKVNMMSLTVLGLRMLFAKTVAVNFLLTAKLFFL

SEQ ID NO: 16121 - protein, 999 aa, synthetic construct
MALPVTALLLPLALLLHAARPEVQLVESGGGLVQPGGSLRLSCAASGFSFSDFWMSWVRQAPGKGLEWVATISQAGSEKDYVDSVKGRFTISRDNAKKSLYLQMNSLRAEDTAVYYCASGVYSFDYRGQGTLVTVSSGTGGGGSGGGGSGGGGSEFDTIVLTQSPASLAVSLGQRATISCRASESVDSYGNSFMHWYQQKPGQPPKLLIYLASNLESGVPARFSGSGSRTDFTLTIDPVEADDAATYYCQQNNYDPWTFGGGTKLEIKLEDLKNVFPPEVAVFEPSEAEISHTQKATLVCLATGFYPDHVELSWWVNGKEVHSGVCTDPQPLKEQPALNDSRYCLSSRLRVSATFWQNPRNHFRCQVQFYGLSENDEWTQDRAKPVTQIVSAEAWGRADDVIKIHWQEKKSNTILGSQEGNTMKTNDTYMKFSWLTVPEKSLDKEHRCIVRHENNKNGVDQEIIFPPIKTDVITMDPKDNCSKDANDTLLLQLTNTSAYYMYLLLLLKSVVYFAIITCCLLRRTAFCCNGEKSRAKRSGSGATNFSLLKQAGDVEENPGPTSMDWIWRILFLVGAATGAHSGPQLQLQESGPGLVKPSETLSLTCTVSGDSISSGDYYWGWIRQPPGKGLEWIGHIYYSGVTYYNPSLKSRVTISVDTSRNQFSLKLSSVTAADTAVYYCTREDSSNWRSRGQGTLVTVSSGSGGGGSGGGGSGGGGSFEEVQLQQSGPELVKPGASVKMSCKASGYTFTSYVMHWVKQKPGQGLEWIGYINPYNDGTKYNEKFKGKATLTSDTSSSTAYMELNSLTSEDSAVYFCARPIYFDNDYFDYWGQGTTLKVSSTRIQNPDPAVYQLRDSKSSDKSVCLFTDFDSQTNVSQSKDSDVYITDKCVLDMRSMDFKSNSAVAWSNKSDFACANAFNNSIIPEDTFFPSPESSDSTDHVKPKETENTKQPSKSCHKPKAIVHTEKVNMMSLTVLGLRMLFAKTVAVNFLLTAKLFFL

SEQ ID NO: 16122 - protein, 994 aa, synthetic construct
MALPVTALLLPLALLLHAARPEVQLVESGGGLVQPGGSLRLSCAASGFSFSDFWMSWVRQAPGKGLEWVATISQAGSEKDYVDSVKGRFTISRDNAKKSLYLQMNSLRAEDTAVYYCASGVYSFDYRGQGTLVTVSSGTGGGGSGGGGSGGGGSEFDIQMTQSPSSLSASVGDRVTITCKASQDVGIAVAWYQQKPGKVPKLLIYWASTRHTGVPDRFSGSGSGTDFTLTISSLQPEDVATYYCQQYSSYPYTFGQGTKVEIKRLEDLKNVFPPEVAVFEPSEAEISHTQKATLVCLATGFYPDHVELSWWVNGKEVHSGVCTDPQPLKEQPALNDSRYCLSSRLRVSATFWQNPRNHFRCQVQFYGLSENDEWTQDRAKPVTQIVSAEAWGRADDVIKIHWQEKKSNTILGSQEGNTMKTNDTYMKFSWLTVPEKSLDKEHRCIVRHENNKNGVDQEIIFPPIKTDVITMDPKDNCSKDANDTLLLQLTNTSAYYMYLLLLLKSVVYFAIITCCLLRRTAFCCNGEKSRAKRSGSGATNFSLLKQAGDVEENPGPTSMDWIWRILFLVGAATGAHSGPQLQLQESGPGLVKPSETLSLTCTVSGDSISSGDYYWGWIRQPPGKGLEWIGHIYYSGVTYYNPSLKSRVTISVDTSRNQFSLKLSSVTAADTAVYYCTREDSSNWRSRGQGTLVTVSSGSGGGGSGGGGSGGGGSFEEVQLVESGGGLVQPGGSLRLSCAASGFDFSRYWMSWVRQAPGKGLEWIGEINPDSSTINYAPSLKDKFIISRDNAKNSLYLQMNSLRAEDTAVYYCARPDGNYWYFDVWGQGTLVTVSSTRIQNPDPAVYQLRDSKSSDKSVCLFTDFDSQTNVSQSKDSDVYITDKCVLDMRSMDFKSNSAVAWSNKSDFACANAFNNSIIPEDTFFPSPESSDSTDHVKPKETENTKQPSKSCHKPKAIVHTEKVNMMSLTVLGLRMLFAKTVAVNFLLTAKLFFL

SEQ ID NO: 16123 - protein, 994 aa, synthetic construct
MALPVTALLLPLALLLHAARPEVQLVESGGGLVQPGGSLRLSCAASGFSFSDFWMSWVRQAPGKGLEWVATISQAGSEKDYVDSVKGRFTISRDNAKKSLYLQMNSLRAEDTAVYYCASGVYSFDYRGQGTLVTVSSGTGGGGSGGGGSGGGGSEFDIVMTQSQKSMSTSVGDRVSITCKASQDVITGVAWYQQKPGQSPKLLIYSASYRYTGVPDRFTGSGSGTDFTFTISNVQAEDLAVYYCQQHYSTPLTFGAGTKLELKLEDLKNVFPPEVAVFEPSEAEISHTQKATLVCLATGFYPDHVELSWWVNGKEVHSGVCTDPQPLKEQPALNDSRYCLSSRLRVSATFWQNPRNHFRCQVQFYGLSENDEWTQDRAKPVTQIVSAEAWGRADDVIKIHWQEKKSNTILGSQEGNTMKTNDTYMKFSWLTVPEKSLDKEHRCIVRHENNKNGVDQEIIFPPIKTDVITMDPKDNCSKDANDTLLLQLTNTSAYYMYLLLLLKSVVYFAIITCCLLRRTAFCCNGEKSRAKRSGSGATNFSLLKQAGDVEENPGPTSMDWIWRILFLVGAATGAHSGPQLQLQESGPGLVKPSETLSLTCTVSGDSISSGDYYWGWIRQPPGKGLEWIGHIYYSGVTYYNPSLKSRVTISVDTSRNQFSLKLSSVTAADTAVYYCTREDSSNWRSRGQGTLVTVSSGSGGGGSGGGGSGGGGSFEQVQLQQPGAELVRPGASVKLSCKASGYSFTTYWMNWVKQRPGQGLEWIGMIHPSDSETRLNQKFKDKATLTVDKSSSTAYMQLSSPTSEDSAVYYCARSTMIATRAMDYWGQGTSVTVSSTRIQNPDPAVYQLRDSKSSDKSVCLFTDFDSQTNVSQSKDSDVYITDKCVLDMRSMDFKSNSAVAWSNKSDFACANAFNNSIIPEDTFFPSPESSDSTDHVKPKETENTKQPSKSCHKPKAIVHTEKVNMMSLTVLGLRMLFAKTVAVNFLLTAKLFFL

SEQ ID NO: 16124 - protein, 1000 aa, synthetic construct
MALPVTALLLPLALLLHAARPEVQLVESGGGLVQPGGSLRLSCAASGFSFSDFWMSWVRQAPGKGLEWVATISQAGSEKDYVDSVKGRFTISRDNAKKSLYLQMNSLRAEDTAVYYCASGVYSFDYRGQGTLVTVSSGTGGGGSGGGGSGGGGSEFQSVLTQPPSVSGAPGQRVTISCTGSGSNIGAPYDVSWYQQLPGTAPKLLIYHNNKRPSGVPDRFSGSKSGTSASLAITGLQAEDEADYYCATVEAGLSGSVFGGGTKLTVLGALEDLKNVFPPEVAVFEPSEAEISHTQKATLVCLATGFYPDHVELSWWVNGKEVHSGVCTDPQPLKEQPALNDSRYCLSSRLRVSATFWQNPRNHFRCQVQFYGLSENDEWTQDRAKPVTQIVSAEAWGRADDVIKIHWQEKKSNTILGSQEGNTMKTNDTYMKFSWLTVPEKSLDKEHRCIVRHENNKNGVDQEIIFPPIKTDVITMDPKDNCSKDANDTLLLQLTNTSAYYMYLLLLLKSVVYFAIITCCLLRRTAFCCNGEKSRAKRSGSGATNFSLLKQAGDVEENPGPTSMDWIWRILFLVGAATGAHSGPQLQLQESGPGLVKPSETLSLTCTVSGDSISSGDYYWGWIRQPPGKGLEWIGHIYYSGVTYYNPSLKSRVTISVDTSRNQFSLKLSSVTAADTAVYYCTREDSSNWRSRGQGTLVTVSSGSGGGGSGGGGSGGGGSFEQVQLVQSGAEVKKPGASVKVSCKVSGYTLTELSIHWVRQAPGKGLEWMGGFDPEENEIVYAQRFQGRVTMTEDTSTDTAYMELSSLRSEDTAVYYCAIVGSFSPLTLGLWGQGTMVTVSSTRIQNPDPAVYQLRDSKSSDKSVCLFTDFDSQTNVSQSKDSDVYITDKCVLDMRSMDFKSNSAVAWSNKSDFACANAFNNSIIPEDTFFPSPESSDSTDHVKPKETENTKQPSKSCHKPKAIVHTEKVNMMSLTVLGLRMLFAKTVAVNFLLTAKLFFL

SEQ ID NO: 16125 - protein, 1000 aa, synthetic construct
MALPVTALLLPLALLLHAARPEVQLVESGGGLVQPGGSLRLSCAASGFSFSDFWMSWVRQAPGKGLEWVATISQAGSEKDYVDSVKGRFTISRDNAKKSLYLQMNSLRAEDTAVYYCASGVYSFDYRGQGTLVTVSSGTGGGGSGGGGSGGGGSEFQSVLTQPPSVSGAPGQRVTISCTGSGSNIGAPYDVSWYQQLPGTAPKLLIYHNNKRPSGVPDRFSGSKSGTSASLAITGLQAEDEADYYCQSYDSSSISTIFGGGTKLTVLGALEDLKNVFPPEVAVFEPSEAEISHTQKATLVCLATGFYPDHVELSWWVNGKEVHSGVCTDPQPLKEQPALNDSRYCLSSRLRVSATFWQNPRNHFRCQVQFYGLSENDEWTQDRAKPVTQIVSAEAWGRADDVIKIHWQEKKSNTILGSQEGNTMKTNDTYMKFSWLTVPEKSLDKEHRCIVRHENNKNGVDQEIIFPPIKTDVITMDPKDNCSKDANDTLLLQLTNTSAYYMYLLLLLKSVVYFAIITCCLLRRTAFCCNGEKSRAKRSGSGATNFSLLKQAGDVEENPGPTSMDWIWRILFLVGAATGAHSGPQLQLQESGPGLVKPSETLSLTCTVSGDSISSGDYYWGWIRQPPGKGLEWIGHIYYSGVTYYNPSLKSRVTISVDTSRNQFSLKLSSVTAADTAVYYCTREDSSNWRSRGQGTLVTVSSGSGGGGSGGGGSGGGGSFEQVQLVQSGAEVKKPGASVKVSCKVSGYTLTELSIHWVRQAPGKGLEWMGGFDPEENEIVYAQRFQGRVTMTEDTSTDTAYMELSSLRSEDTAVYYCAIVGSFSGIAYRPWGQGTMVTVSSTRIQNPDPAVYQLRDSKSSDKSVCLFTDFDSQTNVSQSKDSDVYITDKCVLDMRSMDFKSNSAVAWSNKSDFACANAFNNSIIPEDTFFPSPESSDSTDHVKPKETENTKQPSKSCHKPKAIVHTEKVNMMSLTVLGLRMLFAKTVAVNFLLTAKLFFL

SEQ ID NO: 16126 - protein, 988 aa, synthetic construct
MALPVTALLLPLALLLHAARPEVQLVESGGGLVQPGGSLRLSCAASGFSFSDFWMSWVRQAPGKGLEWVATISQAGSEKDYVDSVKGRFTISRDNAKKSLYLQMNSLRAEDTAVYYCASGVYSFDYRGQGTLVTVSSGTGGGGSGGGGSGGGGSEFDIQMTQSPSSLSASVGDRVTITCRASQGIRNNLAWYQQKPGKAPKRLIYAASNLQSGVPSRFTGSGSGTEFTLIVSSLQPEDFATYYCLQHHSYPLTSGGGTKVELEDLKNVFPPEVAVFEPSEAEISHTQKATLVCLATGFYPDHVELSWWVNGKEVHSGVCTDPQPLKEQPALNDSRYCLSSRLRVSATFWQNPRNHFRCQVQFYGLSENDEWTQDRAKPVTQIVSAEAWGRADDVIKIHWQEKKSNTILGSQEGNTMKTNDTYMKFSWLTVPEKSLDKEHRCIVRHENNKNGVDQEIIFPPIKTDVITMDPKDNCSKDANDTLLLQLTNTSAYYMYLLLLLKSVVYFAIITCCLLRRTAFCCNGEKSRAKRSGSGATNFSLLKQAGDVEENPGPTSMDWIWRILFLVGAATGAHSGPQLQLQESGPGLVKPSETLSLTCTVSGDSISSGDYYWGWIRQPPGKGLEWIGHIYYSGVTYYNPSLKSRVTISVDTSRNQFSLKLSSVTAADTAVYYCTREDSSNWRSRGQGTLVTVSSGSGGGGSGGGGSGGGGSFEEVQVLESGGGLVQPGGSLRLSCAASGFTFSSYAMSWVRQAPGKGLEWVSAISGSGGSTNYADSVKGRFTISRDNSKNTLYLQMNSLRAEDTAVYYCAGSSGWSEYWGQGTLVTVSSTRIQNPDPAVYQLRDSKSSDKSVCLFTDFDSQTNVSQSKDSDVYITDKCVLDMRSMDFKSNSAVAWSNKSDFACANAFNNSIIPEDTFFPSPESSDSTDHVKPKETENTKQPSKSCHKPKAIVHTEKVNMMSLTVLGLRMLFAKTVAVNFLLTAKLFFL

SEQ ID NO: 16127 - protein, 994 aa, synthetic construct
MALPVTALLLPLALLLHAARPEVQLVESGGGLVQPGGSLRLSCAASGFSFSDFWMSWVRQAPGKGLEWVATISQAGSEKDYVDSVKGRFTISRDNAKKSLYLQMNSLRAEDTAVYYCASGVYSFDYRGQGTLVTVSSGTGGGGSGGGGSGGGGSEFDEIQLVQSGAEVKKPGESLRISCKGSGFNIEDYYIHWVRQMPGKGLEWMGRIDPENDETKYGPIFQGHVTISADTSINTVYLQWSSLKASDTAMYYCAFRGGVYWGQGTTVTVSSLEDLKNVFPPEVAVFEPSEAEISHTQKATLVCLATGFYPDHVELSWWVNGKEVHSGVCTDPQPLKEQPALNDSRYCLSSRLRVSATFWQNPRNHFRCQVQFYGLSENDEWTQDRAKPVTQIVSAEAWGRADDVIKIHWQEKKSNTILGSQEGNTMKTNDTYMKFSWLTVPEKSLDKEHRCIVRHENNKNGVDQEIIFPPIKTDVITMDPKDNCSKDANDTLLLQLTNTSAYYMYLLLLLKSVVYFAIITCCLLRRTAFCCNGEKSRAKRSGSGATNFSLLKQAGDVEENPGPTSMDWIWRILFLVGAATGAHSGPQLQLQESGPGLVKPSETLSLTCTVSGDSISSGDYYWGWIRQPPGKGLEWIGHIYYSGVTYYNPSLKSRVTISVDTSRNQFSLKLSSVTAADTAVYYCTREDSSNWRSRGQGTLVTVSSGSGGGGSGGGGSGGGGSFEDVVMTQSPDSLAVSLGERATINCKSSQSLLDSDGKTYLNWLQQKPGQPPKRLISLVSKLDSGVPDRFSGSGSGTDFTLTISSLQAEDVAVYYCWQGTHFPGTFGGGTKVEIKTRIQNPDPAVYQLRDSKSSDKSVCLFTDFDSQTNVSQSKDSDVYITDKCVLDMRSMDFKSNSAVAWSNKSDFACANAFNNSIIPEDTFFPSPESSDSTDHVKPKETENTKQPSKSCHKPKAIVHTEKVNMMSLTVLGLRMLFAKTVAVNFLLTAKLFFL

SEQ ID NO: 16128 - protein, 1001 aa, synthetic construct
MALPVTALLLPLALLLHAARPEVQLVESGGGLVQPGGSLRLSCAASGFSFSDFWMSWVRQAPGKGLEWVATISQAGSEKDYVDSVKGRFTISRDNAKKSLYLQMNSLRAEDTAVYYCASGVYSFDYRGQGTLVTVSSGTGGGGSGGGGSGGGGSEFDELVMTQSPSSLTVTAGEKVTMSCKSSQSLLNSGNQKNYLTWYQQKPGQPPKLLIYWASTRESGVPDRFTGSGSGTDFTLTISSVQAEDLAVYYCQNDYSYPLTFGAGTKLEIKLEDLKNVFPPEVAVFEPSEAEISHTQKATLVCLATGFYPDHVELSWWVNGKEVHSGVCTDPQPLKEQPALNDSRYCLSSRLRVSATFWQNPRNHFRCQVQFYGLSENDEWTQDRAKPVTQIVSAEAWGRADDVIKIHWQEKKSNTILGSQEGNTMKTNDTYMKFSWLTVPEKSLDKEHRCIVRHENNKNGVDQEIIFPPIKTDVITMDPKDNCSKDANDTLLLQLTNTSAYYMYLLLLLKSVVYFAIITCCLLRRTAFCCNGEKSRAKRSGSGATNFSLLKQAGDVEENPGPTSMDWIWRILFLVGAATGAHSGPQLQLQESGPGLVKPSETLSLTCTVSGDSISSGDYYWGWIRQPPGKGLEWIGHIYYSGVTYYNPSLKSRVTISVDTSRNQFSLKLSSVTAADTAVYYCTREDSSNWRSRGQGTLVTVSSGSGGGGSGGGGSGGGGSFEEVQLLEQSGAELVRPGTSVKISCKASGYAFTNYWLGWVKQRPGHGLEWIGDIFPGSGNIHYNEKFKGKATLTADKSSSTAYMQLSSLTFEDSAVYFCARLRNWDEPMDYWGQGTTVTVSSTRIQNPDPAVYQLRDSKSSDKSVCLFTDFDSQTNVSQSKDSDVYITDKCVLDMRSMDFKSNSAVAWSNKSDFACANAFNNSIIPEDTFFPSPESSDSTDHVKPKETENTKQPSKSCHKPKAIVHTEKVNMMSLTVLGLRMLFAKTVAVNFLLTAKLFFL

SEQ ID NO: 16129 - protein, 1002 aa, synthetic construct
MALPVTALLLPLALLLHAARPEVQLVESGGGLVQPGGSLRLSCAASGFSFSDFWMSWVRQAPGKGLEWVATISQAGSEKDYVDSVKGRFTISRDNAKKSLYLQMNSLRAEDTAVYYCASGVYSFDYRGQGTLVTVSSGTGGGGSGGGGSGGGGSEFDELQMTQSPSSLSASVGDRVTITCRASQSISSYLNWYQQKPGQPPKLLIYWASTRESGVPDRFSGSESGTNYTLTISSLQPEDFATYFCQQSDSLPITFGQGTRLDIQLEDLKNVFPPEVAVFEPSEAEISHTQKATLVCLATGFYPDHVELSWWVNGKEVHSGVCTDPQPLKEQPALNDSRYCLSSRLRVSATFWQNPRNHFRCQVQFYGLSENDEWTQDRAKPVTQIVSAEAWGRADDVIKIHWQEKKSNTILGSQEGNTMKTNDTYMKFSWLTVPEKSLDKEHRCIVRHENNKNGVDQEIIFPPIKTDVITMDPKDNCSKDANDTLLLQLTNTSAYYMYLLLLLKSVVYFAIITCCLLRRTAFCCNGEKSRAKRSGSGATNFSLLKQAGDVEENPGPTSMDWIWRILFLVGAATGAHSGPQLQLQESGPGLVKPSETLSLTCTVSGDSISSGDYYWGWIRQPPGKGLEWIGHIYYSGVTYYNPSLKSRVTISVDTSRNQFSLKLSSVTAADTAVYYCTREDSSNWRSRGQGTLVTVSSGSGGGGSGGGGSGGGGSFEEVQLLESGGGVVQPGRSLRLSCAASGFTFSSYGMHWVRQAPGKGLEWVAVISYDGSNKYYADSVKGRFTISRDNSKNTLYLQMNSLRAEDTAVYYCAKDMGWGSGWRPYYYYGMDVWGQGTTVTVSSTRIQNPDPAVYQLRDSKSSDKSVCLFTDFDSQTNVSQSKDSDVYITDKCVLDMRSMDFKSNSAVAWSNKSDFACANAFNNSIIPEDTFFPSPESSDSTDHVKPKETENTKQPSKSCHKPKAIVHTEKVNMMSLTVLGLRMLFAKTVAVNFLLTAKLFFL

SEQ ID NO: 16130 - protein, 999 aa, synthetic construct
MALPVTALLLPLALLLHAARPEVQLVESGGGLVQPGGSLRLSCAASGFSFSDFWMSWVRQAPGKGLEWVATISQAGSEKDYVDSVKGRFTISRDNAKKSLYLQMNSLRAEDTAVYYCASGVYSFDYRGQGTLVTVSSGTGGGGSGGGGSGGGGSEFDDIQMTQSPSSLSASVGDRVTITCRASQSISSYLNWYQQKPGKAPKLLIYAASSLQSGVPSRFSGSGSGTDFTLTISSLQPEDLATYYCQQSYSTPFTFGPGTKVDIKLEDLKNVFPPEVAVFEPSEAEISHTQKATLVCLATGFYPDHVELSWWVNGKEVHSGVCTDPQPLKEQPALNDSRYCLSSRLRVSATFWQNPRNHFRCQVQFYGLSENDEWTQDRAKPVTQIVSAEAWGRADDVIKIHWQEKKSNTILGSQEGNTMKTNDTYMKFSWLTVPEKSLDKEHRCIVRHENNKNGVDQEIIFPPIKTDVITMDPKDNCSKDANDTLLLQLTNTSAYYMYLLLLLKSVVYFAIITCCLLRRTAFCCNGEKSRAKRSGSGATNFSLLKQAGDVEENPGPTSMDWIWRILFLVGAATGAHSGPQLQLQESGPGLVKPSETLSLTCTVSGDSISSGDYYWGWIRQPPGKGLEWIGHIYYSGVTYYNPSLKSRVTISVDTSRNQFSLKLSSVTAADTAVYYCTREDSSNWRSRGQGTLVTVSSGSGGGGSGGGGSGGGGSFEVHEVQLVQSGAEVKKPGSSVKVSCKASGGTFSSYAISWVRQAPGQGLEWMGGIIPIFGTANYAQKFQGRVTITADKSTSTAYMELSSLRSEDTAVYYCATFALFGFREQAFDIWGQGTTVTVSSTRIQNPDPAVYQLRDSKSSDKSVCLFTDFDSQTNVSQSKDSDVYITDKCVLDMRSMDFKSNSAVAWSNKSDFACANAFNNSIIPEDTFFPSPESSDSTDHVKPKETENTKQPSKSCHKPKAIVHTEKVNMMSLTVLGLRMLFAKTVAVNFLLTAKLFFL

SEQ ID NO: 16131 - protein, 997 aa, synthetic construct
MALPVTALLLPLALLLHAARPEVQLVESGGGLVQPGGSLRLSCAASGFSFSDFWMSWVRQAPGKGLEWVATISQAGSEKDYVDSVKGRFTISRDNAKKSLYLQMNSLRAEDTAVYYCASGVYSFDYRGQGTLVTVSSGTGGGGSGGGGSGGGGSEFDIVLTQSPLSLAVSLGQPAIISCKASQSVSFAGTSLMHWYHQKPGQQPRLLIYRASNLEAGVPDRFSGSGSKTDFTLTISPVEAEDAATYYCQQSREYPYTFGGGTKLEIKRLEDLKNVFPPEVAVFEPSEAEISHTQKATLVCLATGFYPDHVELSWWVNGKEVHSGVCTDPQPLKEQPALNDSRYCLSSRLRVSATFWQNPRNHFRCQVQFYGLSENDEWTQDRAKPVTQIVSAEAWGRADDVIKIHWQEKKSNTILGSQEGNTMKTNDTYMKFSWLTVPEKSLDKEHRCIVRHENNKNGVDQEIIFPPIKTDVITMDPKDNCSKDANDTLLLQLTNTSAYYMYLLLLLKSVVYFAIITCCLLRRTAFCCNGEKSRAKRSGSGATNFSLLKQAGDVEENPGPTSMDWIWRILFLVGAATGAHSGPQLQLQESGPGLVKPSETLSLTCTVSGDSISSGDYYWGWIRQPPGKGLEWIGHIYYSGVTYYNPSLKSRVTISVDTSRNQFSLKLSSVTAADTAVYYCTREDSSNWRSRGQGTLVTVSSGSGGGGSGGGGSGGGGSFEQVQLVQSGAEVVKPGASVKISCKASGYTFTGYFMNWVKQSPGQSLEWIGRIHPYDGDTFYNQKFQGKATLTVDKSSNTAHMELLSLTSEDFAVYYCTRYDGSRAMDYWGQGTTVTVSSTRIQNPDPAVYQLRDSKSSDKSVCLFTDFDSQTNVSQSKDSDVYITDKCVLDMRSMDFKSNSAVAWSNKSDFACANAFNNSIIPEDTFFPSPESSDSTDHVKPKETENTKQPSKSCHKPKAIVHTEKVNMMSLTVLGLRMLFAKTVAVNFLLTAKLFFL

SEQ ID NO: 16132 - protein, 994 aa, synthetic construct
MALPVTALLLPLALLLHAARPEVQLVESGGGLVQPGGSLRLSCAASGFSFSDFWMSWVRQAPGKGLEWVATISQAGSEKDYVDSVKGRFTISRDNAKKSLYLQMNSLRAEDTAVYYCASGVYSFDYRGQGTLVTVSSGTGGGGSGGGGSGGGGSEFDDVVMTQTPLSLPVTPGEPASISCRSSQSLVHRNGNTYLHWYLQKPGQSPKLLIHKVSNRFSGVPDRFSGSGSGTDFTLKISRVEAEDLGVYFCSQSTHVPPLTFGAGTKLELKLEDLKNVFPPEVAVFEPSEAEISHTQKATLVCLATGFYPDHVELSWWVNGKEVHSGVCTDPQPLKEQPALNDSRYCLSSRLRVSATFWQNPRNHFRCQVQFYGLSENDEWTQDRAKPVTQIVSAEAWGRADDVIKIHWQEKKSNTILGSQEGNTMKTNDTYMKFSWLTVPEKSLDKEHRCIVRHENNKNGVDQEIIFPPIKTDVITMDPKDNCSKDANDTLLLQLTNTSAYYMYLLLLLKSVVYFAIITCCLLRRTAFCCNGEKSRAKRSGSGATNFSLLKQAGDVEENPGPTSMDWIWRILFLVGAATGAHSGPQLQLQESGPGLVKPSETLSLTCTVSGDSISSGDYYWGWIRQPPGKGLEWIGHIYYSGVTYYNPSLKSRVTISVDTSRNQFSLKLSSVTAADTAVYYCTREDSSNWRSRGQGTLVTVSSGSGGGGSGGGGSGGGGSFEEVQLVQSGAEVEKPGASVKISCKASGSSFTGYNMNWVRQNIGKSLEWIGAIDPYYGGTSYNQKFKGRATLTVDKSTSTAYMHLKSLRSEDTAVYYCVSGMEYWGQGTSVTVSSTRIQNPDPAVYQLRDSKSSDKSVCLFTDFDSQTNVSQSKDSDVYITDKCVLDMRSMDFKSNSAVAWSNKSDFACANAFNNSIIPEDTFFPSPESSDSTDHVKPKETENTKQPSKSCHKPKAIVHTEKVNMMSLTVLGLRMLFAKTVAVNFLLTAKLFFL

SEQ ID NO: 16133 - protein, 992 aa, synthetic construct
MALPVTALLLPLALLLHAARPEVQLVESGGGLVQPGGSLRLSCAASGFSFSDFWMSWVRQAPGKGLEWVATISQAGSEKDYVDSVKGRFTISRDNAKKSLYLQMNSLRAEDTAVYYCASGVYSFDYRGQGTLVTVSSGTGGGGSGGGGSGGGGSEFDEIVMTQTPATLSVSAGERVTITCKASQSVSNDVTWYQQKPGQAPRLLIYSASNRYSGVPARFSGSGYGTEFTFTISSVQSEDFAVYFCQQDYSSFGQGTKLEIKRLEDLKNVFPPEVAVFEPSEAEISHTQKATLVCLATGFYPDHVELSWWVNGKEVHSGVCTDPQPLKEQPALNDSRYCLSSRLRVSATFWQNPRNHFRCQVQFYGLSENDEWTQDRAKPVTQIVSAEAWGRADDVIKIHWQEKKSNTILGSQEGNTMKTNDTYMKFSWLTVPEKSLDKEHRCIVRHENNKNGVDQEIIFPPIKTDVITMDPKDNCSKDANDTLLLQLTNTSAYYMYLLLLLKSVVYFAIITCCLLRRTAFCCNGEKSRAKRSGSGATNFSLLKQAGDVEENPGPTSMDWIWRILFLVGAATGAHSGPQLQLQESGPGLVKPSETLSLTCTVSGDSISSGDYYWGWIRQPPGKGLEWIGHIYYSGVTYYNPSLKSRVTISVDTSRNQFSLKLSSVTAADTAVYYCTREDSSNWRSRGQGTLVTVSSGSGGGGSGGGGSGGGGSFEQVQLVESGPGVVQPGRSLRISCAVSGFSVTNYGVHWVRQPPGKGLEWLGVIWAGGITNYNSAFMSRLTISKDNSKNTVYLQMNSLRAEDTAMYYCASRGGHYGYALDYWGQGTLVTVSSTRIQNPDPAVYQLRDSKSSDKSVCLFTDFDSQTNVSQSKDSDVYITDKCVLDMRSMDFKSNSAVAWSNKSDFACANAFNNSIIPEDTFFPSPESSDSTDHVKPKETENTKQPSKSCHKPKAIVHTEKVNMMSLTVLGLRMLFAKTVAVNFLLTAKLFFL

SEQ ID NO: 16134 - protein, 994 aa, synthetic construct
MALPVTALLLPLALLLHAARPEVQLVESGGGLVQPGGSLRLSCAASGFSFSDFWMSWVRQAPGKGLEWVATISQAGSEKDYVDSVKGRFTISRDNAKKSLYLQMNSLRAEDTAVYYCASGVYSFDYRGQGTLVTVSSGTGGGGSGGGGSGGGGSEFDIQMTQTASSLPASLGDRVTISCSASQDISNYLNWYQQKPDGTVKLLIFYSSNLHSGVPSRFSGGGSGTDYSLTISNLEPEDIATYFCHQYSKLPWTFGGGTKLEIKRLEDLKNVFPPEVAVFEPSEAEISHTQKATLVCLATGFYPDHVELSWWVNGKEVHSGVCTDPQPLKEQPALNDSRYCLSSRLRVSATFWQNPRNHFRCQVQFYGLSENDEWTQDRAKPVTQIVSAEAWGRADDVIKIHWQEKKSNTILGSQEGNTMKTNDTYMKFSWLTVPEKSLDKEHRCIVRHENNKNGVDQEIIFPPIKTDVITMDPKDNCSKDANDTLLLQLTNTSAYYMYLLLLLKSVVYFAIITCCLLRRTAFCCNGEKSRAKRSGSGATNFSLLKQAGDVEENPGPTSMDWIWRILFLVGAATGAHSGPQLQLQESGPGLVKPSETLSLTCTVSGDSISSGDYYWGWIRQPPGKGLEWIGHIYYSGVTYYNPSLKSRVTISVDTSRNQFSLKLSSVTAADTAVYYCTREDSSNWRSRGQGTLVTVSSGSGGGGSGGGGSGGGGSFEEVTLVESGGDFVKPGGSLKVSCAASGFAFSHYAMSWVRQTPAKRLEWVAYISSGGSGTYYSDSVKGRFTISRDNAKNTLYLQMRSLRSEDSAMYFCTRVKLGTYYFDSWGQGTTLTVSSTRIQNPDPAVYQLRDSKSSDKSVCLFTDFDSQTNVSQSKDSDVYITDKCVLDMRSMDFKSNSAVAWSNKSDFACANAFNNSIIPEDTFFPSPESSDSTDHVKPKETENTKQPSKSCHKPKAIVHTEKVNMMSLTVLGLRMLFAKTVAVNFLLTAKLFFL

SEQ ID NO: 16135 - protein, 996 aa, synthetic construct
MALPVTALLLPLALLLHAARPEVQLVESGGGLVQPGGSLRLSCAASGFSFSDFWMSWVRQAPGKGLEWVATISQAGSEKDYVDSVKGRFTISRDNAKKSLYLQMNSLRAEDTAVYYCASGVYSFDYRGQGTLVTVSSGTGGGGSGGGGSGGGGSEFQFVLTQSPSASAALGASAKLTCTLSSAHKTYTIDWYQQQKGKAPRYLIQVKSDGTYTKATGVPDRFSGSSSGADRYLIIPSVQADDEADYYCGTDYTGGYVFGGGTQLTVTLEDLKNVFPPEVAVFEPSEAEISHTQKATLVCLATGFYPDHVELSWWVNGKEVHSGVCTDPQPLKEQPALNDSRYCLSSRLRVSATFWQNPRNHFRCQVQFYGLSENDEWTQDRAKPVTQIVSAEAWGRADDVIKIHWQEKKSNTILGSQEGNTMKTNDTYMKFSWLTVPEKSLDKEHRCIVRHENNKNGVDQEIIFPPIKTDVITMDPKDNCSKDANDTLLLQLTNTSAYYMYLLLLLKSVVYFAIITCCLLRRTAFCCNGEKSRAKRSGSGATNFSLLKQAGDVEENPGPTSMDWIWRILFLVGAATGAHSGPQLQLQESGPGLVKPSETLSLTCTVSGDSISSGDYYWGWIRQPPGKGLEWIGHIYYSGVTYYNPSLKSRVTISVDTSRNQFSLKLSSVTAADTAVYYCTREDSSNWRSRGQGTLVTVSSGSGGGGSGGGGSGGGGSFEEQLKESGGGLFKPTDTLTLTCTVSGFSLSYYGVNWVRQAPGNGLEWIGTIGGSGDTYYASWAKSRSTIIRNTNENTVTLKMTSLTAADTATYFCVRYANIGYEYFNVWGPGTLVTVSSTRIQNPDPAVYQLRDSKSSDKSVCLFTDFDSQTNVSQSKDSDVYITDKCVLDMRSMDFKSNSAVAWSNKSDFACANAFNNSIIPEDTFFPSPESSDSTDHVKPKETENTKQPSKSCHKPKAIVHTEKVNMMSLTVLGLRMLFAKTVAVNFLLTAKLFFL

SEQ ID NO: 16136 - protein, 1001 aa, synthetic construct
MALPVTALLLPLALLLHAARPEVQLVESGGGLVQPGGSLRLSCAASGFSFSDFWMSWVRQAPGKGLEWVATISQAGSEKDYVDSVKGRFTISRDNAKKSLYLQMNSLRAEDTAVYYCASGVYSFDYRGQGTLVTVSSGTGGGGSGGGGSGGGGSEFQFVLTQSPSVSAALGASAKLTCTLSSAHKTYTIDWYQQQQGEAPRYLMQVKSDGSYTKGTGVPDRFSGSSSGADRYLIIPSVQADDEAGYVCGADDNGGYVFGGGTQLTVTLEDLKNVFPPEVAVFEPSEAEISHTQKATLVCLATGFYPDHVELSWWVNGKEVHSGVCTDPQPLKEQPALNDSRYCLSSRLRVSATFWQNPRNHFRCQVQFYGLSENDEWTQDRAKPVTQIVSAEAWGRADDVIKIHWQEKKSNTILGSQEGNTMKTNDTYMKFSWLTVPEKSLDKEHRCIVRHENNKNGVDQEIIFPPIKTDVITMDPKDNCSKDANDTLLLQLTNTSAYYMYLLLLLKSVVYFAIITCCLLRRTAFCCNGEKSRAKRSGSGATNFSLLKQAGDVEENPGPTSMDWIWRILFLVGAATGAHSGPQLQLQESGPGLVKPSETLSLTCTVSGDSISSGDYYWGWIRQPPGKGLEWIGHIYYSGVTYYNPSLKSRVTISVDTSRNQFSLKLSSVTAADTAVYYCTREDSSNWRSRGQGTLVTVSSGSGGGGSGGGGSGGGGSFEQSVKESEGGLFKPTDTLTLTCTVSGFSLSRHALTWVRQAPGNGLEWIGAIDNAGTTYYASWAKSRSTITRNTDLHTVTLKMTSLTASDTATYFCARVFYDINSGYYLDGMDLWGPGTLVTVSSTRIQNPDPAVYQLRDSKSSDKSVCLFTDFDSQTNVSQSKDSDVYITDKCVLDMRSMDFKSNSAVAWSNKSDFACANAFNNSIIPEDTFFPSPESSDSTDHVKPKETENTKQPSKSCHKPKAIVHTEKVNMMSLTVLGLRMLFAKTVAVNFLLTAKLFFL

SEQ ID NO: 16137 - protein, 995 aa, synthetic construct
MALPVTALLLPLALLLHAARPEVQLVESGGGLVQPGGSLRLSCAASGFSFSDFWMSWVRQAPGKGLEWVATISQAGSEKDYVDSVKGRFTISRDNAKKSLYLQMNSLRAEDTAVYYCASGVYSFDYRGQGTLVTVSSGTGGGGSGGGGSGGGGSEFDIQMTQSPSSLSASVGDRVTITCRASQGISSWLAWYQQKPEKAPKSLIYAASSLQSGVPSRFSGSGSGTDFTLTISSLQPEDFATYYCQQYNSYPPTFGGGTKVEIKLEDLKNVFPPEVAVFEPSEAEISHTQKATLVCLATGFYPDHVELSWWVNGKEVHSGVCTDPQPLKEQPALNDSRYCLSSRLRVSATFWQNPRNHFRCQVQFYGLSENDEWTQDRAKPVTQIVSAEAWGRADDVIKIHWQEKKSNTILGSQEGNTMKTNDTYMKFSWLTVPEKSLDKEHRCIVRHENNKNGVDQEIIFPPIKTDVITMDPKDNCSKDANDTLLLQLTNTSAYYMYLLLLLKSVVYFAIITCCLLRRTAFCCNGEKSRAKRSGSGATNFSLLKQAGDVEENPGPTSMDWIWRILFLVGAATGAHSGPQLQLQESGPGLVKPSETLSLTCTVSGDSISSGDYYWGWIRQPPGKGLEWIGHIYYSGVTYYNPSLKSRVTISVDTSRNQFSLKLSSVTAADTAVYYCTREDSSNWRSRGQGTLVTVSSGSGGGGSGGGGSGGGGSFEEVQLVESGGGLVQPGESLRLSCVASGFTFSRYKMNWVRQAPGKGLEWVSYISRSGRDIYYADSVKGRFTISRDNAKNSLYLQMNSLRDEDTAVYYCAGTVTTYYYFGMDVWGHGTTVTVSSTRIQNPDPAVYQLRDSKSSDKSVCLFTDFDSQTNVSQSKDSDVYITDKCVLDMRSMDFKSNSAVAWSNKSDFACANAFNNSIIPEDTFFPSPESSDSTDHVKPKETENTKQPSKSCHKPKAIVHTEKVNMMSLTVLGLRMLFAKTVAVNFLLTAKLFFL

SEQ ID NO: 16138 - protein, 996 aa, synthetic construct
MALPVTALLLPLALLLHAARPEVQLVESGGGLVQPGGSLRLSCAASGFSFSDFWMSWVRQAPGKGLEWVATISQAGSEKDYVDSVKGRFTISRDNAKKSLYLQMNSLRAEDTAVYYCASGVYSFDYRGQGTLVTVSSGTGGGGSGGGGSGGGGSEFDIQMTQSPSSLSASVGDRVTITCRASQGISSWLAWYQQKPEKAPKSLIYAASSLQSGVPSRFSGSGSGTDFTLTISSLQPEDFATYYCQQYNSYPPTFGGGTKVEIKLEDLKNVFPPEVAVFEPSEAEISHTQKATLVCLATGFYPDHVELSWWVNGKEVHSGVCTDPQPLKEQPALNDSRYCLSSRLRVSATFWQNPRNHFRCQVQFYGLSENDEWTQDRAKPVTQIVSAEAWGRADDVIKIHWQEKKSNTILGSQEGNTMKTNDTYMKFSWLTVPEKSLDKEHRCIVRHENNKNGVDQEIIFPPIKTDVITMDPKDNCSKDANDTLLLQLTNTSAYYMYLLLLLKSVVYFAIITCCLLRRTAFCCNGEKSRAKRSGSGATNFSLLKQAGDVEENPGPTSMDWIWRILFLVGAATGAHSGPQLQLQESGPGLVKPSETLSLTCTVSGDSISSGDYYWGWIRQPPGKGLEWIGHIYYSGVTYYNPSLKSRVTISVDTSRNQFSLKLSSVTAADTAVYYCTREDSSNWRSRGQGTLVTVSSGSGGGGSGGGGSGGGGSFEEVQLVESGGGSVQPGESLRLSCVASGFTFSRYKMNWVRQAPGKGLEWVSYISRSGRDIYYADSVKGRFTISRDNAKNSLYLQMNSLRDEDTAVYYCAGTVTTYYYDFGMDVWGQGTTVTVSSTRIQNPDPAVYQLRDSKSSDKSVCLFTDFDSQTNVSQSKDSDVYITDKCVLDMRSMDFKSNSAVAWSNKSDFACANAFNNSIIPEDTFFPSPESSDSTDHVKPKETENTKQPSKSCHKPKAIVHTEKVNMMSLTVLGLRMLFAKTVAVNFLLTAKLFFL

SEQ ID NO: 16139 - protein, 994 aa, synthetic construct
MALPVTALLLPLALLLHAARPEVQLVESGGGLVQPGGSLRLSCAASGFSFSDFWMSWVRQAPGKGLEWVATISQAGSEKDYVDSVKGRFTISRDNAKKSLYLQMNSLRAEDTAVYYCASGVYSFDYRGQGTLVTVSSGTGGGGSGGGGSGGGGSEFQSVLTQPPSASGTPGQRVTISCSGSRSNVGGNYVFWYQQVPGATPKLLIYRSNQRPSGVPDRFAGSKSGSSASLAISGLRSEDEADYYCATWDDSLSGFVFGTGTKVTVLGLEDLKNVFPPEVAVFEPSEAEISHTQKATLVCLATGFYPDHVELSWWVNGKEVHSGVCTDPQPLKEQPALNDSRYCLSSRLRVSATFWQNPRNHFRCQVQFYGLSENDEWTQDRAKPVTQIVSAEAWGRADDVIKIHWQEKKSNTILGSQEGNTMKTNDTYMKFSWLTVPEKSLDKEHRCIVRHENNKNGVDQEIIFPPIKTDVITMDPKDNCSKDANDTLLLQLTNTSAYYMYLLLLLKSVVYFAIITCCLLRRTAFCCNGEKSRAKRSGSGATNFSLLKQAGDVEENPGPTSMDWIWRILFLVGAATGAHSGPQLQLQESGPGLVKPSETLSLTCTVSGDSISSGDYYWGWIRQPPGKGLEWIGHIYYSGVTYYNPSLKSRVTISVDTSRNQFSLKLSSVTAADTAVYYCTREDSSNWRSRGQGTLVTVSSGSGGGGSGGGGSGGGGSFEVQLVESGGGLVKPGGSLRLSCAASGFTFSDYYMSWIRQAPGKGLEWVSYISSSGSTIYYADSVKGRFTISRDNAKNSLYLQMNSLRAEDTAVYYCARGYGKAYDQWGQGTLVTVSSTRIQNPDPAVYQLRDSKSSDKSVCLFTDFDSQTNVSQSKDSDVYITDKCVLDMRSMDFKSNSAVAWSNKSDFACANAFNNSIIPEDTFFPSPESSDSTDHVKPKETENTKQPSKSCHKPKAIVHTEKVNMMSLTVLGLRMLFAKTVAVNFLLTAKLFFL

SEQ ID NO: 16140 - protein, 993 aa, synthetic construct
MALPVTALLLPLALLLHAARPEVQLVESGGGLVQPGGSLRLSCAASGFSFSDFWMSWVRQAPGKGLEWVATISQAGSEKDYVDSVKGRFTISRDNAKKSLYLQMNSLRAEDTAVYYCASGVYSFDYRGQGTLVTVSSGTGGGGSGGGGSGGGGSEFQSVVTQPPSMSAAPGQQVTISCSGGNSNIERNYVSWYLQLPGTAPKLVIFDNDRRPSGIPDRFSGSKSGTSATLGITGLQTGDEADYYCGTWDSSLRGWVFGGGTKLTVLGLEDLKNVFPPEVAVFEPSEAEISHTQKATLVCLATGFYPDHVELSWWVNGKEVHSGVCTDPQPLKEQPALNDSRYCLSSRLRVSATFWQNPRNHFRCQVQFYGLSENDEWTQDRAKPVTQIVSAEAWGRADDVIKIHWQEKKSNTILGSQEGNTMKTNDTYMKFSWLTVPEKSLDKEHRCIVRHENNKNGVDQEIIFPPIKTDVITMDPKDNCSKDANDTLLLQLTNTSAYYMYLLLLLKSVVYFAIITCCLLRRTAFCCNGEKSRAKRSGSGATNFSLLKQAGDVEENPGPTSMDWIWRILFLVGAATGAHSGPQLQLQESGPGLVKPSETLSLTCTVSGDSISSGDYYWGWIRQPPGKGLEWIGHIYYSGVTYYNPSLKSRVTISVDTSRNQFSLKLSSVTAADTAVYYCTREDSSNWRSRGQGTLVTVSSGSGGGGSGGGGSGGGGSFEVQLVESGGGLIQPGGSLRLSCAASGFTFSNYAMNWVRQAPGKGLEWVSTINGRGSSTIYADSVKGRFTISRDNSKNTLYLQMNSLRAEDTATYYCARYISRGLGDSWGQGTLVTVTRIQNPDPAVYQLRDSKSSDKSVCLFTDFDSQTNVSQSKDSDVYITDKCVLDMRSMDFKSNSAVAWSNKSDFACANAFNNSIIPEDTFFPSPESSDSTDHVKPKETENTKQPSKSCHKPKAIVHTEKVNMMSLTVLGLRMLFAKTVAVNFLLTAKLFFL

SEQ ID NO: 16141 - protein, 994 aa, synthetic construct
MALPVTALLLPLALLLHAARPEVQLVESGGGLVQPGGSLRLSCAASGFSFSDFWMSWVRQAPGKGLEWVATISQAGSEKDYVDSVKGRFTISRDNAKKSLYLQMNSLRAEDTAVYYCASGVYSFDYRGQGTLVTVSSGTGGGGSGGGGSGGGGSEFDVVMTQTPLSLPVSLGDQASISCRSSQSLVHSNGNTYLHWYLQKPGQSPKLLIYKVSNRFSGVPDRFSGSGSGTDFTLKISRVEAEDLGVYFCSQNTPVPPKFGSGTKLEIKLEDLKNVFPPEVAVFEPSEAEISHTQKATLVCLATGFYPDHVELSWWVNGKEVHSGVCTDPQPLKEQPALNDSRYCLSSRLRVSATFWQNPRNHFRCQVQFYGLSENDEWTQDRAKPVTQIVSAEAWGRADDVIKIHWQEKKSNTILGSQEGNTMKTNDTYMKFSWLTVPEKSLDKEHRCIVRHENNKNGVDQEIIFPPIKTDVITMDPKDNCSKDANDTLLLQLTNTSAYYMYLLLLLKSVVYFAIITCCLLRRTAFCCNGEKSRAKRSGSGATNFSLLKQAGDVEENPGPTSMDWIWRILFLVGAATGAHSGPQLQLQESGPGLVKPSETLSLTCTVSGDSISSGDYYWGWIRQPPGKGLEWIGHIYYSGVTYYNPSLKSRVTISVDTSRNQFSLKLSSVTAADTAVYYCTREDSSNWRSRGQGTLVTVSSGSGGGGSGGGGSGGGGSFEQVQLQQSGAELVRPGASVKLSCKASGYTFNDYEMHWVKQTPVHGLKWIGALEPKTGDTAYSQKFKGKATLTADKSSSTAYMELRSLTSEDSAVYYCTSCYYYTYSGQGTLVTVSATRIQNPDPAVYQLRDSKSSDKSVCLFTDFDSQTNVSQSKDSDVYITDKCVLDMRSMDFKSNSAVAWSNKSDFACANAFNNSIIPEDTFFPSPESSDSTDHVKPKETENTKQPSKSCHKPKAIVHTEKVNMMSLTVLGLRMLFAKTVAVNFLLTAKLFFL

SEQ ID NO: 16142 - protein, 993 aa, synthetic construct
MALPVTALLLPLALLLHAARPEVQLVESGGGLVQPGGSLRLSCAASGFSFSDFWMSWVRQAPGKGLEWVATISQAGSEKDYVDSVKGRFTISRDNAKKSLYLQMNSLRAEDTAVYYCASGVYSFDYRGQGTLVTVSSGTGGGGSGGGGSGGGGSEFDIQLTQSPSSLSASVGDRVTITCRASQGIRNDLGWYQQKPGKAPKRLIYAASSLQNGVPSRFSGSGSGTEFTLTISSLQPEDFATYYCLQHNTYPAFGQGTKVEIKRLEDLKNVFPPEVAVFEPSEAEISHTQKATLVCLATGFYPDHVELSWWVNGKEVHSGVCTDPQPLKEQPALNDSRYCLSSRLRVSATFWQNPRNHFRCQVQFYGLSENDEWTQDRAKPVTQIVSAEAWGRADDVIKIHWQEKKSNTILGSQEGNTMKTNDTYMKFSWLTVPEKSLDKEHRCIVRHENNKNGVDQEIIFPPIKTDVITMDPKDNCSKDANDTLLLQLTNTSAYYMYLLLLLKSVVYFAIITCCLLRRTAFCCNGEKSRAKRSGSGATNFSLLKQAGDVEENPGPTSMDWIWRILFLVGAATGAHSGPQLQLQESGPGLVKPSETLSLTCTVSGDSISSGDYYWGWIRQPPGKGLEWIGHIYYSGVTYYNPSLKSRVTISVDTSRNQFSLKLSSVTAADTAVYYCTREDSSNWRSRGQGTLVTVSSGSGGGGSGGGGSGGGGSFEQVQLQESGPGLVKPSQTLSLTCTVSGGSISSFNYYWSWIRHHPGKGLEWIGYIYYSGSTYSNPSLKSRVTISVDTSKNQFSLTLSSVTAADTAVYYCARGYNWNYFDYWGQGTLVTVSSTRIQNPDPAVYQLRDSKSSDKSVCLFTDFDSQTNVSQSKDSDVYITDKCVLDMRSMDFKSNSAVAWSNKSDFACANAFNNSIIPEDTFFPSPESSDSTDHVKPKETENTKQPSKSCHKPKAIVHTEKVNMMSLTVLGLRMLFAKTVAVNFLLTAKLFFL

SEQ ID NO: 16143 - protein, 995 aa, synthetic construct
MALPVTALLLPLALLLHAARPEVQLVESGGGLVQPGGSLRLSCAASGFSFSDFWMSWVRQAPGKGLEWVATISQAGSEKDYVDSVKGRFTISRDNAKKSLYLQMNSLRAEDTAVYYCASGVYSFDYRGQGTLVTVSSGTGGGGSGGGGSGGGGSEFDDIVLTQSPASLAVSLGQSVTISCRASESVEYYGTSLMQWYQQKPGQPPKLLIYATSNVESGVPARFSGSGSGTDFSLNIHPVEEDDIAMYFCQQSRKLPSTFGGGTKLEIKLEDLKNVFPPEVAVFEPSEAEISHTQKATLVCLATGFYPDHVELSWWVNGKEVHSGVCTDPQPLKEQPALNDSRYCLSSRLRVSATFWQNPRNHFRCQVQFYGLSENDEWTQDRAKPVTQIVSAEAWGRADDVIKIHWQEKKSNTILGSQEGNTMKTNDTYMKFSWLTVPEKSLDKEHRCIVRHENNKNGVDQEIIFPPIKTDVITMDPKDNCSKDANDTLLLQLTNTSAYYMYLLLLLKSVVYFAIITCCLLRRTAFCCNGEKSRAKRSGSGATNFSLLKQAGDVEENPGPTSMDWIWRILFLVGAATGAHSGPQLQLQESGPGLVKPSETLSLTCTVSGDSISSGDYYWGWIRQPPGKGLEWIGHIYYSGVTYYNPSLKSRVTISVDTSRNQFSLKLSSVTAADTAVYYCTREDSSNWRSRGQGTLVTVSSGSGGGGSGGGGSGGGGSFEDVRLQESGPGQVKPSQTVSLTCSVTGYSITNGNHWWNWIRQVSGSKLEWIGYISSSGSTDSNPSLKSRISITRDTSKNQLFLQLNSVTTEDIATYYCARGYYFDYWGQGTTLTVSSTRIQNPDPAVYQLRDSKSSDKSVCLFTDFDSQTNVSQSKDSDVYITDKCVLDMRSMDFKSNSAVAWSNKSDFACANAFNNSIIPEDTFFPSPESSDSTDHVKPKETENTKQPSKSCHKPKAIVHTEKVNMMSLTVLGLRMLFAKTVAVNFLLTAKLFFL

SEQ ID NO: 16144 - protein, 994 aa, synthetic construct
MALPVTALLLPLALLLHAARPEVQLVESGGGLVQPGGSLRLSCAASGFSFSDFWMSWVRQAPGKGLEWVATISQAGSEKDYVDSVKGRFTISRDNAKKSLYLQMNSLRAEDTAVYYCASGVYSFDYRGQGTLVTVSSGTGGGGSGGGGSGGGGSEFDIQMTQSPSSLSASVGDRVTITCRASQDVNTAVAWYQQKPGKAPKLLIYSASFLESGVPSRFSGSRSGTDFTLTISSLQPEDFATYYCQQHYTTPPTFGQTKVEIKRLEDLKNVFPPEVAVFEPSEAEISHTQKATLVCLATGFYPDHVELSWWVNGKEVHSGVCTDPQPLKEQPALNDSRYCLSSRLRVSATFWQNPRNHFRCQVQFYGLSENDEWTQDRAKPVTQIVSAEAWGRADDVIKIHWQEKKSNTILGSQEGNTMKTNDTYMKFSWLTVPEKSLDKEHRCIVRHENNKNGVDQEIIFPPIKTDVITMDPKDNCSKDANDTLLLQLTNTSAYYMYLLLLLKSVVYFAIITCCLLRRTAFCCNGEKSRAKRSGSGATNFSLLKQAGDVEENPGPTSMDWIWRILFLVGAATGAHSGPQLQLQESGPGLVKPSETLSLTCTVSGDSISSGDYYWGWIRQPPGKGLEWIGHIYYSGVTYYNPSLKSRVTISVDTSRNQFSLKLSSVTAADTAVYYCTREDSSNWRSRGQGTLVTVSSGSGGGGSGGGGSGGGGSFEEVQLVESGGGLVQPGGSLRLSCAASGFNIKDTYIHWVRQAPGKGLEWVARIYPTNGYTRYADSVKGRFTISADTSKNTAYLQMNSLRAEDTAVYYCSRWGGDGFYAMDVWGQGTLVTVSSTRIQNPDPAVYQLRDSKSSDKSVCLFTDFDSQTNVSQSKDSDVYITDKCVLDMRSMDFKSNSAVAWSNKSDFACANAFNNSIIPEDTFFPSPESSDSTDHVKPKETENTKQPSKSCHKPKAIVHTEKVNMMSLTVLGLRMLFAKTVAVNFLLTAKLFFL

SEQ ID NO: 16145 - protein, 993 aa, synthetic construct
MALPVTALLLPLALLLHAARPEVQLVESGGGLVQPGGSLRLSCAASGFSFSDFWMSWVRQAPGKGLEWVATISQAGSEKDYVDSVKGRFTISRDNAKKSLYLQMNSLRAEDTAVYYCASGVYSFDYRGQGTLVTVSSGTGGGGSGGGGSGGGGSEFDQSVLTQPPSVSVAPGKTARIPCEGNYIGSSNVHWYQQKPGQAPVLVIHFDSDRPSGIPDRFSGSNSGNMATLTISRVEAGDEADYYCQVWENHGWVFGGGTKLTVLSLEDLKNVFPPEVAVFEPSEAEISHTQKATLVCLATGFYPDHVELSWWVNGKEVHSGVCTDPQPLKEQPALNDSRYCLSSRLRVSATFWQNPRNHFRCQVQFYGLSENDEWTQDRAKPVTQIVSAEAWGRADDVIKIHWQEKKSNTILGSQEGNTMKTNDTYMKFSWLTVPEKSLDKEHRCIVRHENNKNGVDQEIIFPPIKTDVITMDPKDNCSKDANDTLLLQLTNTSAYYMYLLLLLKSVVYFAIITCCLLRRTAFCCNGEKSRAKRSGSGATNFSLLKQAGDVEENPGPTSMDWIWRILFLVGAATGAHSGPQLQLQESGPGLVKPSETLSLTCTVSGDSISSGDYYWGWIRQPPGKGLEWIGHIYYSGVTYYNPSLKSRVTISVDTSRNQFSLKLSSVTAADTAVYYCTREDSSNWRSRGQGTLVTVSSGSGGGGSGGGGSGGGGSFEEVQLVETGGGLVQPGESLRLSCAASGFTFSDYEMNWVRQAPGKGLEWVSYISSSGSTIYYADSVKGRFTIYRDNAKNSLYLQMNSLRAEDTALYYCARAWGVGPPDYWGQGTLVTVSSTRIQNPDPAVYQLRDSKSSDKSVCLFTDFDSQTNVSQSKDSDVYITDKCVLDMRSMDFKSNSAVAWSNKSDFACANAFNNSIIPEDTFFPSPESSDSTDHVKPKETENTKQPSKSCHKPKAIVHTEKVNMMSLTVLGLRMLFAKTVAVNFLLTAKLFFL

SEQ ID NO: 16146 - protein, 1001 aa, synthetic construct
MALPVTALLLPLALLLHAARPEVQLVESGGGLVQPGGSLRLSCAASGFSFSDFWMSWVRQAPGKGLEWVATISQAGSEKDYVDSVKGRFTISRDNAKKSLYLQMNSLRAEDTAVYYCASGVYSFDYRGQGTLVTVSSGTGGGGSGGGGSGGGGSEFDIQMTQSPSSLSASVGDTVTITCQANGYLNWYQQRRGKAPKLLIYDGSKLERGVPSRFSGRRWGQEYNLTINNLQPEDIATYFCQVYEFVVPGTRLDLKRTVAAPLEDLKNVFPPEVAVFEPSEAEISHTQKATLVCLATGFYPDHVELSWWVNGKEVHSGVCTDPQPLKEQPALNDSRYCLSSRLRVSATFWQNPRNHFRCQVQFYGLSENDEWTQDRAKPVTQIVSAEAWGRADDVIKIHWQEKKSNTILGSQEGNTMKTNDTYMKFSWLTVPEKSLDKEHRCIVRHENNKNGVDQEIIFPPIKTDVITMDPKDNCSKDANDTLLLQLTNTSAYYMYLLLLLKSVVYFAIITCCLLRRTAFCCNGEKSRAKRSGSGATNFSLLKQAGDVEENPGPTSMDWIWRILFLVGAATGAHSGPQLQLQESGPGLVKPSETLSLTCTVSGDSISSGDYYWGWIRQPPGKGLEWIGHIYYSGVTYYNPSLKSRVTISVDTSRNQFSLKLSSVTAADTAVYYCTREDSSNWRSRGQGTLVTVSSGSGGGGSGGGGSGGGGSFEQVQLLQSGAAVTKPGASVRVSCEASGYNIRDYFIHWWRQAPGQGLQWVGWINPKTGQPNNPRQFQGRVSLTRHASWDFDTFSFYMDLKALRSDDTAVYFCARQRSDYWDFDVWGSGTQVTVSSASTKGPTRIQNPDPAVYQLRDSKSSDKSVCLFTDFDSQTNVSQSKDSDVYITDKCVLDMRSMDFKSNSAVAWSNKSDFACANAFNNSIIPEDTFFPSPESSDSTDHVKPKETENTKQPSKSCHKPKAIVHTEKVNMMSLTVLGLRMLFAKTVAVNFLLTAKLFFL

SEQ ID NO: 16147 - protein, 1007 aa, synthetic construct
MALPVTALLLPLALLLHAARPEVQLVESGGGLVQPGGSLRLSCAASGFSFSDFWMSWVRQAPGKGLEWVATISQAGSEKDYVDSVKGRFTISRDNAKKSLYLQMNSLRAEDTAVYYCASGVYSFDYRGQGTLVTVSSGTGGGGSGGGGSGGGGSEFQSALTQPPSASGSPGQSITISCTGTSNNFVSWYQQHAGKAPKLVIYDVNKRPSGVPDRFSGSKSGNTASLTVSGLQTDDEAVYYCGSLVGNWDVIFGGGTKLTVLLEDLKNVFPPEVAVFEPSEAEISHTQKATLVCLATGFYPDHVELSWWVNGKEVHSGVCTDPQPLKEQPALNDSRYCLSSRLRVSATFWQNPRNHFRCQVQFYGLSENDEWTQDRAKPVTQIVSAEAWGRADDVIKIHWQEKKSNTILGSQEGNTMKTNDTYMKFSWLTVPEKSLDKEHRCIVRHENNKNGVDQEIIFPPIKTDVITMDPKDNCSKDANDTLLLQLTNTSAYYMYLLLLLKSVVYFAIITCCLLRRTAFCCNGEKSRAKRSGSGATNFSLLKQAGDVEENPGPTSMDWIWRILFLVGAATGAHSGPQLQLQESGPGLVKPSETLSLTCTVSGDSISSGDYYWGWIRQPPGKGLEWIGHIYYSGVTYYNPSLKSRVTISVDTSRNQFSLKLSSVTAADTAVYYCTREDSSNWRSRGQGTLVTVSSGSGGGGSGGGGSGGGGSFEQPQLQESGPTLVEASETLSLTCAVSGDSTAACNSFWGWVRQPPGKGLEWVGSLSHCASYWNRGWTYHNPSLKSRLTLALDTPKNLVFLKLNSVTAADTATYYCARFGGEVLRYTDWPKPAWVDLWGRGTLVTVSSTRIQNPDPAVYQLRDSKSSDKSVCLFTDFDSQTNVSQSKDSDVYITDKCVLDMRSMDFKSNSAVAWSNKSDFACANAFNNSIIPEDTFFPSPESSDSTDHVKPKETENTKQPSKSCHKPKAIVHTEKVNMMSLTVLGLRMLFAKTVAVNFLLTAKLFFL

SEQ ID NO: 16148 - protein, 992 aa, synthetic construct
MALPVTALLLPLALLLHAARPEVQLVESGGGLVQPGGSLRLSCAASGFSFSDFWMSWVRQAPGKGLEWVATISQAGSEKDYVDSVKGRFTISRDNAKKSLYLQMNSLRAEDTAVYYCASGVYSFDYRGQGTLVTVSSGTGGGGSGGGGSGGGGSEFEIVLTQSPGTLSLSPGETAIISCRTSQYGSLAWYQQRPGQAPRLVIYSGSTRAAGIPDRFSGSRWGPDYNLTISNLESGDFGVYYCQQYEFFGQGTKVQVDIKRLEDLKNVFPPEVAVFEPSEAEISHTQKATLVCLATGFYPDHVELSWWVNGKEVHSGVCTDPQPLKEQPALNDSRYCLSSRLRVSATFWQNPRNHFRCQVQFYGLSENDEWTQDRAKPVTQIVSAEAWGRADDVIKIHWQEKKSNTILGSQEGNTMKTNDTYMKFSWLTVPEKSLDKEHRCIVRHENNKNGVDQEIIFPPIKTDVITMDPKDNCSKDANDTLLLQLTNTSAYYMYLLLLLKSVVYFAIITCCLLRRTAFCCNGEKSRAKRSGSGATNFSLLKQAGDVEENPGPTSMDWIWRILFLVGAATGAHSGPQLQLQESGPGLVKPSETLSLTCTVSGDSISSGDYYWGWIRQPPGKGLEWIGHIYYSGVTYYNPSLKSRVTISVDTSRNQFSLKLSSVTAADTAVYYCTREDSSNWRSRGQGTLVTVSSGSGGGGSGGGGSGGGGSFEQVQLVQSGGQMKKPGESMRISCRASGYEFIDCTLNWIRLAPGKRPEWMGWLKPRGGAVNYARPLQGRVTMTRDVYSDTAFLELRSLTVDDTAVYFCTRGKNCDYNWDFEHWGRGTPVIVSSTRIQNPDPAVYQLRDSKSSDKSVCLFTDFDSQTNVSQSKDSDVYITDKCVLDMRSMDFKSNSAVAWSNKSDFACANAFNNSIIPEDTFFPSPESSDSTDHVKPKETENTKQPSKSCHKPKAIVHTEKVNMMSLTVLGLRMLFAKTVAVNFLLTAKLFFL

SEQ ID NO: 16149 - protein, 1002 aa, synthetic construct
MALPVTALLLPLALLLHAARPEVQLVESGGGLVQPGGSLRLSCAASGFSFSDFWMSWVRQAPGKGLEWVATISQAGSEKDYVDSVKGRFTISRDNAKKSLYLQMNSLRAEDTAVYYCASGVYSFDYRGQGTLVTVSSGTGGGGSGGGGSGGGGSEFELVLTQSPGTLSLSAGERATLSCRASQSVSSGSLAWYQQKPGQAPRLLIYGASTRATGIPDRFSGSGSGTDFTLTIGRLEPEDLAVYYCQQYGTSPYTFGQGTKLEILEDLKNVFPPEVAVFEPSEAEISHTQKATLVCLATGFYPDHVELSWWVNGKEVHSGVCTDPQPLKEQPALNDSRYCLSSRLRVSATFWQNPRNHFRCQVQFYGLSENDEWTQDRAKPVTQIVSAEAWGRADDVIKIHWQEKKSNTILGSQEGNTMKTNDTYMKFSWLTVPEKSLDKEHRCIVRHENNKNGVDQEIIFPPIKTDVITMDPKDNCSKDANDTLLLQLTNTSAYYMYLLLLLKSVVYFAIITCCLLRRTAFCCNGEKSRAKRSGSGATNFSLLKQAGDVEENPGPTSMDWIWRILFLVGAATGAHSGPQLQLQESGPGLVKPSETLSLTCTVSGDSISSGDYYWGWIRQPPGKGLEWIGHIYYSGVTYYNPSLKSRVTISVDTSRNQFSLKLSSVTAADTAVYYCTREDSSNWRSRGQGTLVTVSSGSGGGGSGGGGSGGGGSFELEQSGAEVKKPGSSVQVSCKASGGTFSMYGFNWVRQAPGHGLEWMGGIIPIFGTSNYAQKFRGRVTFTADQATSTAYMELTNLRSDDTAVYYCARDFGPDWEDGDSYDGSGRGFFDFWGQGTLVTVSSTRIQNPDPAVYQLRDSKSSDKSVCLFTDFDSQTNVSQSKDSDVYITDKCVLDMRSMDFKSNSAVAWSNKSDFACANAFNNSIIPEDTFFPSPESSDSTDHVKPKETENTKQPSKSCHKPKAIVHTEKVNMMSLTVLGLRMLFAKTVAVNFLLTAKLFFL

SEQ ID NO: 16150 - protein, 982 aa, synthetic construct
MALPVTALLLPLALLLHAARPEVQLVESGGGLVQPGGSLRLSCAASGFSFSDFWMSWVRQAPGKGLEWVATISQAGSEKDYVDSVKGRFTISRDNAKKSLYLQMNSLRAEDTAVYYCASGVYSFDYRGQGTLVTVSSGTGGGGSGGGGSGGGGSEFDIQMTQSPSSLSASVGDRVTITCQASQDINNYLNWYQQKPGKAPKLLIYDASNLQTGVPSRFSGSGSGTDFTFTIEDIATYYCQQYTFGPGTKVDIKLEDLKNVFPPEVAVFEPSEAEISHTQKATLVCLATGFYPDHVELSWWVNGKEVHSGVCTDPQPLKEQPALNDSRYCLSSRLRVSATFWQNPRNHFRCQVQFYGLSENDEWTQDRAKPVTQIVSAEAWGRADDVIKIHWQEKKSNTILGSQEGNTMKTNDTYMKFSWLTVPEKSLDKEHRCIVRHENNKNGVDQEIIFPPIKTDVITMDPKDNCSKDANDTLLLQLTNTSAYYMYLLLLLKSVVYFAIITCCLLRRTAFCCNGEKSRAKRSGSGATNFSLLKQAGDVEENPGPTSMDWIWRILFLVGAATGAHSGPQLQLQESGPGLVKPSETLSLTCTVSGDSISSGDYYWGWIRQPPGKGLEWIGHIYYSGVTYYNPSLKSRVTISVDTSRNQFSLKLSSVTAADTAVYYCTREDSSNWRSRGQGTLVTVSSGSGGGGSGGGGSGGGGSFEEVQLLESGGGLVQPGGSLRLSCAASGFTFSWYSMTWVRQAPGKGLEWVSSIVPWGDFTQYADSVKGRFTISRDNSKNTLYLQMNSLRAEDTAVYYCAKGPGWGSFDLWGRGTLVTVSSTRIQNPDPAVYQLRDSKSSDKSVCLFTDFDSQTNVSQSKDSDVYITDKCVLDMRSMDFKSNSAVAWSNKSDFACANAFNNSIIPEDTFFPSPESSDSTDHVKPKETENTKQPSKSCHKPKAIVHTEKVNMMSLTVLGLRMLFAKTVAVNFLLTAKLFFL

SEQ ID NO: 16151 - protein, 992 aa, synthetic construct
MALPVTALLLPLALLLHAARPEVQLVESGGGLVQPGGSLRLSCAASGFSFSDFWMSWVRQAPGKGLEWVATISQAGSEKDYVDSVKGRFTISRDNAKKSLYLQMNSLRAEDTAVYYCASGVYSFDYRGQGTLVTVSSGTGGGGSGGGGSGGGGSEFDIQMTQSPSSLSASVGDRVTITCTASLSVSSTYLHWYQQKPGSSPKLWIYSTSNLASGVPSRFSGSGSGTSYTLTISSLQPEDFATYYCHQYHRSPLTFGGGTKVEIKRLEDLKNVFPPEVAVFEPSEAEISHTQKATLVCLATGFYPDHVELSWWVNGKEVHSGVCTDPQPLKEQPALNDSRYCLSSRLRVSATFWQNPRNHFRCQVQFYGLSENDEWTQDRAKPVTQIVSAEAWGRADDVIKIHWQEKKSNTILGSQEGNTMKTNDTYMKFSWLTVPEKSLDKEHRCIVRHENNKNGVDQEIIFPPIKTDVITMDPKDNCSKDANDTLLLQLTNTSAYYMYLLLLLKSVVYFAIITCCLLRRTAFCCNGEKSRAKRSGSGATNFSLLKQAGDVEENPGPTSMDWIWRILFLVGAATGAHSGPQLQLQESGPGLVKPSETLSLTCTVSGDSISSGDYYWGWIRQPPGKGLEWIGHIYYSGVTYYNPSLKSRVTISVDTSRNQFSLKLSSVTAADTAVYYCTREDSSNWRSRGQGTLVTVSSGSGGGGSGGGGSGGGGSFEEVQLVESGGGLVQPGGSLRLSCAASGFSLTKYGVHWVRQAPGKGLEWVGVKWAGGSTDYNSALMSRFTISKDNAKNSLYLQMNSLRAEDTAVYYCARDHRDAMDYWGQGTLVTVSSTRIQNPDPAVYQLRDSKSSDKSVCLFTDFDSQTNVSQSKDSDVYITDKCVLDMRSMDFKSNSAVAWSNKSDFACANAFNNSIIPEDTFFPSPESSDSTDHVKPKETENTKQPSKSCHKPKAIVHTEKVNMMSLTVLGLRMLFAKTVAVNFLLTAKLFFL

SEQ ID NO: 16152 - protein, 996 aa, synthetic construct
MALPVTALLLPLALLLHAARPEVQLVESGGGLVQPGGSLRLSCAASGFSFSDFWMSWVRQAPGKGLEWVATISQAGSEKDYVDSVKGRFTISRDNAKKSLYLQMNSLRAEDTAVYYCASGVYSFDYRGQGTLVTVSSGTGGGGSGGGGSGGGGSEFDIQMTQSPSSLSASVGDRVTITCKASQDVGTAVAWYQQKPGKAPKLLIYSASYRSTGVPSRFSGSGSGTDFTLTISSLQPEDFATYYCQHHYSAPWTFGGGTKVEIKLEDLKNVFPPEVAVFEPSEAEISHTQKATLVCLATGFYPDHVELSWWVNGKEVHSGVCTDPQPLKEQPALNDSRYCLSSRLRVSATFWQNPRNHFRCQVQFYGLSENDEWTQDRAKPVTQIVSAEAWGRADDVIKIHWQEKKSNTILGSQEGNTMKTNDTYMKFSWLTVPEKSLDKEHRCIVRHENNKNGVDQEIIFPPIKTDVITMDPKDNCSKDANDTLLLQLTNTSAYYMYLLLLLKSVVYFAIITCCLLRRTAFCCNGEKSRAKRSGSGATNFSLLKQAGDVEENPGPTSMDWIWRILFLVGAATGAHSGPQLQLQESGPGLVKPSETLSLTCTVSGDSISSGDYYWGWIRQPPGKGLEWIGHIYYSGVTYYNPSLKSRVTISVDTSRNQFSLKLSSVTAADTAVYYCTREDSSNWRSRGQGTLVTVSSGSGGGGSGGGGSGGGGSFEEVQLVESGGGLVQPGGSLRLSCAASGFTFSRNGMSWVRQAPGKGLEWVATVSSGGSYIYYADSVKGRFTISRDNAKNSLYLQMNSLRAEDTAVYYCARQGTTALATRFFDVWGQGTLVTVSSTRIQNPDPAVYQLRDSKSSDKSVCLFTDFDSQTNVSQSKDSDVYITDKCVLDMRSMDFKSNSAVAWSNKSDFACANAFNNSIIPEDTFFPSPESSDSTDHVKPKETENTKQPSKSCHKPKAIVHTEKVNMMSLTVLGLRMLFAKTVAVNFLLTAKLFFL

SEQ ID NO: 16153 - protein, 992 aa, synthetic construct
MALPVTALLLPLALLLHAARPEVQLVESGGGLVQPGGSLRLSCAASGFSFSDFWMSWVRQAPGKGLEWVATISQAGSEKDYVDSVKGRFTISRDNAKKSLYLQMNSLRAEDTAVYYCASGVYSFDYRGQGTLVTVSSGTGGGGSGGGGSGGGGSEFDIQMTQSPPSLSASVGGKVTITCKASQDIDRYMAWYQDKPGKGPKLLIHDTSTLQPGIPSRFSGSGSGRDYSFSISNLEPEDIATYYCLQYDNLWTFGGGTKLEIKRLEDLKNVFPPEVAVFEPSEAEISHTQKATLVCLATGFYPDHVELSWWVNGKEVHSGVCTDPQPLKEQPALNDSRYCLSSRLRVSATFWQNPRNHFRCQVQFYGLSENDEWTQDRAKPVTQIVSAEAWGRADDVIKIHWQEKKSNTILGSQEGNTMKTNDTYMKFSWLTVPEKSLDKEHRCIVRHENNKNGVDQEIIFPPIKTDVITMDPKDNCSKDANDTLLLQLTNTSAYYMYLLLLLKSVVYFAIITCCLLRRTAFCCNGEKSRAKRSGSGATNFSLLKQAGDVEENPGPTSMDWIWRILFLVGAATGAHSGPQLQLQESGPGLVKPSETLSLTCTVSGDSISSGDYYWGWIRQPPGKGLEWIGHIYYSGVTYYNPSLKSRVTISVDTSRNQFSLKLSSVTAADTAVYYCTREDSSNWRSRGQGTLVTVSSGSGGGGSGGGGSGGGGSFEQVQLVQSGAELVKPGASVKMSCKASGYIFTNYNIHWVKKSPGQGLEWIGAIYPGNGDAPYSQKFQDRATLTADTSSSTTYMELSSLTSEDSAVYYCVRANWDVAFAYWGQGTLVSVSSTRIQNPDPAVYQLRDSKSSDKSVCLFTDFDSQTNVSQSKDSDVYITDKCVLDMRSMDFKSNSAVAWSNKSDFACANAFNNSIIPEDTFFPSPESSDSTDHVKPKETENTKQPSKSCHKPKAIVHTEKVNMMSLTVLGLRMLFAKTVAVNFLLTAKLFFL

SEQ ID NO: 16154 - protein, 993 aa, synthetic construct
MALPVTALLLPLALLLHAARPEVQLVESGGGLVQPGGSLRLSCAASGFSFSDFWMSWVRQAPGKGLEWVATISQAGSEKDYVDSVKGRFTISRDNAKKSLYLQMNSLRAEDTAVYYCASGVYSFDYRGQGTLVTVSSGTGGGGSGGGGSGGGGSEFDIQMTQSPASLSASVGETVTITCRVSGNIHNYLAWYQQKQGKSPQLLVYNAKTLADGVPSRFSGSGSGTQYSLKINSLQPEDFGSYYCQHFWSNPYTFGGGTKLEIKLEDLKNVFPPEVAVFEPSEAEISHTQKATLVCLATGFYPDHVELSWWVNGKEVHSGVCTDPQPLKEQPALNDSRYCLSSRLRVSATFWQNPRNHFRCQVQFYGLSENDEWTQDRAKPVTQIVSAEAWGRADDVIKIHWQEKKSNTILGSQEGNTMKTNDTYMKFSWLTVPEKSLDKEHRCIVRHENNKNGVDQEIIFPPIKTDVITMDPKDNCSKDANDTLLLQLTNTSAYYMYLLLLLKSVVYFAIITCCLLRRTAFCCNGEKSRAKRSGSGATNFSLLKQAGDVEENPGPTSMDWIWRILFLVGAATGAHSGPQLQLQESGPGLVKPSETLSLTCTVSGDSISSGDYYWGWIRQPPGKGLEWIGHIYYSGVTYYNPSLKSRVTISVDTSRNQFSLKLSSVTAADTAVYYCTREDSSNWRSRGQGTLVTVSSGSGGGGSGGGGSGGGGSFEQVQLQQSGASVKVSCKASELVRPGTGYAFTNYLIEWVKQRPGQGLEWIGVINPGSGGTNYNEKFKGKATLTADKSSSTAYMQLSSLTSDDSAVYFCARYRSYDWYFDVWGAGTTVTVSSTRIQNPDPAVYQLRDSKSSDKSVCLFTDFDSQTNVSQSKDSDVYITDKCVLDMRSMDFKSNSAVAWSNKSDFACANAFNNSIIPEDTFFPSPESSDSTDHVKPKETENTKQPSKSCHKPKAIVHTEKVNMMSLTVLGLRMLFAKTVAVNFLLTAKLFFL

SEQ ID NO: 16155 - protein, 992 aa, synthetic construct
MALPVTALLLPLALLLHAARPEVQLVESGGGLVQPGGSLRLSCAASGFSFSDFWMSWVRQAPGKGLEWVATISQAGSEKDYVDSVKGRFTISRDNAKKSLYLQMNSLRAEDTAVYYCASGVYSFDYRGQGTLVTVSSGTGGGGSGGGGSGGGGSEFDIQMTQSFSSLSASVGDRVTITCRASQDISNYLNWYQQKPGKAPKLLIYYTSRLHSGVPSRFSGSGSGTDYTLTISSLQPEDFATYFCQQGNTLPWTFGGGTKLEIKRLEDLKNVFPPEVAVFEPSEAEISHTQKATLVCLATGFYPDHVELSWWVNGKEVHSGVCTDPQPLKEQPALNDSRYCLSSRLRVSATFWQNPRNHFRCQVQFYGLSENDEWTQDRAKPVTQIVSAEAWGRADDVIKIHWQEKKSNTILGSQEGNTMKTNDTYMKFSWLTVPEKSLDKEHRCIVRHENNKNGVDQEIIFPPIKTDVITMDPKDNCSKDANDTLLLQLTNTSAYYMYLLLLLKSVVYFAIITCCLLRRTAFCCNGEKSRAKRSGSGATNFSLLKQAGDVEENPGPTSMDWIWRILFLVGAATGAHSGPQLQLQESGPGLVKPSETLSLTCTVSGDSISSGDYYWGWIRQPPGKGLEWIGHIYYSGVTYYNPSLKSRVTISVDTSRNQFSLKLSSVTAADTAVYYCTREDSSNWRSRGQGTLVTVSSGSGGGGSGGGGSGGGGSFEEVQLVQSGGGLVQSGGSLRLSCRASGYTFTRYWMLWVRQRPGKGLEWVAEINPRNDRTNYNEKFKTRFTISVDRSKNTLYLQMDSLRAEDTAVYFCALGGGYAMDYWGQGTLVTVSSTRIQNPDPAVYQLRDSKSSDKSVCLFTDFDSQTNVSQSKDSDVYITDKCVLDMRSMDFKSNSAVAWSNKSDFACANAFNNSIIPEDTFFPSPESSDSTDHVKPKETENTKQPSKSCHKPKAIVHTEKVNMMSLTVLGLRMLFAKTVAVNFLLTAKLFFL

SEQ ID NO: 16156 - protein, 993 aa, synthetic construct
MALPVTALLLPLALLLHAARPEVQLVESGGGLVQPGGSLRLSCAASGFSFSDFWMSWVRQAPGKGLEWVATISQAGSEKDYVDSVKGRFTISRDNAKKSLYLQMNSLRAEDTAVYYCASGVYSFDYRGQGTLVTVSSGTGGGGSGGGGSGGGGSEFDIQMTQSPASLSASVGETVTIICRASVNIYSYLAWYQQKQGKSPQLLVYNAKILAEGVPSRFSGSGSGTQFSLKINSLQPEDFGSYYCQHHYGTFTFGSGTKLEIKRLEDLKNVFPPEVAVFEPSEAEISHTQKATLVCLATGFYPDHVELSWWVNGKEVHSGVCTDPQPLKEQPALNDSRYCLSSRLRVSATFWQNPRNHFRCQVQFYGLSENDEWTQDRAKPVTQIVSAEAWGRADDVIKIHWQEKKSNTILGSQEGNTMKTNDTYMKFSWLTVPEKSLDKEHRCIVRHENNKNGVDQEIIFPPIKTDVITMDPKDNCSKDANDTLLLQLTNTSAYYMYLLLLLKSVVYFAIITCCLLRRTAFCCNGEKSRAKRSGSGATNFSLLKQAGDVEENPGPTSMDWIWRILFLVGAATGAHSGPQLQLQESGPGLVKPSETLSLTCTVSGDSISSGDYYWGWIRQPPGKGLEWIGHIYYSGVTYYNPSLKSRVTISVDTSRNQFSLKLSSVTAADTAVYYCTREDSSNWRSRGQGTLVTVSSGSGGGGSGGGGSGGGGSFEQVQLKESGPGLVAPSQSLSITCTISGFSLTSYGVHWVRQPPGKGLEWLVVIWSDGSTTYNSALKSRLSISKDNSKSQVFLKMNSLQTDDTAIYYCASHYGSTLAFASWGHGTLVTVSAATRIQNPDPAVYQLRDSKSSDKSVCLFTDFDSQTNVSQSKDSDVYITDKCVLDMRSMDFKSNSAVAWSNKSDFACANAFNNSIIPEDTFFPSPESSDSTDHVKPKETENTKQPSKSCHKPKAIVHTEKVNMMSLTVLGLRMLFAKTVAVNFLLTAKLFFL

SEQ ID NO: 16157 - protein, 1001 aa, synthetic construct
MALPVTALLLPLALLLHAARPEVQLVESGGGLVQPGGSLRLSCAASGFSFSDFWMSWVRQAPGKGLEWVATISQAGSEKDYVDSVKGRFTISRDNAKKSLYLQMNSLRAEDTAVYYCASGVYSFDYRGQGTLVTVSSGTGGGGSGGGGSGGGGSEFDIVMTQSHKFMSTSVGDRVSVTCKASQNVGNNVAWYQQKPGQSPKVLIYSASYRYSGVPDRFTGSGSGTDFTLTISNVQSEDLAEYFCQQYNTYPFTFGSGTKLEIKLEDLKNVFPPEVAVFEPSEAEISHTQKATLVCLATGFYPDHVELSWWVNGKEVHSGVCTDPQPLKEQPALNDSRYCLSSRLRVSATFWQNPRNHFRCQVQFYGLSENDEWTQDRAKPVTQIVSAEAWGRADDVIKIHWQEKKSNTILGSQEGNTMKTNDTYMKFSWLTVPEKSLDKEHRCIVRHENNKNGVDQEIIFPPIKTDVITMDPKDNCSKDANDTLLLQLTNTSAYYMYLLLLLKSVVYFAIITCCLLRRTAFCCNGEKSRAKRSGSGATNFSLLKQAGDVEENPGPTSMDWIWRILFLVGAATGAHSGPQLQLQESGPGLVKPSETLSLTCTVSGDSISSGDYYWGWIRQPPGKGLEWIGHIYYSGVTYYNPSLKSRVTISVDTSRNQFSLKLSSVTAADTAVYYCTREDSSNWRSRGQGTLVTVSSGSGGGGSGGGGSGGGGSFEEVQLEESGGGLVQPGGSMKLSCVASGFTFSNYWMNWVRQSPEKGLEWVAEIRFKSHNYATHFAESVKGRFTISRDDSKSSVYLQMNNLRAEDTGIYYCTRRIGNSDYDWWYFDVWGAGTSVTVSSASTRIQNPDPAVYQLRDSKSSDKSVCLFTDFDSQTNVSQSKDSDVYITDKCVLDMRSMDFKSNSAVAWSNKSDFACANAFNNSIIPEDTFFPSPESSDSTDHVKPKETENTKQPSKSCHKPKAIVHTEKVNMMSLTVLGLRMLFAKTVAVNFLLTAKLFFL

SEQ ID NO: 16158 - protein, 994 aa, synthetic construct
MALPVTALLLPLALLLHAARPEVQLVESGGGLVQPGGSLRLSCAASGFSFSDFWMSWVRQAPGKGLEWVATISQAGSEKDYVDSVKGRFTISRDNAKKSLYLQMNSLRAEDTAVYYCASGVYSFDYRGQGTLVTVSSGTGGGGSGGGGSGGGGSEFDQIVLTQSPAIMSASPGEKVTISCSASSSVSYMYWYQQKPGSSPKPWIYRTSNLASGVPARFSGSGSGTSYSLTISNMEAEDAAAYYCQQYHSYPTTFGGGTKLEVKLEDLKNVFPPEVAVFEPSEAEISHTQKATLVCLATGFYPDHVELSWWVNGKEVHSGVCTDPQPLKEQPALNDSRYCLSSRLRVSATFWQNPRNHFRCQVQFYGLSENDEWTQDRAKPVTQIVSAEAWGRADDVIKIHWQEKKSNTILGSQEGNTMKTNDTYMKFSWLTVPEKSLDKEHRCIVRHENNKNGVDQEIIFPPIKTDVITMDPKDNCSKDANDTLLLQLTNTSAYYMYLLLLLKSVVYFAIITCCLLRRTAFCCNGEKSRAKRSGSGATNFSLLKQAGDVEENPGPTSMDWIWRILFLVGAATGAHSGPQLQLQESGPGLVKPSETLSLTCTVSGDSISSGDYYWGWIRQPPGKGLEWIGHIYYSGVTYYNPSLKSRVTISVDTSRNQFSLKLSSVTAADTAVYYCTREDSSNWRSRGQGTLVTVSSGSGGGGSGGGGSGGGGSFEEVQLVESGGGLVQPKGSLKLSCAASGFSFNTYAMNWVRQAPGKGLEWIAHIRSKSNNFATYYADSVKDRFSISRDASENILFLQMNNLKTEDTAMYYCVRQGGDFPMDYWGQGTSVTVSSTRIQNPDPAVYQLRDSKSSDKSVCLFTDFDSQTNVSQSKDSDVYITDKCVLDMRSMDFKSNSAVAWSNKSDFACANAFNNSIIPEDTFFPSPESSDSTDHVKPKETENTKQPSKSCHKPKAIVHTEKVNMMSLTVLGLRMLFAKTVAVNFLLTAKLFFL

SEQ ID NO: 16159 - protein, 993 aa, synthetic construct
MALPVTALLLPLALLLHAARPEVQLVESGGGLVQPGGSLRLSCAASGFSFSDFWMSWVRQAPGKGLEWVATISQAGSEKDYVDSVKGRFTISRDNAKKSLYLQMNSLRAEDTAVYYCASGVYSFDYRGQGTLVTVSSGTGGGGSGGGGSGGGGSEFDDIQMTQSSSSFSVSLGDRVTITCMASEDIYIRLAWYQQKPGNAPRLLISAATSLETGVPSRFSGSGSGKDYTLSITSLQTEDVGTYYCQQYWSSPWTFGGGTKLEINLEDLKNVFPPEVAVFEPSEAEISHTQKATLVCLATGFYPDHVELSWWVNGKEVHSGVCTDPQPLKEQPALNDSRYCLSSRLRVSATFWQNPRNHFRCQVQFYGLSENDEWTQDRAKPVTQIVSAEAWGRADDVIKIHWQEKKSNTILGSQEGNTMKTNDTYMKFSWLTVPEKSLDKEHRCIVRHENNKNGVDQEIIFPPIKTDVITMDPKDNCSKDANDTLLLQLTNTSAYYMYLLLLLKSVVYFAIITCCLLRRTAFCCNGEKSRAKRSGSGATNFSLLKQAGDVEENPGPTSMDWIWRILFLVGAATGAHSGPQLQLQESGPGLVKPSETLSLTCTVSGDSISSGDYYWGWIRQPPGKGLEWIGHIYYSGVTYYNPSLKSRVTISVDTSRNQFSLKLSSVTAADTAVYYCTREDSSNWRSRGQGTLVTVSSGSGGGGSGGGGSGGGGSFEDVQLQESGPGLVKPSQSLSLTCTVTGYSITSDYTWNWIRQFPGNKLEWMGYITYSGSTSYNPSLKSRNSITRDTSKNQFFLQLNSVTTEDTATYYCARLGRRYTMDYWGQGTSVTVSSTRIQNPDPAVYQLRDSKSSDKSVCLFTDFDSQTNVSQSKDSDVYITDKCVLDMRSMDFKSNSAVAWSNKSDFACANAFNNSIIPEDTFFPSPESSDSTDHVKPKETENTKQPSKSCHKPKAIVHTEKVNMMSLTVLGLRMLFAKTVAVNFLLTAKLFFL

SEQ ID NO: 16160 - protein, 996 aa, synthetic construct
MALPVTALLLPLALLLHAARPEVQLVESGGGLVQPGGSLRLSCAASGFSFSDFWMSWVRQAPGKGLEWVATISQAGSEKDYVDSVKGRFTISRDNAKKSLYLQMNSLRAEDTAVYYCASGVYSFDYRGQGTLVTVSSGTGGGGSGGGGSGGGGSEFDDIQMTQSPSSLSASVGDRVTITCRASQSISSYLNWYQQKPGKAPKLLIYDASNLETGVPSRFSGSGSGTDFTFTISSLQPEDIATYYCQQYDNLPLTFGGGTKVDIKRLEDLKNVFPPEVAVFEPSEAEISHTQKATLVCLATGFYPDHVELSWWVNGKEVHSGVCTDPQPLKEQPALNDSRYCLSSRLRVSATFWQNPRNHFRCQVQFYGLSENDEWTQDRAKPVTQIVSAEAWGRADDVIKIHWQEKKSNTILGSQEGNTMKTNDTYMKFSWLTVPEKSLDKEHRCIVRHENNKNGVDQEIIFPPIKTDVITMDPKDNCSKDANDTLLLQLTNTSAYYMYLLLLLKSVVYFAIITCCLLRRTAFCCNGEKSRAKRSGSGATNFSLLKQAGDVEENPGPTSMDWIWRILFLVGAATGAHSGPQLQLQESGPGLVKPSETLSLTCTVSGDSISSGDYYWGWIRQPPGKGLEWIGHIYYSGVTYYNPSLKSRVTISVDTSRNQFSLKLSSVTAADTAVYYCTREDSSNWRSRGQGTLVTVSSGSGGGGSGGGGSGGGGSFEQVQLVESGGGVVQPGRSLRLSCAASGFTFSSYAMHWVRQAPGKGLEWVAVISYDGSNKYYADSVKGRFTISRDNSKNTLYLQMNSLRAEDTAVYYCARAHNSSSWSFDYWGQGTLVTVSSTRIQNPDPAVYQLRDSKSSDKSVCLFTDFDSQTNVSQSKDSDVYITDKCVLDMRSMDFKSNSAVAWSNKSDFACANAFNNSIIPEDTFFPSPESSDSTDHVKPKETENTKQPSKSCHKPKAIVHTEKVNMMSLTVLGLRMLFAKTVAVNFLLTAKLFFL

SEQ ID NO: 16161 - protein, 1005 aa, synthetic construct
MALPVTALLLPLALLLHAARPEVQLVESGGGLVQPGGSLRLSCAASGFSFSDFWMSWVRQAPGKGLEWVATISQAGSEKDYVDSVKGRFTISRDNAKKSLYLQMNSLRAEDTAVYYCASGVYSFDYRGQGTLVTVSSGTGGGGSGGGGSGGGGSEFDDVVMTQSPLSLPVSLGDQASISCRSSQRLVHSNGNTYLHWYLQKPGQSPKLLIYRVSNRFPGVPDRFSGSGSGTDFTLKISRVEAEDLGIYFCSQSTHVPYTFGGGTKLEIKRLEDLKNVFPPEVAVFEPSEAEISHTQKATLVCLATGFYPDHVELSWWVNGKEVHSGVCTDPQPLKEQPALNDSRYCLSSRLRVSATFWQNPRNHFRCQVQFYGLSENDEWTQDRAKPVTQIVSAEAWGRADDVIKIHWQEKKSNTILGSQEGNTMKTNDTYMKFSWLTVPEKSLDKEHRCIVRHENNKNGVDQEIIFPPIKTDVITMDPKDNCSKDANDTLLLQLTNTSAYYMYLLLLLKSVVYFAIITCCLLRRTAFCCNGEKSRAKRSGSGATNFSLLKQAGDVEENPGPTSMDWIWRILFLVGAATGAHSGPQLQLQESGPGLVKPSETLSLTCTVSGDSISSGDYYWGWIRQPPGKGLEWIGHIYYSGVTYYNPSLKSRVTISVDTSRNQFSLKLSSVTAADTAVYYCTREDSSNWRSRGQGTLVTVSSGSGGGGSGGGGSGGGGSFEEVRLQQSGPDLIKPGASVKMSCKASGYTFTGYVMHWVKQRPGQGLEWIGFINPYNDDIQSNERFRGKATLTSDKSSTTAYMELSSLTSEDSAVYYCARGAGYNFDGAYRFFDFWGQGTTLTVSSTRIQNPDPAVYQLRDSKSSDKSVCLFTDFDSQTNVSQSKDSDVYITDKCVLDMRSMDFKSNSAVAWSNKSDFACANAFNNSIIPEDTFFPSPESSDSTDHVKPKETENTKQPSKSCHKPKAIVHTEKVNMMSLTVLGLRMLFAKTVAVNFLLTAKLFFL

SEQ ID NO: 16162 - protein, 996 aa, synthetic construct
MALPVTALLLPLALLLHAARPEVQLVESGGGLVQPGGSLRLSCAASGFSFSDFWMSWVRQAPGKGLEWVATISQAGSEKDYVDSVKGRFTISRDNAKKSLYLQMNSLRAEDTAVYYCASGVYSFDYRGQGTLVTVSSGTGGGGSGGGGSGGGGSEFDSYELTQPPSVSVSPGQTATISCSGDQLGGKYGHWYQKKPGQSPVLVLYQDRKRPAGIPERFSGSSSGNTITLTISGTQAVDEADYYCQAWDTNLGGVFGGGTKVTVLGQLEDLKNVFPPEVAVFEPSEAEISHTQKATLVCLATGFYPDHVELSWWVNGKEVHSGVCTDPQPLKEQPALNDSRYCLSSRLRVSATFWQNPRNHFRCQVQFYGLSENDEWTQDRAKPVTQIVSAEAWGRADDVIKIHWQEKKSNTILGSQEGNTMKTNDTYMKFSWLTVPEKSLDKEHRCIVRHENNKNGVDQEIIFPPIKTDVITMDPKDNCSKDANDTLLLQLTNTSAYYMYLLLLLKSVVYFAIITCCLLRRTAFCCNGEKSRAKRSGSGATNFSLLKQAGDVEENPGPTSMDWIWRILFLVGAATGAHSGPQLQLQESGPGLVKPSETLSLTCTVSGDSISSGDYYWGWIRQPPGKGLEWIGHIYYSGVTYYNPSLKSRVTISVDTSRNQFSLKLSSVTAADTAVYYCTREDSSNWRSRGQGTLVTVSSGSGGGGSGGGGSGGGGSFEQVQLVESGAEVKKPGASVKVSCKASGYTFTGYYMHWVRQAPGQGLEWMGRINPNSGGTNYAQKFQGRVTMTRDTSISTAYMELSRLRSDDTAVYYCASPRGRGSAFDIWGQGTLVTVSSTRIQNPDPAVYQLRDSKSSDKSVCLFTDFDSQTNVSQSKDSDVYITDKCVLDMRSMDFKSNSAVAWSNKSDFACANAFNNSIIPEDTFFPSPESSDSTDHVKPKETENTKQPSKSCHKPKAIVHTEKVNMMSLTVLGLRMLFAKTVAVNFLLTAKLFFL

SEQ ID NO: 16163 - protein, 999 aa, synthetic construct
MALPVTALLLPLALLLHAARPEVQLVESGGGLVQPGGSLRLSCAASGFSFSDFWMSWVRQAPGKGLEWVATISQAGSEKDYVDSVKGRFTISRDNAKKSLYLQMNSLRAEDTAVYYCASGVYSFDYRGQGTLVTVSSGTGGGGSGGGGSGGGGSEFDNFMLTQPHSVSESPGKTVTISCTRSSGSIASKYVQWYQQRPGSSPTTVIYEDNQRPSGVPDRFSGSIDTSSNSASLTISGLRTEDEADYYCHSYDSNNHSVFGGGTKVTVLGQLEDLKNVFPPEVAVFEPSEAEISHTQKATLVCLATGFYPDHVELSWWVNGKEVHSGVCTDPQPLKEQPALNDSRYCLSSRLRVSATFWQNPRNHFRCQVQFYGLSENDEWTQDRAKPVTQIVSAEAWGRADDVIKIHWQEKKSNTILGSQEGNTMKTNDTYMKFSWLTVPEKSLDKEHRCIVRHENNKNGVDQEIIFPPIKTDVITMDPKDNCSKDANDTLLLQLTNTSAYYMYLLLLLKSVVYFAIITCCLLRRTAFCCNGEKSRAKRSGSGATNFSLLKQAGDVEENPGPTSMDWIWRILFLVGAATGAHSGPQLQLQESGPGLVKPSETLSLTCTVSGDSISSGDYYWGWIRQPPGKGLEWIGHIYYSGVTYYNPSLKSRVTISVDTSRNQFSLKLSSVTAADTAVYYCTREDSSNWRSRGQGTLVTVSSGSGGGGSGGGGSGGGGSFEEVQLVESGGGVVQPGGSLRLSCAASGFTFSSYAMSWVRQAPGKGLEWVSAISGSGGSTYYADSVKGRFSISRDNSKNTLYLQMNSLRAEDTAVYYCARTRSSGAFDIWGQGTLVTVSSTRIQNPDPAVYQLRDSKSSDKSVCLFTDFDSQTNVSQSKDSDVYITDKCVLDMRSMDFKSNSAVAWSNKSDFACANAFNNSIIPEDTFFPSPESSDSTDHVKPKETENTKQPSKSCHKPKAIVHTEKVNMMSLTVLGLRMLFAKTVAVNFLLTAKLFFL

SEQ ID NO: 16164 - protein, 994 aa, synthetic construct
MALPVTALLLPLALLLHAARPEVQLVESGGGLVQPGGSLRLSCAASGFSFSDFWMSWVRQAPGKGLEWVATISQAGSEKDYVDSVKGRFTISRDNAKKSLYLQMNSLRAEDTAVYYCASGVYSFDYRGQGTLVTVSSGTGGGGSGGGGSGGGGSEFDIQMNQSPSSLSASLGDTITITCHASQNINVWLSWYQQKPGNIPKLLIYKASNLHTGVPSRFSGSGSGTGFTITISSLQPEDIATYYCQQGQSYPWTFGGGTKLEIKRLEDLKNVFPPEVAVFEPSEAEISHTQKATLVCLATGFYPDHVELSWWVNGKEVHSGVCTDPQPLKEQPALNDSRYCLSSRLRVSATFWQNPRNHFRCQVQFYGLSENDEWTQDRAKPVTQIVSAEAWGRADDVIKIHWQEKKSNTILGSQEGNTMKTNDTYMKFSWLTVPEKSLDKEHRCIVRHENNKNGVDQEIIFPPIKTDVITMDPKDNCSKDANDTLLLQLTNTSAYYMYLLLLLKSVVYFAIITCCLLRRTAFCCNGEKSRAKRSGSGATNFSLLKQAGDVEENPGPTSMDWIWRILFLVGAATGAHSGPQLQLQESGPGLVKPSETLSLTCTVSGDSISSGDYYWGWIRQPPGKGLEWIGHIYYSGVTYYNPSLKSRVTISVDTSRNQFSLKLSSVTAADTAVYYCTREDSSNWRSRGQGTLVTVSSGSGGGGSGGGGSGGGGSFEEVQLQQSGPELVKPGASVKISCKASGYSFTGYFMNWVKQSHGKSLEYIGRFNPYNGETLYNQKFKGKATLTVDKSSSTVHMELLSVTSEDSAVYYCGRSGNDDAMDYWGQGTSVTVSSATRIQNPDPAVYQLRDSKSSDKSVCLFTDFDSQTNVSQSKDSDVYITDKCVLDMRSMDFKSNSAVAWSNKSDFACANAFNNSIIPEDTFFPSPESSDSTDHVKPKETENTKQPSKSCHKPKAIVHTEKVNMMSLTVLGLRMLFAKTVAVNFLLTAKLFFL

SEQ ID NO: 16165 - protein, 995 aa, synthetic construct
MALPVTALLLPLALLLHAARPEVQLVESGGGLVQPGGSLRLSCAASGFSFSDFWMSWVRQAPGKGLEWVATISQAGSEKDYVDSVKGRFTISRDNAKKSLYLQMNSLRAEDTAVYYCASGVYSFDYRGQGTLVTVSSGTGGGGSGGGGSGGGGSEFEIVLTQSPATLSLSPGERATLSCRASQSVRSYLAWYQQKPGQAPRLLIYDASNRATGIPARFSGSGSGTDFTLTISSLEPEDFAVYYCQQRSNWPPTFGQGTKVEIKLEDLKNVFPPEVAVFEPSEAEISHTQKATLVCLATGFYPDHVELSWWVNGKEVHSGVCTDPQPLKEQPALNDSRYCLSSRLRVSATFWQNPRNHFRCQVQFYGLSENDEWTQDRAKPVTQIVSAEAWGRADDVIKIHWQEKKSNTILGSQEGNTMKTNDTYMKFSWLTVPEKSLDKEHRCIVRHENNKNGVDQEIIFPPIKTDVITMDPKDNCSKDANDTLLLQLTNTSAYYMYLLLLLKSVVYFAIITCCLLRRTAFCCNGEKSRAKRSGSGATNFSLLKQAGDVEENPGPTSMDWIWRILFLVGAATGAHSGPQLQLQESGPGLVKPSETLSLTCTVSGDSISSGDYYWGWIRQPPGKGLEWIGHIYYSGVTYYNPSLKSRVTISVDTSRNQFSLKLSSVTAADTAVYYCTREDSSNWRSRGQGTLVTVSSGSGGGGSGGGGSGGGGSFEQLQVQESGPGLVKPSETLSLTCTVSGGSISNSYFSWGWIRQPPGKGLEWIGSFYYGEKTYYNPSLKSRATISIDTSKSQFSLKLSSVTAADTAVYYCPRGPTMIRGVIDSWGQGTLVTVSSTRIQNPDPAVYQLRDSKSSDKSVCLFTDFDSQTNVSQSKDSDVYITDKCVLDMRSMDFKSNSAVAWSNKSDFACANAFNNSIIPEDTFFPSPESSDSTDHVKPKETENTKQPSKSCHKPKAIVHTEKVNMMSLTVLGLRMLFAKTVAVNFLLTAKLFFL

SEQ ID NO: 16166 - protein, 1004 aa, synthetic construct
MALPVTALLLPLALLLHAARPEVQLVESGGGLVQPGGSLRLSCAASGFSFSDFWMSWVRQAPGKGLEWVATISQAGSEKDYVDSVKGRFTISRDNAKKSLYLQMNSLRAEDTAVYYCASGVYSFDYRGQGTLVTVSSGTGGGGSGGGGSGGGGSEFDIVMTQTPLSLPVTPGEPASISCRSSRSLLDSDDGNTYLDWYLQKPGQSPQLLIYTLSYRASGVPDRFSGSGSGTDFTLKISRVEAEDVGVYYCMQRVEFPITFGQGTRLEIKRLEDLKNVFPPEVAVFEPSEAEISHTQKATLVCLATGFYPDHVELSWWVNGKEVHSGVCTDPQPLKEQPALNDSRYCLSSRLRVSATFWQNPRNHFRCQVQFYGLSENDEWTQDRAKPVTQIVSAEAWGRADDVIKIHWQEKKSNTILGSQEGNTMKTNDTYMKFSWLTVPEKSLDKEHRCIVRHENNKNGVDQEIIFPPIKTDVITMDPKDNCSKDANDTLLLQLTNTSAYYMYLLLLLKSVVYFAIITCCLLRRTAFCCNGEKSRAKRSGSGATNFSLLKQAGDVEENPGPTSMDWIWRILFLVGAATGAHSGPQLQLQESGPGLVKPSETLSLTCTVSGDSISSGDYYWGWIRQPPGKGLEWIGHIYYSGVTYYNPSLKSRVTISVDTSRNQFSLKLSSVTAADTAVYYCTREDSSNWRSRGQGTLVTVSSGSGGGGSGGGGSGGGGSFEQVQLVESGGGVVQPGRSLRLSCAASGFIFSRYGMHWVRQAPGKGLKWVAVIWYDGSNKLYADSVKGRFTISRDNSKNTLYLQMNSLRAEDTAVYYCARDYYDNSRHHWGFDYWGQGTLVTVSSTRIQNPDPAVYQLRDSKSSDKSVCLFTDFDSQTNVSQSKDSDVYITDKCVLDMRSMDFKSNSAVAWSNKSDFACANAFNNSIIPEDTFFPSPESSDSTDHVKPKETENTKQPSKSCHKPKAIVHTEKVNMMSLTVLGLRMLFAKTVAVNFLLTAKLFFL

SEQ ID NO: 16167 - protein, 994 aa, synthetic construct
MALPVTALLLPLALLLHAARPEVQLVESGGGLVQPGGSLRLSCAASGFSFSDFWMSWVRQAPGKGLEWVATISQAGSEKDYVDSVKGRFTISRDNAKKSLYLQMNSLRAEDTAVYYCASGVYSFDYRGQGTLVTVSSGTGGGGSGGGGSGGGGSEFEIQMTQSPSSMSASLGDTITITCQATQDIFKNLNWYQQKPGKPPSLLIYYATELAEGVPSRFSGSGSGSDYSLTISNLESEDFAAYYCLQFFEFPFTFGSGTKLEMKLEDLKNVFPPEVAVFEPSEAEISHTQKATLVCLATGFYPDHVELSWWVNGKEVHSGVCTDPQPLKEQPALNDSRYCLSSRLRVSATFWQNPRNHFRCQVQFYGLSENDEWTQDRAKPVTQIVSAEAWGRADDVIKIHWQEKKSNTILGSQEGNTMKTNDTYMKFSWLTVPEKSLDKEHRCIVRHENNKNGVDQEIIFPPIKTDVITMDPKDNCSKDANDTLLLQLTNTSAYYMYLLLLLKSVVYFAIITCCLLRRTAFCCNGEKSRAKRSGSGATNFSLLKQAGDVEENPGPTSMDWIWRILFLVGAATGAHSGPQLQLQESGPGLVKPSETLSLTCTVSGDSISSGDYYWGWIRQPPGKGLEWIGHIYYSGVTYYNPSLKSRVTISVDTSRNQFSLKLSSVTAADTAVYYCTREDSSNWRSRGQGTLVTVSSGSGGGGSGGGGSGGGGSFEQVQLQQSGAELVRPGTSVKVSCKASGYVFTNYWIEWIKQRPGQGLEWIGVMNPGSGETTYNEKFKGKATLTADKSSSTAYMQLSSLTSVDSAVYFCARDHDRDYYAMDYWGQGTSVTVSSTRIQNPDPAVYQLRDSKSSDKSVCLFTDFDSQTNVSQSKDSDVYITDKCVLDMRSMDFKSNSAVAWSNKSDFACANAFNNSIIPEDTFFPSPESSDSTDHVKPKETENTKQPSKSCHKPKAIVHTEKVNMMSLTVLGLRMLFAKTVAVNFLLTAKLFFL

SEQ ID NO: 16168 - protein, 991 aa, synthetic construct
MALPVTALLLPLALLLHAARPEVQLVESGGGLVQPGGSLRLSCAASGFSFSDFWMSWVRQAPGKGLEWVATISQAGSEKDYVDSVKGRFTISRDNAKKSLYLQMNSLRAEDTAVYYCASGVYSFDYRGQGTLVTVSSGTGGGGSGGGGSGGGGSEFDILLTQSPAILSVSPGERVSFSCRASQNIGTSIHWYQQRTNGSPRLLIKYASESVSGIPSRFSGSGSGTDFTLSINSVESEDIADYYCQHTNSWPTTFGGGTKLEIKRLEDLKNVFPPEVAVFEPSEAEISHTQKATLVCLATGFYPDHVELSWWVNGKEVHSGVCTDPQPLKEQPALNDSRYCLSSRLRVSATFWQNPRNHFRCQVQFYGLSENDEWTQDRAKPVTQIVSAEAWGRADDVIKIHWQEKKSNTILGSQEGNTMKTNDTYMKFSWLTVPEKSLDKEHRCIVRHENNKNGVDQEIIFPPIKTDVITMDPKDNCSKDANDTLLLQLTNTSAYYMYLLLLLKSVVYFAIITCCLLRRTAFCCNGEKSRAKRSGSGATNFSLLKQAGDVEENPGPTSMDWIWRILFLVGAATGAHSGPQLQLQESGPGLVKPSETLSLTCTVSGDSISSGDYYWGWIRQPPGKGLEWIGHIYYSGVTYYNPSLKSRVTISVDTSRNQFSLKLSSVTAADTAVYYCTREDSSNWRSRGQGTLVTVSSGSGGGGSGGGGSGGGGSFEQVQLQQSDAELVKPGASVKISCKASGYTFTDHAIHWVKQKPEQGLEWIGYFSPGNGDIKYNEKFKGKATLTADKSSSTAYMQLNSLTSEDSAVYFCKRSYGNYDYWGQGTTLTVSSTRIQNPDPAVYQLRDSKSSDKSVCLFTDFDSQTNVSQSKDSDVYITDKCVLDMRSMDFKSNSAVAWSNKSDFACANAFNNSIIPEDTFFPSPESSDSTDHVKPKETENTKQPSKSCHKPKAIVHTEKVNMMSLTVLGLRMLFAKTVAVNFLLTAKLFFL

SEQ ID NO: 16169 - protein, 996 aa, synthetic construct
MALPVTALLLPLALLLHAARPEVQLVESGGGLVQPGGSLRLSCAASGFSFSDFWMSWVRQAPGKGLEWVATISQAGSEKDYVDSVKGRFTISRDNAKKSLYLQMNSLRAEDTAVYYCASGVYSFDYRGQGTLVTVSSGTGGGGSGGGGSGGGGSEFDIVMTQSPDSLAVSLGERATINCKSSQSLLNSGDQKNYLTWYQQKPGQPPKLLIYWASTRESGVPDRFSGSGSGTDFTLTISSLQAEDVAVYYCQNDYSYPLTFGQGTKVEIKLEDLKNVFPPEVAVFEPSEAEISHTQKATLVCLATGFYPDHVELSWWVNGKEVHSGVCTDPQPLKEQPALNDSRYCLSSRLRVSATFWQNPRNHFRCQVQFYGLSENDEWTQDRAKPVTQIVSAEAWGRADDVIKIHWQEKKSNTILGSQEGNTMKTNDTYMKFSWLTVPEKSLDKEHRCIVRHENNKNGVDQEIIFPPIKTDVITMDPKDNCSKDANDTLLLQLTNTSAYYMYLLLLLKSVVYFAIITCCLLRRTAFCCNGEKSRAKRSGSGATNFSLLKQAGDVEENPGPTSMDWIWRILFLVGAATGAHSGPQLQLQESGPGLVKPSETLSLTCTVSGDSISSGDYYWGWIRQPPGKGLEWIGHIYYSGVTYYNPSLKSRVTISVDTSRNQFSLKLSSVTAADTAVYYCTREDSSNWRSRGQGTLVTVSSGSGGGGSGGGGSGGGGSFEQVQLVQSGAEVKKTGSSVKVSCKASGYTFTDHAIHVWRQAPGQALEWMGHFSPGNTDIKYNDKFKGRVTLTVDRSMSTAYMELSSLRSEDTAMYYCKTSTFFFDYWGQGTMVTVSSTRIQNPDPAVYQLRDSKSSDKSVCLFTDFDSQTNVSQSKDSDVYITDKCVLDMRSMDFKSNSAVAWSNKSDFACANAFNNSIIPEDTFFPSPESSDSTDHVKPKETENTKQPSKSCHKPKAIVHTEKVNMMSLTVLGLRMLFAKTVAVNFLLTAKLFFL

SEQ ID NO: 16170 - protein, 995 aa, synthetic construct
MALPVTALLLPLALLLHAARPEVQLVESGGGLVQPGGSLRLSCAASGFSFSDFWMSWVRQAPGKGLEWVATISQAGSEKDYVDSVKGRFTISRDNAKKSLYLQMNSLRAEDTAVYYCASGVYSFDYRGQGTLVTVSSGTGGGGSGGGGSGGGGSEFDIQMTQSPSSLSASVGDRVTITCKASQDVSIAVAWYQQKPGKAPKVLIYSASYRYTGVPDRFSGSGSGTDFTFTISSLQPEDIAVYYCQQHYITPLTFGGGTKVEIKLEDLKNVFPPEVAVFEPSEAEISHTQKATLVCLATGFYPDHVELSWWVNGKEVHSGVCTDPQPLKEQPALNDSRYCLSSRLRVSATFWQNPRNHFRCQVQFYGLSENDEWTQDRAKPVTQIVSAEAWGRADDVIKIHWQEKKSNTILGSQEGNTMKTNDTYMKFSWLTVPEKSLDKEHRCIVRHENNKNGVDQEIIFPPIKTDVITMDPKDNCSKDANDTLLLQLTNTSAYYMYLLLLLKSVVYFAIITCCLLRRTAFCCNGEKSRAKRSGSGATNFSLLKQAGDVEENPGPTSMDWIWRILFLVGAATGAHSGPQLQLQESGPGLVKPSETLSLTCTVSGDSISSGDYYWGWIRQPPGKGLEWIGHIYYSGVTYYNPSLKSRVTISVDTSRNQFSLKLSSVTAADTAVYYCTREDSSNWRSRGQGTLVTVSSGSGGGGSGGGGSGGGGSFEQIQLVQSGHEVKKPGASVKVSCKASGYTFTNYGMNWVRQAPGQGLEWMGWINTKTGEPTYAEEFKGRFVFSLETSASTAYLQISSLKAEDTAMYFCGRGGYGSSYWYFDVWGQGTTVTVSSTRIQNPDPAVYQLRDSKSSDKSVCLFTDFDSQTNVSQSKDSDVYITDKCVLDMRSMDFKSNSAVAWSNKSDFACANAFNNSIIPEDTFFPSPESSDSTDHVKPKETENTKQPSKSCHKPKAIVHTEKVNMMSLTVLGLRMLFAKTVAVNFLLTAKLFFL

SEQ ID NO: 16171 - protein, 997 aa, synthetic construct
MALPVTALLLPLALLLHAARPEVQLVESGGGLVQPGGSLRLSCAASGFSFSDFWMSWVRQAPGKGLEWVATISQAGSEKDYVDSVKGRFTISRDNAKKSLYLQMNSLRAEDTAVYYCASGVYSFDYRGQGTLVTVSSGTGGGGSGGGGSGGGGSEFDIVMTQSPDSLAVSLGERATINCRASKSVSTSGYSYMHWYQQKPGQPPKLLIYLASNLESGVPDRFSGSGSGTDFTLTISSLQAEDVAVYYCQHSRELPYTFGQGTKLEIKLEDLKNVFPPEVAVFEPSEAEISHTQKATLVCLATGFYPDHVELSWWVNGKEVHSGVCTDPQPLKEQPALNDSRYCLSSRLRVSATFWQNPRNHFRCQVQFYGLSENDEWTQDRAKPVTQIVSAEAWGRADDVIKIHWQEKKSNTILGSQEGNTMKTNDTYMKFSWLTVPEKSLDKEHRCIVRHENNKNGVDQEIIFPPIKTDVITMDPKDNCSKDANDTLLLQLTNTSAYYMYLLLLLKSVVYFAIITCCLLRRTAFCCNGEKSRAKRSGSGATNFSLLKQAGDVEENPGPTSMDWIWRILFLVGAATGAHSGPQLQLQESGPGLVKPSETLSLTCTVSGDSISSGDYYWGWIRQPPGKGLEWIGHIYYSGVTYYNPSLKSRVTISVDTSRNQFSLKLSSVTAADTAVYYCTREDSSNWRSRGQGTLVTVSSGSGGGGSGGGGSGGGGSFEQVQLQESGPGLVKPSETLSLTCTVSGGSISSYGVHWIRQPPGKGLEWIGVIWTSGVTDYNSALMGRVTISVDTSKNQFSLKLSSVTAADTAVYYCARDGDYDRYTMDYWGQGTLVTVSSTRIQNPDPAVYQLRDSKSSDKSVCLFTDFDSQTNVSQSKDSDVYITDKCVLDMRSMDFKSNSAVAWSNKSDFACANAFNNSIIPEDTFFPSPESSDSTDHVKPKETENTKQPSKSCHKPKAIVHTEKVNMMSLTVLGLRMLFAKTVAVNFLLTAKLFFL

SEQ ID NO: 16172 - protein, 997 aa, synthetic construct
MALPVTALLLPLALLLHAARPEVQLVESGGGLVQPGGSLRLSCAASGFSFSDFWMSWVRQAPGKGLEWVATISQAGSEKDYVDSVKGRFTISRDNAKKSLYLQMNSLRAEDTAVYYCASGVYSFDYRGQGTLVTVSSGTGGGGSGGGGSGGGGSEFDIQMTQSPSSLSASVGDRVTITCRASQSIGTSLHWYQQKPGKAPKLLIKFASRLQSGVPSRFSGSGSGTDFTLTISSLQPEDFATYYCQQSPGFPPTFGQGTKLEIKRLEDLKNVFPPEVAVFEPSEAEISHTQKATLVCLATGFYPDHVELSWWVNGKEVHSGVCTDPQPLKEQPALNDSRYCLSSRLRVSATFWQNPRNHFRCQVQFYGLSENDEWTQDRAKPVTQIVSAEAWGRADDVIKIHWQEKKSNTILGSQEGNTMKTNDTYMKFSWLTVPEKSLDKEHRCIVRHENNKNGVDQEIIFPPIKTDVITMDPKDNCSKDANDTLLLQLTNTSAYYMYLLLLLKSVVYFAIITCCLLRRTAFCCNGEKSRAKRSGSGATNFSLLKQAGDVEENPGPTSMDWIWRILFLVGAATGAHSGPQLQLQESGPGLVKPSETLSLTCTVSGDSISSGDYYWGWIRQPPGKGLEWIGHIYYSGVTYYNPSLKSRVTISVDTSRNQFSLKLSSVTAADTAVYYCTREDSSNWRSRGQGTLVTVSSGSGGGGSGGGGSGGGGSFEQVQLVESGGGLVKPGGSLRLSCAASGFSITTSGYYWTWIRQFPGKGLEWMGYIGYNSKTYYNPALKSRITISRDNAKNSLYLQMNSLRAEDTAVYYCARSLYGGYKDAFDSWGQGTLVTVSSTRIQNPDPAVYQLRDSKSSDKSVCLFTDFDSQTNVSQSKDSDVYITDKCVLDMRSMDFKSNSAVAWSNKSDFACANAFNNSIIPEDTFFPSPESSDSTDHVKPKETENTKQPSKSCHKPKAIVHTEKVNMMSLTVLGLRMLFAKTVAVNFLLTAKLFFL

SEQ ID NO: 16173 - protein, 1002 aa, synthetic construct
MALPVTALLLPLALLLHAARPEVQLVESGGGLVQPGGSLRLSCAASGFSFSDFWMSWVRQAPGKGLEWVATISQAGSEKDYVDSVKGRFTISRDNAKKSLYLQMNSLRAEDTAVYYCASGVYSFDYRGQGTLVTVSSGTGGGGSGGGGSGGGGSEFDEIVLTQSPLSLPVTPGEPASISCRSSQSLLHSIGYNYLDWYLQKPGQSPQLLIYLGSNRASGVPDRFSGSGSGTDFTLKISRVEAEDVGVYYCMQALQTPLTFGGGTKVEIKRLEDLKNVFPPEVAVFEPSEAEISHTQKATLVCLATGFYPDHVELSWWVNGKEVHSGVCTDPQPLKEQPALNDSRYCLSSRLRVSATFWQNPRNHFRCQVQFYGLSENDEWTQDRAKPVTQIVSAEAWGRADDVIKIHWQEKKSNTILGSQEGNTMKTNDTYMKFSWLTVPEKSLDKEHRCIVRHENNKNGVDQEIIFPPIKTDVITMDPKDNCSKDANDTLLLQLTNTSAYYMYLLLLLKSVVYFAIITCCLLRRTAFCCNGEKSRAKRSGSGATNFSLLKQAGDVEENPGPTSMDWIWRILFLVGAATGAHSGPQLQLQESGPGLVKPSETLSLTCTVSGDSISSGDYYWGWIRQPPGKGLEWIGHIYYSGVTYYNPSLKSRVTISVDTSRNQFSLKLSSVTAADTAVYYCTREDSSNWRSRGQGTLVTVSSGSGGGGSGGGGSGGGGSFEEVQLVESGGGVVQPGRSLRLSCAASGFTFRSYGMHWVRQAPGKGLEWVAVISYDGSNKYYTDSVNGRFTISRDNSKNTLYLQMNSLRAEDTAVYYCARGGGYYETSGPDYWGQGTLVTVSSTRIQNPDPAVYQLRDSKSSDKSVCLFTDFDSQTNVSQSKDSDVYITDKCVLDMRSMDFKSNSAVAWSNKSDFACANAFNNSIIPEDTFFPSPESSDSTDHVKPKETENTKQPSKSCHKPKAIVHTEKVNMMSLTVLGLRMLFAKTVAVNFLLTAKLFFL

SEQ ID NO: 16174 - protein, 1000 aa, synthetic construct
MALPVTALLLPLALLLHAARPEVQLVESGGGLVQPGGSLRLSCAASGFSFSDFWMSWVRQAPGKGLEWVATISQAGSEKDYVDSVKGRFTISRDNAKKSLYLQMNSLRAEDTAVYYCASGVYSFDYRGQGTLVTVSSGTGGGGSGGGGSGGGGSEFDDVVMTQSPLSLPVTPGEPASISCRSSQSLLHSIGYNYLHWFLQKPGQSPQLLIYLGSNRASGVPDRFSGSGSGTDFTLKISRVEAEDVGVYYCMQALQTPPTFGQGTRLEIKRLEDLKNVFPPEVAVFEPSEAEISHTQKATLVCLATGFYPDHVELSWWVNGKEVHSGVCTDPQPLKEQPALNDSRYCLSSRLRVSATFWQNPRNHFRCQVQFYGLSENDEWTQDRAKPVTQIVSAEAWGRADDVIKIHWQEKKSNTILGSQEGNTMKTNDTYMKFSWLTVPEKSLDKEHRCIVRHENNKNGVDQEIIFPPIKTDVITMDPKDNCSKDANDTLLLQLTNTSAYYMYLLLLLKSVVYFAIITCCLLRRTAFCCNGEKSRAKRSGSGATNFSLLKQAGDVEENPGPTSMDWIWRILFLVGAATGAHSGPQLQLQESGPGLVKPSETLSLTCTVSGDSISSGDYYWGWIRQPPGKGLEWIGHIYYSGVTYYNPSLKSRVTISVDTSRNQFSLKLSSVTAADTAVYYCTREDSSNWRSRGQGTLVTVSSGSGGGGSGGGGSGGGGSFEQLQLQESGPGLVKPSGTLSLTCAVSGGSISSSNWWSWVRQPPGKGLEWIGEIYHSGSTNYNPSLKSRVTISVDKSKNQFSLKLSSVTAADTAVYYCVGSPYGDYVLDYWGQGTLVTVSSTRIQNPDPAVYQLRDSKSSDKSVCLFTDFDSQTNVSQSKDSDVYITDKCVLDMRSMDFKSNSAVAWSNKSDFACANAFNNSIIPEDTFFPSPESSDSTDHVKPKETENTKQPSKSCHKPKAIVHTEKVNMMSLTVLGLRMLFAKTVAVNFLLTAKLFFL

SEQ ID NO: 16175 - protein, 998 aa, synthetic construct
MALPVTALLLPLALLLHAARPEVQLVESGGGLVQPGGSLRLSCAASGFSFSDFWMSWVRQAPGKGLEWVATISQAGSEKDYVDSVKGRFTISRDNAKKSLYLQMNSLRAEDTAVYYCASGVYSFDYRGQGTLVTVSSGTGGGGSGGGGSGGGGSEFDEIVLTQSPGTLSLSLGERATLSCRASQSISSSFLAWYQQKPGQAPKLLIYAASTRATGIPDRFSGSGSGTDFTLTISRLEPEDFAVYYCQQYGRSLSFGGGTKVEVKLEDLKNVFPPEVAVFEPSEAEISHTQKATLVCLATGFYPDHVELSWWVNGKEVHSGVCTDPQPLKEQPALNDSRYCLSSRLRVSATFWQNPRNHFRCQVQFYGLSENDEWTQDRAKPVTQIVSAEAWGRADDVIKIHWQEKKSNTILGSQEGNTMKTNDTYMKFSWLTVPEKSLDKEHRCIVRHENNKNGVDQEIIFPPIKTDVITMDPKDNCSKDANDTLLLQLTNTSAYYMYLLLLLKSVVYFAIITCCLLRRTAFCCNGEKSRAKRSGSGATNFSLLKQAGDVEENPGPTSMDWIWRILFLVGAATGAHSGPQLQLQESGPGLVKPSETLSLTCTVSGDSISSGDYYWGWIRQPPGKGLEWIGHIYYSGVTYYNPSLKSRVTISVDTSRNQFSLKLSSVTAADTAVYYCTREDSSNWRSRGQGTLVTVSSGSGGGGSGGGGSGGGGSFEQVQLQQSGPGLVKPSQTLSLTCAISGDSVSGNSATWNWIRQSPSRGLEWLGRTYYRSKWNHDYAESVKSRITINPDTSKNQFSLQLNSVTPEDTAVYYCARGDSSSWYAFDYWGQGTLVTVSSTRIQNPDPAVYQLRDSKSSDKSVCLFTDFDSQTNVSQSKDSDVYITDKCVLDMRSMDFKSNSAVAWSNKSDFACANAFNNSIIPEDTFFPSPESSDSTDHVKPKETENTKQPSKSCHKPKAIVHTEKVNMMSLTVLGLRMLFAKTVAVNFLLTAKLFFL

SEQ ID NO: 16176 - protein, 997 aa, synthetic construct
MALPVTALLLPLALLLHAARPEVQLVESGGGLVQPGGSLRLSCAASGFSFSDFWMSWVRQAPGKGLEWVATISQAGSEKDYVDSVKGRFTISRDNAKKSLYLQMNSLRAEDTAVYYCASGVYSFDYRGQGTLVTVSSGTGGGGSGGGGSGGGGSEFDQSVVTQPPSVSVAPGKTARITCGRNNIGSKSVHWYQQKPGQAPVLVVYDDSDRPSGIPERFSGSNSGNTATLTISRVEAGDEADYYCQVWDSSSDHVVFGGGTKLTVLGLEDLKNVFPPEVAVFEPSEAEISHTQKATLVCLATGFYPDHVELSWWVNGKEVHSGVCTDPQPLKEQPALNDSRYCLSSRLRVSATFWQNPRNHFRCQVQFYGLSENDEWTQDRAKPVTQIVSAEAWGRADDVIKIHWQEKKSNTILGSQEGNTMKTNDTYMKFSWLTVPEKSLDKEHRCIVRHENNKNGVDQEIIFPPIKTDVITMDPKDNCSKDANDTLLLQLTNTSAYYMYLLLLLKSVVYFAIITCCLLRRTAFCCNGEKSRAKRSGSGATNFSLLKQAGDVEENPGPTSMDWIWRILFLVGAATGAHSGPQLQLQESGPGLVKPSETLSLTCTVSGDSISSGDYYWGWIRQPPGKGLEWIGHIYYSGVTYYNPSLKSRVTISVDTSRNQFSLKLSSVTAADTAVYYCTREDSSNWRSRGQGTLVTVSSGSGGGGSGGGGSGGGGSFEVQLVQSGGGVMRPGGSLRLSCAASGFTFDDYGMSWVRQAPGKGLEWVSGINWNGGSTGYADSVRGRFTISRDNAKNSLYLQMNSLRAEDTALYYCARERGYGYHDPHDYWGQGTLVTVSSTRIQNPDPAVYQLRDSKSSDKSVCLFTDFDSQTNVSQSKDSDVYITDKCVLDMRSMDFKSNSAVAWSNKSDFACANAFNNSIIPEDTFFPSPESSDSTDHVKPKETENTKQPSKSCHKPKAIVHTEKVNMMSLTVLGLRMLFAKTVAVNFLLTAKLFFL

SEQ ID NO: 16177 - protein, 1010 aa, synthetic construct
MALPVTALLLPLALLLHAARPEVQLVESGGGLVQPGGSLRLSCAASGFSFSDFWMSWVRQAPGKGLEWVATISQAGSEKDYVDSVKGRFTISRDNAKKSLYLQMNSLRAEDTAVYYCASGVYSFDYRGQGTLVTVSSGTGGGGSGGGGSGGGGSEFEQKLISEEDLEFQAVVTQPPSASGTPGQRVTISCSGSSSNIGSNTVNWYQQVPGTAPKLLIYSNNQRPSGVPDRFSGSKSGTSASLAISGLQSEDEADYYCAAWDDSLNGWVFGGGTKLTVLLEDLKNVFPPEVAVFEPSEAEISHTQKATLVCLATGFYPDHVELSWWVNGKEVHSGVCTDPQPLKEQPALNDSRYCLSSRLRVSATFWQNPRNHFRCQVQFYGLSENDEWTQDRAKPVTQIVSAEAWGRADDVIKIHWQEKKSNTILGSQEGNTMKTNDTYMKFSWLTVPEKSLDKEHRCIVRHENNKNGVDQEIIFPPIKTDVITMDPKDNCSKDANDTLLLQLTNTSAYYMYLLLLLKSVVYFAIITCCLLRRTAFCCNGEKSRAKRSGSGATNFSLLKQAGDVEENPGPTSMDWIWRILFLVGAATGAHSGPQLQLQESGPGLVKPSETLSLTCTVSGDSISSGDYYWGWIRQPPGKGLEWIGHIYYSGVTYYNPSLKSRVTISVDTSRNQFSLKLSSVTAADTAVYYCTREDSSNWRSRGQGTLVTVSSGSGGGGSGGGGSGGGGSFEQMQLVQSGAEVKEPGESLRISCKGSGYSFTNFWISWVRQMPGKGLEWMGRVDPGYSYSTYSPSFQGHVTISADKSTSTAYLQWNSLKASDTAMYYCARVQYSGYYDWFDPWGQGTLVTVSSTRIQNPDPAVYQLRDSKSSDKSVCLFTDFDSQTNVSQSKDSDVYITDKCVLDMRSMDFKSNSAVAWSNKSDFACANAFNNSIIPEDTFFPSPESSDSTDHVKPKETENTKQPSKSCHKPKAIVHTEKVNMMSLTVLGLRMLFAKTVAVNFLLTAKLFFL

SEQ ID NO: 16178 - protein, 1004 aa, synthetic construct
MALPVTALLLPLALLLHAARPEVQLVESGGGLVQPGGSLRLSCAASGFSFSDFWMSWVRQAPGKGLEWVATISQAGSEKDYVDSVKGRFTISRDNAKKSLYLQMNSLRAEDTAVYYCASGVYSFDYRGQGTLVTVSSGTGGGGSGGGGSGGGGSEFEQKLISEEDLEFDIQMTQSPSTLSASVGDRVTITCRASQNINKWLAWYQQRPGKAPQLLIYKASSLESGVPSRFSGSGSGTEYTLTISSLQPDDFATYYCQQYNSYATFGQGTKVEIKRLEDLKNVFPPEVAVFEPSEAEISHTQKATLVCLATGFYPDHVELSWWVNGKEVHSGVCTDPQPLKEQPALNDSRYCLSSRLRVSATFWQNPRNHFRCQVQFYGLSENDEWTQDRAKPVTQIVSAEAWGRADDVIKIHWQEKKSNTILGSQEGNTMKTNDTYMKFSWLTVPEKSLDKEHRCIVRHENNKNGVDQEIIFPPIKTDVITMDPKDNCSKDANDTLLLQLTNTSAYYMYLLLLLKSVVYFAIITCCLLRRTAFCCNGEKSRAKRSGSGATNFSLLKQAGDVEENPGPTSMDWIWRILFLVGAATGAHSGPQLQLQESGPGLVKPSETLSLTCTVSGDSISSGDYYWGWIRQPPGKGLEWIGHIYYSGVTYYNPSLKSRVTISVDTSRNQFSLKLSSVTAADTAVYYCTREDSSNWRSRGQGTLVTVSSGSGGGGSGGGGSGGGGSFEQVQLVQSGAEVKKPGESLKISCKGSGYNFSNKWIGWVRQLPGRGLEWIAIIYPGYSDITYSPSFQGRVTISADTSINTAYLHWHSLKASDTAMYYCVRHTALAGFDYWGLGTLVTVSSTRIQNPDPAVYQLRDSKSSDKSVCLFTDFDSQTNVSQSKDSDVYITDKCVLDMRSMDFKSNSAVAWSNKSDFACANAFNNSIIPEDTFFPSPESSDSTDHVKPKETENTKQPSKSCHKPKAIVHTEKVNMMSLTVLGLRMLFAKTVAVNFLLTAKLFFL

SEQ ID NO: 16179 - protein, 995 aa, synthetic construct
MALPVTALLLPLALLLHAARPEVQLVESGGGLVQPGGSLRLSCAASGFSFSDFWMSWVRQAPGKGLEWVATISQAGSEKDYVDSVKGRFTISRDNAKKSLYLQMNSLRAEDTAVYYCASGVYSFDYRGQGTLVTVSSGTGGGGSGGGGSGGGGSEFIVLTQSPASLAVSLGQRATISCRASESVDNYGNTFMHWYQQKPGQPPKLLIYRASNLESGIPARFSGSGSRTDFTLTINPVEADDVATYYCQQSNEDPPTFGAGTKLELKLEDLKNVFPPEVAVFEPSEAEISHTQKATLVCLATGFYPDHVELSWWVNGKEVHSGVCTDPQPLKEQPALNDSRYCLSSRLRVSATFWQNPRNHFRCQVQFYGLSENDEWTQDRAKPVTQIVSAEAWGRADDVIKIHWQEKKSNTILGSQEGNTMKTNDTYMKFSWLTVPEKSLDKEHRCIVRHENNKNGVDQEIIFPPIKTDVITMDPKDNCSKDANDTLLLQLTNTSAYYMYLLLLLKSVVYFAIITCCLLRRTAFCCNGEKSRAKRSGSGATNFSLLKQAGDVEENPGPTSMDWIWRILFLVGAATGAHSGPQLQLQESGPGLVKPSETLSLTCTVSGDSISSGDYYWGWIRQPPGKGLEWIGHIYYSGVTYYNPSLKSRVTISVDTSRNQFSLKLSSVTAADTAVYYCTREDSSNWRSRGQGTLVTVSSGSGGGGSGGGGSGGGGSFEQIQLVQSGPELKKPGETVKISCKASGYIFTNYGMNWVKQAPGKSFKWMGWINTYTGESTYSADFKGRFAFSLETSASTAYLHINDLKNEDTATYFCARSGGYDPMDYWGQGTSVTVSSTRIQNPDPAVYQLRDSKSSDKSVCLFTDFDSQTNVSQSKDSDVYITDKCVLDMRSMDFKSNSAVAWSNKSDFACANAFNNSIIPEDTFFPSPESSDSTDHVKPKETENTKQPSKSCHKPKAIVHTEKVNMMSLTVLGLRMLFAKTVAVNFLLTAKLFFL

SEQ ID NO: 16180 - protein, 994 aa, synthetic construct
MALPVTALLLPLALLLHAARPEVQLVESGGGLVQPGGSLRLSCAASGFSFSDFWMSWVRQAPGKGLEWVATISQAGSEKDYVDSVKGRFTISRDNAKKSLYLQMNSLRAEDTAVYYCASGVYSFDYRGQGTLVTVSSGTGGGGSGGGGSGGGGSEFEIVLTQSPGTLSLSPGERATLSCRASQSVSNTYLAWYHQRPGQAPRLLIYGASSRATGIPDRFSGSGSGTDFALTISSLEPEDFAVYYCQQYSNSWTFGQGTKVEIKRLEDLKNVFPPEVAVFEPSEAEISHTQKATLVCLATGFYPDHVELSWWVNGKEVHSGVCTDPQPLKEQPALNDSRYCLSSRLRVSATFWQNPRNHFRCQVQFYGLSENDEWTQDRAKPVTQIVSAEAWGRADDVIKIHWQEKKSNTILGSQEGNTMKTNDTYMKFSWLTVPEKSLDKEHRCIVRHENNKNGVDQEIIFPPIKTDVITMDPKDNCSKDANDTLLLQLTNTSAYYMYLLLLLKSVVYFAIITCCLLRRTAFCCNGEKSRAKRSGSGATNFSLLKQAGDVEENPGPTSMDWIWRILFLVGAATGAHSGPQLQLQESGPGLVKPSETLSLTCTVSGDSISSGDYYWGWIRQPPGKGLEWIGHIYYSGVTYYNPSLKSRVTISVDTSRNQFSLKLSSVTAADTAVYYCTREDSSNWRSRGQGTLVTVSSGSGGGGSGGGGSGGGGSFEQVQLVESGGGVVQPGRSLRLSCAASGFTFSSYDMHWVRQAPGKGLEWVAVISYDGTNEYYADSVKGRFTISRDTSKNTLYLQMNSLRAEDTAVYYCARERYFDWSFDYWGQGTLVSVSSTRIQNPDPAVYQLRDSKSSDKSVCLFTDFDSQTNVSQSKDSDVYITDKCVLDMRSMDFKSNSAVAWSNKSDFACANAFNNSIIPEDTFFPSPESSDSTDHVKPKETENTKQPSKSCHKPKAIVHTEKVNMMSLTVLGLRMLFAKTVAVNFLLTAKLFFL

SEQ ID NO: 16181 - protein, 993 aa, synthetic construct
MALPVTALLLPLALLLHAARPEVQLVESGGGLVQPGGSLRLSCAASGFSFSDFWMSWVRQAPGKGLEWVATISQAGSEKDYVDSVKGRFTISRDNAKKSLYLQMNSLRAEDTAVYYCASGVYSFDYRGQGTLVTVSSGTGGGGSGGGGSGGGGSEFELTQDPAVSVALGQTVRITCQGDSLRSNYANWYQQKPGQAPVLVIYGQNNRPSGIPDRFSGSSSGNTASLTITGAQAADEADYYCDSRVSTGNHVVFGGGTKLTVLGQLEDLKNVFPPEVAVFEPSEAEISHTQKATLVCLATGFYPDHVELSWWVNGKEVHSGVCTDPQPLKEQPALNDSRYCLSSRLRVSATFWQNPRNHFRCQVQFYGLSENDEWTQDRAKPVTQIVSAEAWGRADDVIKIHWQEKKSNTILGSQEGNTMKTNDTYMKFSWLTVPEKSLDKEHRCIVRHENNKNGVDQEIIFPPIKTDVITMDPKDNCSKDANDTLLLQLTNTSAYYMYLLLLLKSVVYFAIITCCLLRRTAFCCNGEKSRAKRSGSGATNFSLLKQAGDVEENPGPTSMDWIWRILFLVGAATGAHSGPQLQLQESGPGLVKPSETLSLTCTVSGDSISSGDYYWGWIRQPPGKGLEWIGHIYYSGVTYYNPSLKSRVTISVDTSRNQFSLKLSSVTAADTAVYYCTREDSSNWRSRGQGTLVTVSSGSGGGGSGGGGSGGGGSFEEVQLVQSGAEVKKPGASVKVSCKASGYTFTSYAMHWVRQAPGQRLEWMGWINAGNGNTKYSQKFQGRVTITRDTSASTAYMELSSLRSEDTAVYYCARDISYGSFDYWGQGTLVTVSSTRIQNPDPAVYQLRDSKSSDKSVCLFTDFDSQTNVSQSKDSDVYITDKCVLDMRSMDFKSNSAVAWSNKSDFACANAFNNSIIPEDTFFPSPESSDSTDHVKPKETENTKQPSKSCHKPKAIVHTEKVNMMSLTVLGLRMLFAKTVAVNFLLTAKLFFL

SEQ ID NO: 16182 - protein, 995 aa, synthetic construct
MALPVTALLLPLALLLHAARPEVQLVESGGGLVQPGGSLRLSCAASGFSFSDFWMSWVRQAPGKGLEWVATISQAGSEKDYVDSVKGRFTISRDNAKKSLYLQMNSLRAEDTAVYYCASGVYSFDYRGQGTLVTVSSGTGGGGSGGGGSGGGGSEFDIVLTQTPATLSVTPGDSVSLSCRASQSISNNLHWYQQKSHESPRLLIKNASQSISGIPSKFSGSGSGTDFTLRINSVETEDFGMYFCQQSNSWPYTFGSGTKLEIKLEDLKNVFPPEVAVFEPSEAEISHTQKATLVCLATGFYPDHVELSWWVNGKEVHSGVCTDPQPLKEQPALNDSRYCLSSRLRVSATFWQNPRNHFRCQVQFYGLSENDEWTQDRAKPVTQIVSAEAWGRADDVIKIHWQEKKSNTILGSQEGNTMKTNDTYMKFSWLTVPEKSLDKEHRCIVRHENNKNGVDQEIIFPPIKTDVITMDPKDNCSKDANDTLLLQLTNTSAYYMYLLLLLKSVVYFAIITCCLLRRTAFCCNGEKSRAKRSGSGATNFSLLKQAGDVEENPGPTSMDWIWRILFLVGAATGAHSGPQLQLQESGPGLVKPSETLSLTCTVSGDSISSGDYYWGWIRQPPGKGLEWIGHIYYSGVTYYNPSLKSRVTISVDTSRNQFSLKLSSVTAADTAVYYCTREDSSNWRSRGQGTLVTVSSGSGGGGSGGGGSGGGGSFEQVKLQQSGPELVKPGASVKISCKASGYSFTGYYMHWVKQSHGNILDWIGYIYPYNGVSSYNQKFKGKATLTVDKSSSTAYMELRSLTSEDSAVYYCARERGLYQLRAMDYWGQGTSVTVSSTRIQNPDPAVYQLRDSKSSDKSVCLFTDFDSQTNVSQSKDSDVYITDKCVLDMRSMDFKSNSAVAWSNKSDFACANAFNNSIIPEDTFFPSPESSDSTDHVKPKETENTKQPSKSCHKPKAIVHTEKVNMMSLTVLGLRMLFAKTVAVNFLLTAKLFFL

SEQ ID NO: 16183 - protein, 986 aa, synthetic construct
MALPVTALLLPLALLLHAARPEVQLVESGGGLVQPGGSLRLSCAASGFSFSDFWMSWVRQAPGKGLEWVATISQAGSEKDYVDSVKGRFTISRDNAKKSLYLQMNSLRAEDTAVYYCASGVYSFDYRGQGTLVTVSSGTGGGGSGGGGSGGGGSEFDIVMTQTPAIMSASPGQKVTITCSASSSVNYMHWYQQKLGSSPKLWIYDTSKLAPGVPARFSGSGSGTSYSLTISSMEAEDAASYFCHQWSSYPYTFGSGTKLEIKLEDLKNVFPPEVAVFEPSEAEISHTQKATLVCLATGFYPDHVELSWWVNGKEVHSGVCTDPQPLKEQPALNDSRYCLSSRLRVSATFWQNPRNHFRCQVQFYGLSENDEWTQDRAKPVTQIVSAEAWGRADDVIKIHWQEKKSNTILGSQEGNTMKTNDTYMKFSWLTVPEKSLDKEHRCIVRHENNKNGVDQEIIFPPIKTDVITMDPKDNCSKDANDTLLLQLTNTSAYYMYLLLLLKSVVYFAIITCCLLRRTAFCCNGEKSRAKRSGSGATNFSLLKQAGDVEENPGPTSMDWIWRILFLVGAATGAHSGPQLQLQESGPGLVKPSETLSLTCTVSGDSISSGDYYWGWIRQPPGKGLEWIGHIYYSGVTYYNPSLKSRVTISVDTSRNQFSLKLSSVTAADTAVYYCTREDSSNWRSRGQGTLVTVSSGSGGGGSGGGGSGGGGSFEEVQLQESGPDLVKPSQSLSLTCTVTGYSITSGYGWHWIRQFPGNKLEWMGYIHYSGSTTYNPSLKSRISISRDTSKNQFFLQLNSVTTEDTATYYCARSLRYWGQGTTLTVSSTRIQNPDPAVYQLRDSKSSDKSVCLFTDFDSQTNVSQSKDSDVYITDKCVLDMRSMDFKSNSAVAWSNKSDFACANAFNNSIIPEDTFFPSPESSDSTDHVKPKETENTKQPSKSCHKPKAIVHTEKVNMMSLTVLGLRMLFAKTVAVNFLLTAKLFFL

SEQ ID NO: 16184 - protein, 989 aa, synthetic construct
MALPVTALLLPLALLLHAARPEVQLVESGGGLVQPGGSLRLSCAASGFSFSDFWMSWVRQAPGKGLEWVATISQAGSEKDYVDSVKGRFTISRDNAKKSLYLQMNSLRAEDTAVYYCASGVYSFDYRGQGTLVTVSSGTGGGGSGGGGSGGGGSEFDIQMTQSPSSLSASVGDRVTITCSATSSISYMHWYQQKPGKAPKGWIYDTSKLAHGVPSRFSGSGSGTDFTLTISSLQPEDFATYYCHQRRSYPFTFGQGTKVEIKLEDLKNVFPPEVAVFEPSEAEISHTQKATLVCLATGFYPDHVELSWWVNGKEVHSGVCTDPQPLKEQPALNDSRYCLSSRLRVSATFWQNPRNHFRCQVQFYGLSENDEWTQDRAKPVTQIVSAEAWGRADDVIKIHWQEKKSNTILGSQEGNTMKTNDTYMKFSWLTVPEKSLDKEHRCIVRHENNKNGVDQEIIFPPIKTDVITMDPKDNCSKDANDTLLLQLTNTSAYYMYLLLLLKSVVYFAIITCCLLRRTAFCCNGEKSRAKRSGSGATNFSLLKQAGDVEENPGPTSMDWIWRILFLVGAATGAHSGPQLQLQESGPGLVKPSETLSLTCTVSGDSISSGDYYWGWIRQPPGKGLEWIGHIYYSGVTYYNPSLKSRVTISVDTSRNQFSLKLSSVTAADTAVYYCTREDSSNWRSRGQGTLVTVSSGSGGGGSGGGGSGGGGSFEEVQLVQSGAEVKKPGASVKVSCKASGYTFTNFWIHWVRQAPGQGLEWIGEIDPSDSYTNYNQKFKGRVTITRDTSTSTAYLELSSLRSEDTAVYYCAREITTVDYWGQGTLVTVSSTRIQNPDPAVYQLRDSKSSDKSVCLFTDFDSQTNVSQSKDSDVYITDKCVLDMRSMDFKSNSAVAWSNKSDFACANAFNNSIIPEDTFFPSPESSDSTDHVKPKETENTKQPSKSCHKPKAIVHTEKVNMMSLTVLGLRMLFAKTVAVNFLLTAKLFFL

SEQ ID NO: 16185 - protein, 996 aa, synthetic construct
MALPVTALLLPLALLLHAARPEVQLVESGGGLVQPGGSLRLSCAASGFSFSDFWMSWVRQAPGKGLEWVATISQAGSEKDYVDSVKGRFTISRDNAKKSLYLQMNSLRAEDTAVYYCASGVYSFDYRGQGTLVTVSSGTGGGGSGGGGSGGGGSEFDIQMTQSPSSLSASVGDRVTITCKASQGFNKYVAWYQQKPGKAPKLLIYYTSTLQPGVPSRFSGSGSGRDYTLTISSLQPEDFATYYCLQYGNLLYAFGQGTKVEIKRLEDLKNVFPPEVAVFEPSEAEISHTQKATLVCLATGFYPDHVELSWWVNGKEVHSGVCTDPQPLKEQPALNDSRYCLSSRLRVSATFWQNPRNHFRCQVQFYGLSENDEWTQDRAKPVTQIVSAEAWGRADDVIKIHWQEKKSNTILGSQEGNTMKTNDTYMKFSWLTVPEKSLDKEHRCIVRHENNKNGVDQEIIFPPIKTDVITMDPKDNCSKDANDTLLLQLTNTSAYYMYLLLLLKSVVYFAIITCCLLRRTAFCCNGEKSRAKRSGSGATNFSLLKQAGDVEENPGPTSMDWIWRILFLVGAATGAHSGPQLQLQESGPGLVKPSETLSLTCTVSGDSISSGDYYWGWIRQPPGKGLEWIGHIYYSGVTYYNPSLKSRVTISVDTSRNQFSLKLSSVTAADTAVYYCTREDSSNWRSRGQGTLVTVSSGSGGGGSGGGGSGGGGSFEEVQLVQSGAEVKKPGASVKVSCKASGYTFTSYWIGWVRQAPGQGLEWIGDIYPGGGYTNYNEKFKGRVTITRDTSTSTAYLELSSLRSEDTAVYYCARLDGSSYRGAMDSWGQGTLVTVSSTRIQNPDPAVYQLRDSKSSDKSVCLFTDFDSQTNVSQSKDSDVYITDKCVLDMRSMDFKSNSAVAWSNKSDFACANAFNNSIIPEDTFFPSPESSDSTDHVKPKETENTKQPSKSCHKPKAIVHTEKVNMMSLTVLGLRMLFAKTVAVNFLLTAKLFFL

SEQ ID NO: 16186 - protein, 992 aa, synthetic construct
MALPVTALLLPLALLLHAARPEVQLVESGGGLVQPGGSLRLSCAASGFSFSDFWMSWVRQAPGKGLEWVATISQAGSEKDYVDSVKGRFTISRDNAKKSLYLQMNSLRAEDTAVYYCASGVYSFDYRGQGTLVTVSSGTGGGGSGGGGSGGGGSEFDIQMTQSPSSLSASVGDRVTITCRASQDIRYYLNWYQQKPGKAPKLLIYVASSLQSGVPSRFSGSGSGTEFTLTVSSLQPEDFATYYCLQVYSTPRTFGQGTKVEIKLEDLKNVFPPEVAVFEPSEAEISHTQKATLVCLATGFYPDHVELSWWVNGKEVHSGVCTDPQPLKEQPALNDSRYCLSSRLRVSATFWQNPRNHFRCQVQFYGLSENDEWTQDRAKPVTQIVSAEAWGRADDVIKIHWQEKKSNTILGSQEGNTMKTNDTYMKFSWLTVPEKSLDKEHRCIVRHENNKNGVDQEIIFPPIKTDVITMDPKDNCSKDANDTLLLQLTNTSAYYMYLLLLLKSVVYFAIITCCLLRRTAFCCNGEKSRAKRSGSGATNFSLLKQAGDVEENPGPTSMDWIWRILFLVGAATGAHSGPQLQLQESGPGLVKPSETLSLTCTVSGDSISSGDYYWGWIRQPPGKGLEWIGHIYYSGVTYYNPSLKSRVTISVDTSRNQFSLKLSSVTAADTAVYYCTREDSSNWRSRGQGTLVTVSSGSGGGGSGGGGSGGGGSFEEVQLVESGGGLAKPGGSLRLSCAASGFRFTFNNYYMDWVRQAPGQGLEWVSRISSSGDPTWYADSVKGRFTISRENAKNTLFLQMNSLRAEDTAVYYCASLTTGSDSWGQGVLVTVSSTRIQNPDPAVYQLRDSKSSDKSVCLFTDFDSQTNVSQSKDSDVYITDKCVLDMRSMDFKSNSAVAWSNKSDFACANAFNNSIIPEDTFFPSPESSDSTDHVKPKETENTKQPSKSCHKPKAIVHTEKVNMMSLTVLGLRMLFAKTVAVNFLLTAKLFFL

SEQ ID NO: 16187 - protein, 993 aa, synthetic construct
MALPVTALLLPLALLLHAARPEVQLVESGGGLVQPGGSLRLSCAASGFSFSDFWMSWVRQAPGKGLEWVATISQAGSEKDYVDSVKGRFTISRDNAKKSLYLQMNSLRAEDTAVYYCASGVYSFDYRGQGTLVTVSSGTGGGGSGGGGSGGGGSEFEIVMTQSPATLSVSPGERATLSCRASQSVSRNLAWYQQKPGQAPRLLIYGASTRATGIPARFSGSGSGTEFTLTIGSLQSEDFAVYYCQQYKTWPRTFGQGTNVEIKLEDLKNVFPPEVAVFEPSEAEISHTQKATLVCLATGFYPDHVELSWWVNGKEVHSGVCTDPQPLKEQPALNDSRYCLSSRLRVSATFWQNPRNHFRCQVQFYGLSENDEWTQDRAKPVTQIVSAEAWGRADDVIKIHWQEKKSNTILGSQEGNTMKTNDTYMKFSWLTVPEKSLDKEHRCIVRHENNKNGVDQEIIFPPIKTDVITMDPKDNCSKDANDTLLLQLTNTSAYYMYLLLLLKSVVYFAIITCCLLRRTAFCCNGEKSRAKRSGSGATNFSLLKQAGDVEENPGPTSMDWIWRILFLVGAATGAHSGPQLQLQESGPGLVKPSETLSLTCTVSGDSISSGDYYWGWIRQPPGKGLEWIGHIYYSGVTYYNPSLKSRVTISVDTSRNQFSLKLSSVTAADTAVYYCTREDSSNWRSRGQGTLVTVSSGSGGGGSGGGGSGGGGSFEQVQLQQWGAGLLKPSETLSLTCAVFGGSFSGYYWSWIRQPPGKGLEWIGEINHRGNTNDNPSLKSRVTISVDTSKNQFALKLSSVTAADTAVYYCARERGYTYGNFDHWGQGTLVTVSSTRIQNPDPAVYQLRDSKSSDKSVCLFTDFDSQTNVSQSKDSDVYITDKCVLDMRSMDFKSNSAVAWSNKSDFACANAFNNSIIPEDTFFPSPESSDSTDHVKPKETENTKQPSKSCHKPKAIVHTEKVNMMSLTVLGLRMLFAKTVAVNFLLTAKLFFL

SEQ ID NO: 16188 - protein, 994 aa, synthetic construct
MALPVTALLLPLALLLHAARPEVQLVESGGGLVQPGGSLRLSCAASGFSFSDFWMSWVRQAPGKGLEWVATISQAGSEKDYVDSVKGRFTISRDNAKKSLYLQMNSLRAEDTAVYYCASGVYSFDYRGQGTLVTVSSGTGGGGSGGGGSGGGGSEFEIVMTPSSATLSVSPGERATLSCRASQSVSRNLAWYQQKPGQAPRLLIYGASTRATGIPARFSGSGSGTEFTLTISSLQSEDFAVYYCHQYSNWMCSFGQGTKLEIKLEDLKNVFPPEVAVFEPSEAEISHTQKATLVCLATGFYPDHVELSWWVNGKEVHSGVCTDPQPLKEQPALNDSRYCLSSRLRVSATFWQNPRNHFRCQVQFYGLSENDEWTQDRAKPVTQIVSAEAWGRADDVIKIHWQEKKSNTILGSQEGNTMKTNDTYMKFSWLTVPEKSLDKEHRCIVRHENNKNGVDQEIIFPPIKTDVITMDPKDNCSKDANDTLLLQLTNTSAYYMYLLLLLKSVVYFAIITCCLLRRTAFCCNGEKSRAKRSGSGATNFSLLKQAGDVEENPGPTSMDWIWRILFLVGAATGAHSGPQLQLQESGPGLVKPSETLSLTCTVSGDSISSGDYYWGWIRQPPGKGLEWIGHIYYSGVTYYNPSLKSRVTISVDTSRNQFSLKLSSVTAADTAVYYCTREDSSNWRSRGQGTLVTVSSGSGGGGSGGGGSGGGGSFEEVQLLESGGGLVQPGGSLRLSCAASGFTFSRYAMNWVRQAPGKGLEWVSGISGSGGRTYYADSVKGRFTISRDNSKNTLYLQMNSLRAEDTAVYYCAKDRDFWSGPFDYWGQGTLVTVSSTRIQNPDPAVYQLRDSKSSDKSVCLFTDFDSQTNVSQSKDSDVYITDKCVLDMRSMDFKSNSAVAWSNKSDFACANAFNNSIIPEDTFFPSPESSDSTDHVKPKETENTKQPSKSCHKPKAIVHTEKVNMMSLTVLGLRMLFAKTVAVNFLLTAKLFFL

SEQ ID NO: 16189 - protein, 999 aa, synthetic construct
MALPVTALLLPLALLLHAARPEVQLVESGGGLVQPGGSLRLSCAASGFSFSDFWMSWVRQAPGKGLEWVATISQAGSEKDYVDSVKGRFTISRDNAKKSLYLQMNSLRAEDTAVYYCASGVYSFDYRGQGTLVTVSSGTGGGGSGGGGSGGGGSEFDIQMTQSPSSLSASVGDRVTITCKASKNIRSYLAWYQQKPGKAPKLLIYSGSTLHSGVPSRFSGSGSGTDFTLTISSLQPEDFATYYCQQHHEYPLTFGQGTKVEIKRLEDLKNVFPPEVAVFEPSEAEISHTQKATLVCLATGFYPDHVELSWWVNGKEVHSGVCTDPQPLKEQPALNDSRYCLSSRLRVSATFWQNPRNHFRCQVQFYGLSENDEWTQDRAKPVTQIVSAEAWGRADDVIKIHWQEKKSNTILGSQEGNTMKTNDTYMKFSWLTVPEKSLDKEHRCIVRHENNKNGVDQEIIFPPIKTDVITMDPKDNCSKDANDTLLLQLTNTSAYYMYLLLLLKSVVYFAIITCCLLRRTAFCCNGEKSRAKRSGSGATNFSLLKQAGDVEENPGPTSMDWIWRILFLVGAATGAHSGPQLQLQESGPGLVKPSETLSLTCTVSGDSISSGDYYWGWIRQPPGKGLEWIGHIYYSGVTYYNPSLKSRVTISVDTSRNQFSLKLSSVTAADTAVYYCTREDSSNWRSRGQGTLVTVSSGSGGGGSGGGGSGGGGSFEQVQLQESGPGLVKPSETLSLTCTVSGYTITSGYDWSWIRQPPGKGLEWIGYINYGGSTNYKPSLGSRVTISVDTSKNQFSLKLSSVTAADTAVYYCARYNEYKSYIYDWYFDFWGQGTLVTVSSTRIQNPDPAVYQLRDSKSSDKSVCLFTDFDSQTNVSQSKDSDVYITDKCVLDMRSMDFKSNSAVAWSNKSDFACANAFNNSIIPEDTFFPSPESSDSTDHVKPKETENTKQPSKSCHKPKAIVHTEKVNMMSLTVLGLRMLFAKTVAVNFLLTAKLFFL

SEQ ID NO: 16190 - protein, 1001 aa, synthetic construct
MALPVTALLLPLALLLHAARPEVQLVESGGGLVQPGGSLRLSCAASGFSFSDFWMSWVRQAPGKGLEWVATISQAGSEKDYVDSVKGRFTISRDNAKKSLYLQMNSLRAEDTAVYYCASGVYSFDYRGQGTLVTVSSGTGGGGSGGGGSGGGGSEFQSVVTQPPSVSAAPGQKVTISCSGSSSNIGNNYVSWYQQLPGTAPKLLIYDNNKRPSGIPDRFSGSKSGTSATLGITGLQTGDEADYYCGTWDGSLYTMLFGGGTKLTVLLEDLKNVFPPEVAVFEPSEAEISHTQKATLVCLATGFYPDHVELSWWVNGKEVHSGVCTDPQPLKEQPALNDSRYCLSSRLRVSATFWQNPRNHFRCQVQFYGLSENDEWTQDRAKPVTQIVSAEAWGRADDVIKIHWQEKKSNTILGSQEGNTMKTNDTYMKFSWLTVPEKSLDKEHRCIVRHENNKNGVDQEIIFPPIKTDVITMDPKDNCSKDANDTLLLQLTNTSAYYMYLLLLLKSVVYFAIITCCLLRRTAFCCNGEKSRAKRSGSGATNFSLLKQAGDVEENPGPTSMDWIWRILFLVGAATGAHSGPQLQLQESGPGLVKPSETLSLTCTVSGDSISSGDYYWGWIRQPPGKGLEWIGHIYYSGVTYYNPSLKSRVTISVDTSRNQFSLKLSSVTAADTAVYYCTREDSSNWRSRGQGTLVTVSSGSGGGGSGGGGSGGGGSFEEVQLVESGGGLVKPGGSLRLSCAASGFTFSNAWMSWVRQAPGKGLEWVGFIRSKAYGGTTEYAASVKGRFTISRDDSKSIAYLQMNNLKTEDTAVYYCARDGLYSSSWYDSDYWGQGTLVTVSSTRIQNPDPAVYQLRDSKSSDKSVCLFTDFDSQTNVSQSKDSDVYITDKCVLDMRSMDFKSNSAVAWSNKSDFACANAFNNSIIPEDTFFPSPESSDSTDHVKPKETENTKQPSKSCHKPKAIVHTEKVNMMSLTVLGLRMLFAKTVAVNFLLTAKLFFL

SEQ ID NO: 16191 - protein, 1006 aa, synthetic construct
MALPVTALLLPLALLLHAARPEVQLVESGGGLVQPGGSLRLSCAASGFSFSDFWMSWVRQAPGKGLEWVATISQAGSEKDYVDSVKGRFTISRDNAKKSLYLQMNSLRAEDTAVYYCASGVYSFDYRGQGTLVTVSSGTGGGGSGGGGSGGGGSEFQSVLTQPPSVSGAPGQRVTISCTGSSSNIGAGYDVHWYQQLPGTAPKLLIFGNSNRPSGVPDRFSGFKSGTSASLAITGLQAEDEADYFCQSYDSSLSGSGVFGTGTKVTVLGLEDLKNVFPPEVAVFEPSEAEISHTQKATLVCLATGFYPDHVELSWWVNGKEVHSGVCTDPQPLKEQPALNDSRYCLSSRLRVSATFWQNPRNHFRCQVQFYGLSENDEWTQDRAKPVTQIVSAEAWGRADDVIKIHWQEKKSNTILGSQEGNTMKTNDTYMKFSWLTVPEKSLDKEHRCIVRHENNKNGVDQEIIFPPIKTDVITMDPKDNCSKDANDTLLLQLTNTSAYYMYLLLLLKSVVYFAIITCCLLRRTAFCCNGEKSRAKRSGSGATNFSLLKQAGDVEENPGPTSMDWIWRILFLVGAATGAHSGPQLQLQESGPGLVKPSETLSLTCTVSGDSISSGDYYWGWIRQPPGKGLEWIGHIYYSGVTYYNPSLKSRVTISVDTSRNQFSLKLSSVTAADTAVYYCTREDSSNWRSRGQGTLVTVSSGSGGGGSGGGGSGGGGSFEQMQLVQSGGGLVQPGRSLRLSCAASGFTFDDYAMHWVRQAPGKGLEWVSGISWNSGSIGYADSVKGRFTISRDNAKNSLYLQMNSLRAEDTALYYCAKDIHSGSYYGLLYYAMDVWGQGTTVTVSSTRIQNPDPAVYQLRDSKSSDKSVCLFTDFDSQTNVSQSKDSDVYITDKCVLDMRSMDFKSNSAVAWSNKSDFACANAFNNSIIPEDTFFPSPESSDSTDHVKPKETENTKQPSKSCHKPKAIVHTEKVNMMSLTVLGLRMLFAKTVAVNFLLTAKLFFL

SEQ ID NO: 16192 - protein, 1006 aa, synthetic construct
MALPVTALLLPLALLLHAARPEVQLVESGGGLVQPGGSLRLSCAASGFSFSDFWMSWVRQAPGKGLEWVATISQAGSEKDYVDSVKGRFTISRDNAKKSLYLQMNSLRAEDTAVYYCASGVYSFDYRGQGTLVTVSSGTGGGGSGGGGSGGGGSEFLPVLTQPPSASGTPGQRVTISCSGRSSNIGSNSVNWYRQLPGAAPKLLIYSNNQRPPGVPVRFSGSKSGTSASLAISGLQSEDEATYYCATWDDNLNVHYVFGTGTKVTVLGSRLEDLKNVFPPEVAVFEPSEAEISHTQKATLVCLATGFYPDHVELSWWVNGKEVHSGVCTDPQPLKEQPALNDSRYCLSSRLRVSATFWQNPRNHFRCQVQFYGLSENDEWTQDRAKPVTQIVSAEAWGRADDVIKIHWQEKKSNTILGSQEGNTMKTNDTYMKFSWLTVPEKSLDKEHRCIVRHENNKNGVDQEIIFPPIKTDVITMDPKDNCSKDANDTLLLQLTNTSAYYMYLLLLLKSVVYFAIITCCLLRRTAFCCNGEKSRAKRSGSGATNFSLLKQAGDVEENPGPTSMDWIWRILFLVGAATGAHSGPQLQLQESGPGLVKPSETLSLTCTVSGDSISSGDYYWGWIRQPPGKGLEWIGHIYYSGVTYYNPSLKSRVTISVDTSRNQFSLKLSSVTAADTAVYYCTREDSSNWRSRGQGTLVTVSSGSGGGGSGGGGSGGGGSFELEMAQVQLVQSGAEVKKPGSSVKVSCKASGGTFSSYAISWVRQAPGQGLEWMGRIIPILGIANYAQKFQGRVTITADKSTSTAYMELSSLRSEDTAVYYCARGGYYSHDMWSEDWGQGTLVTVSSTRIQNPDPAVYQLRDSKSSDKSVCLFTDFDSQTNVSQSKDSDVYITDKCVLDMRSMDFKSNSAVAWSNKSDFACANAFNNSIIPEDTFFPSPESSDSTDHVKPKETENTKQPSKSCHKPKAIVHTEKVNMMSLTVLGLRMLFAKTVAVNFLLTAKLFFL

SEQ ID NO: 16193 - protein, 1000 aa, synthetic construct
MALPVTALLLPLALLLHAARPEVQLVESGGGLVQPGGSLRLSCAASGFSFSDFWMSWVRQAPGKGLEWVATISQAGSEKDYVDSVKGRFTISRDNAKKSLYLQMNSLRAEDTAVYYCASGVYSFDYRGQGTLVTVSSGTGGGGSGGGGSGGGGSEFDFVMTQSPDSLAVSLGERVTMSCKSSQSLLNSGNQKNYLTWYQQKPGQPPKLLIYWASTRESGVPDRFSGSGSGTDFTLTISSLQAEDVAVYYCQNDYSYPYTFGQGTKLEIKLEDLKNVFPPEVAVFEPSEAEISHTQKATLVCLATGFYPDHVELSWWVNGKEVHSGVCTDPQPLKEQPALNDSRYCLSSRLRVSATFWQNPRNHFRCQVQFYGLSENDEWTQDRAKPVTQIVSAEAWGRADDVIKIHWQEKKSNTILGSQEGNTMKTNDTYMKFSWLTVPEKSLDKEHRCIVRHENNKNGVDQEIIFPPIKTDVITMDPKDNCSKDANDTLLLQLTNTSAYYMYLLLLLKSVVYFAIITCCLLRRTAFCCNGEKSRAKRSGSGATNFSLLKQAGDVEENPGPTSMDWIWRILFLVGAATGAHSGPQLQLQESGPGLVKPSETLSLTCTVSGDSISSGDYYWGWIRQPPGKGLEWIGHIYYSGVTYYNPSLKSRVTISVDTSRNQFSLKLSSVTAADTAVYYCTREDSSNWRSRGQGTLVTVSSGSGGGGSGGGGSGGGGSFEEVQLVQSGAELKKPGASVKVSCKASGYTFTDYYMKWVRQAPGQGLEWIGDIIPSNGATFYNQKFKGRVTITVDKSTSTAYMELSSLRSEDTAVYYCARSHLLRASWFAYWGQGTLVTVSSTRIQNPDPAVYQLRDSKSSDKSVCLFTDFDSQTNVSQSKDSDVYITDKCVLDMRSMDFKSNSAVAWSNKSDFACANAFNNSIIPEDTFFPSPESSDSTDHVKPKETENTKQPSKSCHKPKAIVHTEKVNMMSLTVLGLRMLFAKTVAVNFLLTAKLFFL

SEQ ID NO: 16194 - protein, 1000 aa, synthetic construct
MALPVTALLLPLALLLHAARPEVQLVESGGGLVQPGGSLRLSCAASGFSFSDFWMSWVRQAPGKGLEWVATISQAGSEKDYVDSVKGRFTISRDNAKKSLYLQMNSLRAEDTAVYYCASGVYSFDYRGQGTLVTVSSGTGGGGSGGGGSGGGGSEFDFVMTQSPDSLAVSLGERVTMSCKSSQSLLNSGNQKNYLTWYQQKPGQPPKLLIYWASTRESGVPDRFSGSGSGTDFTLTISSLQAEDVAVYYCQNDYSYPYTFGQGTKLEIKLEDLKNVFPPEVAVFEPSEAEISHTQKATLVCLATGFYPDHVELSWWVNGKEVHSGVCTDPQPLKEQPALNDSRYCLSSRLRVSATFWQNPRNHFRCQVQFYGLSENDEWTQDRAKPVTQIVSAEAWGRADDVIKIHWQEKKSNTILGSQEGNTMKTNDTYMKFSWLTVPEKSLDKEHRCIVRHENNKNGVDQEIIFPPIKTDVITMDPKDNCSKDANDTLLLQLTNTSAYYMYLLLLLKSVVYFAIITCCLLRRTAFCCNGEKSRAKRSGSGATNFSLLKQAGDVEENPGPTSMDWIWRILFLVGAATGAHSGPQLQLQESGPGLVKPSETLSLTCTVSGDSISSGDYYWGWIRQPPGKGLEWIGHIYYSGVTYYNPSLKSRVTISVDTSRNQFSLKLSSVTAADTAVYYCTREDSSNWRSRGQGTLVTVSSGSGGGGSGGGGSGGGGSFEQVQLVQSGAELKKPGASVKVSCKASGYTFTDYYMKWVRQAPGQGLEWIGDIIPSNGATFYNQKFKGRVTITVDKSTSTAYMELSSLRSEDTAVYYCARSHLLRASWFAYWGQGTLVTVSSTRIQNPDPAVYQLRDSKSSDKSVCLFTDFDSQTNVSQSKDSDVYITDKCVLDMRSMDFKSNSAVAWSNKSDFACANAFNNSIIPEDTFFPSPESSDSTDHVKPKETENTKQPSKSCHKPKAIVHTEKVNMMSLTVLGLRMLFAKTVAVNFLLTAKLFFL

SEQ ID NO: 16195 - protein, 990 aa, synthetic construct
MALPVTALLLPLALLLHAARPEVQLVESGGGLVQPGGSLRLSCAASGFSFSDFWMSWVRQAPGKGLEWVATISQAGSEKDYVDSVKGRFTISRDNAKKSLYLQMNSLRAEDTAVYYCASGVYSFDYRGQGTLVTVSSGTGGGGSGGGGSGGGGSEFDVQITQSPSYLAASPGETITINCRASKSISKDLAWYQEKPGKTNKLLIYSGSTLQSGIPSRFSGSGSGTDFTLTISSLEPEDFAMYYCQQHNKYPYTFGGGTKLEIKRLEDLKNVFPPEVAVFEPSEAEISHTQKATLVCLATGFYPDHVELSWWVNGKEVHSGVCTDPQPLKEQPALNDSRYCLSSRLRVSATFWQNPRNHFRCQVQFYGLSENDEWTQDRAKPVTQIVSAEAWGRADDVIKIHWQEKKSNTILGSQEGNTMKTNDTYMKFSWLTVPEKSLDKEHRCIVRHENNKNGVDQEIIFPPIKTDVITMDPKDNCSKDANDTLLLQLTNTSAYYMYLLLLLKSVVYFAIITCCLLRRTAFCCNGEKSRAKRSGSGATNFSLLKQAGDVEENPGPTSMDWIWRILFLVGAATGAHSGPQLQLQESGPGLVKPSETLSLTCTVSGDSISSGDYYWGWIRQPPGKGLEWIGHIYYSGVTYYNPSLKSRVTISVDTSRNQFSLKLSSVTAADTAVYYCTREDSSNWRSRGQGTLVTVSSGSGGGGSGGGGSGGGGSFEQVQLQQPGAELVRPGASVKLSCKASGYTFTSYWMNWVKQRPDQGLEWIGRIDPYDSETHYNQKFKDKAILTVDKSSSTAYMQLSSLTSEDSAVYYCARGNWDDYWGQGTTLTVSSTRIQNPDPAVYQLRDSKSSDKSVCLFTDFDSQTNVSQSKDSDVYITDKCVLDMRSMDFKSNSAVAWSNKSDFACANAFNNSIIPEDTFFPSPESSDSTDHVKPKETENTKQPSKSCHKPKAIVHTEKVNMMSLTVLGLRMLFAKTVAVNFLLTAKLFFL

SEQ ID NO: 16196 - protein, 992 aa, synthetic construct
MALPVTALLLPLALLLHAARPEVQLVESGGGLVQPGGSLRLSCAASGFSFSDFWMSWVRQAPGKGLEWVATISQAGSEKDYVDSVKGRFTISRDNAKKSLYLQMNSLRAEDTAVYYCASGVYSFDYRGQGTLVTVSSGTGGGGSGGGGSGGGGSEFEIVLTQSPTSMTASPGEQVTITCRASSSINYMHWYQQKPGASPRPWIYETSKLASGVPDRFSGSASGTSYSLTINNMEAEDAATYYCQQWNYPSWTFGGGTKLELKLEDLKNVFPPEVAVFEPSEAEISHTQKATLVCLATGFYPDHVELSWWVNGKEVHSGVCTDPQPLKEQPALNDSRYCLSSRLRVSATFWQNPRNHFRCQVQFYGLSENDEWTQDRAKPVTQIVSAEAWGRADDVIKIHWQEKKSNTILGSQEGNTMKTNDTYMKFSWLTVPEKSLDKEHRCIVRHENNKNGVDQEIIFPPIKTDVITMDPKDNCSKDANDTLLLQLTNTSAYYMYLLLLLKSVVYFAIITCCLLRRTAFCCNGEKSRAKRSGSGATNFSLLKQAGDVEENPGPTSMDWIWRILFLVGAATGAHSGPQLQLQESGPGLVKPSETLSLTCTVSGDSISSGDYYWGWIRQPPGKGLEWIGHIYYSGVTYYNPSLKSRVTISVDTSRNQFSLKLSSVTAADTAVYYCTREDSSNWRSRGQGTLVTVSSGSGGGGSGGGGSGGGGSFEEVQLVESGGGLVQPGRSLKLSCAASGFTFSDYNMAWVRQAPKKGLEWVATILYDGGRTYYRGSVKGRFTISRDNAKSTLYLRMDSLRSEDTATYYCATHSRGTDYFDYWGQGVMVTVSSTRIQNPDPAVYQLRDSKSSDKSVCLFTDFDSQTNVSQSKDSDVYITDKCVLDMRSMDFKSNSAVAWSNKSDFACANAFNNSIIPEDTFFPSPESSDSTDHVKPKETENTKQPSKSCHKPKAIVHTEKVNMMSLTVLGLRMLFAKTVAVNFLLTAKLFFL

SEQ ID NO: 16197 - protein, 1001 aa, synthetic construct
MALPVTALLLPLALLLHAARPEVQLVESGGGLVQPGGSLRLSCAASGFSFSDFWMSWVRQAPGKGLEWVATISQAGSEKDYVDSVKGRFTISRDNAKKSLYLQMNSLRAEDTAVYYCASGVYSFDYRGQGTLVTVSSGTGGGGSGGGGSGGGGSEFDIVMTQSPSSLAVSEGETVTINCKSSQSFLSSGDGKNYVAWYQYKPGQSPKLLIYWASTRQSGVPDRFIGSGSGTDFTLTISTVQAEDLAIYYCQQYYDTPLTFGSGTKLEIKLEDLKNVFPPEVAVFEPSEAEISHTQKATLVCLATGFYPDHVELSWWVNGKEVHSGVCTDPQPLKEQPALNDSRYCLSSRLRVSATFWQNPRNHFRCQVQFYGLSENDEWTQDRAKPVTQIVSAEAWGRADDVIKIHWQEKKSNTILGSQEGNTMKTNDTYMKFSWLTVPEKSLDKEHRCIVRHENNKNGVDQEIIFPPIKTDVITMDPKDNCSKDANDTLLLQLTNTSAYYMYLLLLLKSVVYFAIITCCLLRRTAFCCNGEKSRAKRSGSGATNFSLLKQAGDVEENPGPTSMDWIWRILFLVGAATGAHSGPQLQLQESGPGLVKPSETLSLTCTVSGDSISSGDYYWGWIRQPPGKGLEWIGHIYYSGVTYYNPSLKSRVTISVDTSRNQFSLKLSSVTAADTAVYYCTREDSSNWRSRGQGTLVTVSSGSGGGGSGGGGSGGGGSFEEVKLQESGPSLVQSSQTLSLTCTVSGFSLTSYHIHWVRQTPGKGLEWMGVMWSDGDTSYNSALKSRLSISRDTSQSQVFLKMNSLQTEDTATYYCARGYYSSYLYLWFAYWGQGTLVTVSSTRIQNPDPAVYQLRDSKSSDKSVCLFTDFDSQTNVSQSKDSDVYITDKCVLDMRSMDFKSNSAVAWSNKSDFACANAFNNSIIPEDTFFPSPESSDSTDHVKPKETENTKQPSKSCHKPKAIVHTEKVNMMSLTVLGLRMLFAKTVAVNFLLTAKLFFL

SEQ ID NO: 16198 - protein, 1005 aa, synthetic construct
MALPVTALLLPLALLLHAARPEVQLVESGGGLVQPGGSLRLSCAASGFSFSDFWMSWVRQAPGKGLEWVATISQAGSEKDYVDSVKGRFTISRDNAKKSLYLQMNSLRAEDTAVYYCASGVYSFDYRGQGTLVTVSSGTGGGGSGGGGSGGGGSEFDVLMTQTPVSLPVSLGGQVSISCRSSQSLVHSDGDTYLHWYLQKPGQSPQLLIYRVSNRFSGVPDRFSGSGSGTDFTLKISRVEPEDLGLYYCLQTTHFPPWTFGGGTKLEMKLEDLKNVFPPEVAVFEPSEAEISHTQKATLVCLATGFYPDHVELSWWVNGKEVHSGVCTDPQPLKEQPALNDSRYCLSSRLRVSATFWQNPRNHFRCQVQFYGLSENDEWTQDRAKPVTQIVSAEAWGRADDVIKIHWQEKKSNTILGSQEGNTMKTNDTYMKFSWLTVPEKSLDKEHRCIVRHENNKNGVDQEIIFPPIKTDVITMDPKDNCSKDANDTLLLQLTNTSAYYMYLLLLLKSVVYFAIITCCLLRRTAFCCNGEKSRAKRSGSGATNFSLLKQAGDVEENPGPTSMDWIWRILFLVGAATGAHSGPQLQLQESGPGLVKPSETLSLTCTVSGDSISSGDYYWGWIRQPPGKGLEWIGHIYYSGVTYYNPSLKSRVTISVDTSRNQFSLKLSSVTAADTAVYYCTREDSSNWRSRGQGTLVTVSSGSGGGGSGGGGSGGGGSFEQVQLQQSGPELRRPGSSVRLSCKASGYRIKDFLIHWIKNRPEHGLEWIGWIDPEDGETKYAQKFQTKATLTADTSSNTAYMQLSSLTSEDTATYFCARWGDVYYGLMRGHVMDAWGQGTSVTVSSTRIQNPDPAVYQLRDSKSSDKSVCLFTDFDSQTNVSQSKDSDVYITDKCVLDMRSMDFKSNSAVAWSNKSDFACANAFNNSIIPEDTFFPSPESSDSTDHVKPKETENTKQPSKSCHKPKAIVHTEKVNMMSLTVLGLRMLFAKTVAVNFLLTAKLFFL

SEQ ID NO: 16199 - protein, 1000 aa, synthetic construct
MALPVTALLLPLALLLHAARPEVQLVESGGGLVQPGGSLRLSCAASGFSFSDFWMSWVRQAPGKGLEWVATISQAGSEKDYVDSVKGRFTISRDNAKKSLYLQMNSLRAEDTAVYYCASGVYSFDYRGQGTLVTVSSGTGGGGSGGGGSGGGGSEFDIVMTQSPATLSLSPGERATLSCRSSKSLQNVNGNTYLYWFQQKPGQSPQLLIYRMSNLNSGVPDRFSGSGSGTEFTLTISSLEPEDFAVYYCMQHLEYPITFGAGTKLEIKLEDLKNVFPPEVAVFEPSEAEISHTQKATLVCLATGFYPDHVELSWWVNGKEVHSGVCTDPQPLKEQPALNDSRYCLSSRLRVSATFWQNPRNHFRCQVQFYGLSENDEWTQDRAKPVTQIVSAEAWGRADDVIKIHWQEKKSNTILGSQEGNTMKTNDTYMKFSWLTVPEKSLDKEHRCIVRHENNKNGVDQEIIFPPIKTDVITMDPKDNCSKDANDTLLLQLTNTSAYYMYLLLLLKSVVYFAIITCCLLRRTAFCCNGEKSRAKRSGSGATNFSLLKQAGDVEENPGPTSMDWIWRILFLVGAATGAHSGPQLQLQESGPGLVKPSETLSLTCTVSGDSISSGDYYWGWIRQPPGKGLEWIGHIYYSGVTYYNPSLKSRVTISVDTSRNQFSLKLSSVTAADTAVYYCTREDSSNWRSRGQGTLVTVSSGSGGGGSGGGGSGGGGSFEEVQLVESGGGLVKPGGSLKLSCAASGYTFTSYVMHWVRQAPGKGLEWIGYINPYNDGTKYNEKFQGRVTISSDKSISTAYMELSSLRSEDTAMYYCARGTYYYGTRVFDYWGQGTLVTVSSTRIQNPDPAVYQLRDSKSSDKSVCLFTDFDSQTNVSQSKDSDVYITDKCVLDMRSMDFKSNSAVAWSNKSDFACANAFNNSIIPEDTFFPSPESSDSTDHVKPKETENTKQPSKSCHKPKAIVHTEKVNMMSLTVLGLRMLFAKTVAVNFLLTAKLFFL

SEQ ID NO: 16200 - protein, 996 aa, synthetic construct
MALPVTALLLPLALLLHAARPEVQLVESGGGLVQPGGSLRLSCAASGFSFSDFWMSWVRQAPGKGLEWVATISQAGSEKDYVDSVKGRFTISRDNAKKSLYLQMNSLRAEDTAVYYCASGVYSFDYRGQGTLVTVSSGTGGGGSGGGGSGGGGSEFDIQMTQSPSSLSASVGDRVTITCKASDHINNWLAWYQQKPGQAPKLLIYGATTLETGVPSRFSGSGSGTDYTLTISSLQPEDFATYYCQQSWNTPWTFGQGTKLEIKRLEDLKNVFPPEVAVFEPSEAEISHTQKATLVCLATGFYPDHVELSWWVNGKEVHSGVCTDPQPLKEQPALNDSRYCLSSRLRVSATFWQNPRNHFRCQVQFYGLSENDEWTQDRAKPVTQIVSAEAWGRADDVIKIHWQEKKSNTILGSQEGNTMKTNDTYMKFSWLTVPEKSLDKEHRCIVRHENNKNGVDQEIIFPPIKTDVITMDPKDNCSKDANDTLLLQLTNTSAYYMYLLLLLKSVVYFAIITCCLLRRTAFCCNGEKSRAKRSGSGATNFSLLKQAGDVEENPGPTSMDWIWRILFLVGAATGAHSGPQLQLQESGPGLVKPSETLSLTCTVSGDSISSGDYYWGWIRQPPGKGLEWIGHIYYSGVTYYNPSLKSRVTISVDTSRNQFSLKLSSVTAADTAVYYCTREDSSNWRSRGQGTLVTVSSGSGGGGSGGGGSGGGGSFEQVQLQQPGAELVKPGASVKMSCKASGYAFSSYWINWMKQKPGQGLEWIGQIYPGDGDTNYNGKFKGRATLTADTSSSTAYMQLSSLTSEDSAVYFCARSITTVVGCAMDYWGQGTSVTVSSTRIQNPDPAVYQLRDSKSSDKSVCLFTDFDSQTNVSQSKDSDVYITDKCVLDMRSMDFKSNSAVAWSNKSDFACANAFNNSIIPEDTFFPSPESSDSTDHVKPKETENTKQPSKSCHKPKAIVHTEKVNMMSLTVLGLRMLFAKTVAVNFLLTAKLFFL

SEQ ID NO: 16201 - protein, 998 aa, synthetic construct
MALPVTALLLPLALLLHAARPEVQLVESGGGLVQPGGSLRLSCAASGFSFSDFWMSWVRQAPGKGLEWVATISQAGSEKDYVDSVKGRFTISRDNAKKSLYLQMNSLRAEDTAVYYCASGVYSFDYRGQGTLVTVSSGTGGGGSGGGGSGGGGSEFQIVLSQSPAILSASPGEKVTMTCRASSSVSYMHWYQQKPGSSPKPWIYATSNLASGVPARFSGSGSGTSYSFTISRVEAEDAATYYCQQWTFNPPTFGGGTRLEIKRTVAALEDLKNVFPPEVAVFEPSEAEISHTQKATLVCLATGFYPDHVELSWWVNGKEVHSGVCTDPQPLKEQPALNDSRYCLSSRLRVSATFWQNPRNHFRCQVQFYGLSENDEWTQDRAKPVTQIVSAEAWGRADDVIKIHWQEKKSNTILGSQEGNTMKTNDTYMKFSWLTVPEKSLDKEHRCIVRHENNKNGVDQEIIFPPIKTDVITMDPKDNCSKDANDTLLLQLTNTSAYYMYLLLLLKSVVYFAIITCCLLRRTAFCCNGEKSRAKRSGSGATNFSLLKQAGDVEENPGPTSMDWIWRILFLVGAATGAHSGPQLQLQESGPGLVKPSETLSLTCTVSGDSISSGDYYWGWIRQPPGKGLEWIGHIYYSGVTYYNPSLKSRVTISVDTSRNQFSLKLSSVTAADTAVYYCTREDSSNWRSRGQGTLVTVSSGSGGGGSGGGGSGGGGSFEQAYLQQSGAELVRPGASVKMSCKASGYTFTSYNMHWVKQTPRQGLEWIGGIYPGNGDTSYNQKFKGKATLTVGKSSSTAYMQLSSLTSEDSAVYFCARYDYNYAMDYWGQGTSVTVSSASTRIQNPDPAVYQLRDSKSSDKSVCLFTDFDSQTNVSQSKDSDVYITDKCVLDMRSMDFKSNSAVAWSNKSDFACANAFNNSIIPEDTFFPSPESSDSTDHVKPKETENTKQPSKSCHKPKAIVHTEKVNMMSLTVLGLRMLFAKTVAVNFLLTAKLFFL

SEQ ID NO: 16202 - protein, 996 aa, synthetic construct
MALPVTALLLPLALLLHAARPEVQLVESGGGLVQPGGSLRLSCAASGFSFSDFWMSWVRQAPGKGLEWVATISQAGSEKDYVDSVKGRFTISRDNAKKSLYLQMNSLRAEDTAVYYCASGVYSFDYRGQGTLVTVSSGTGGGGSGGGGSGGGGSEFEIVLTQSPATLSLSPGERATLSCRASQSVSSYLAWYQQKPGQAPRLLIYDASNRATGIPARFSGSGSGTDFTLTISSLEPEDFAVYYCQQRSNWPITFGQGTRLEIKLEDLKNVFPPEVAVFEPSEAEISHTQKATLVCLATGFYPDHVELSWWVNGKEVHSGVCTDPQPLKEQPALNDSRYCLSSRLRVSATFWQNPRNHFRCQVQFYGLSENDEWTQDRAKPVTQIVSAEAWGRADDVIKIHWQEKKSNTILGSQEGNTMKTNDTYMKFSWLTVPEKSLDKEHRCIVRHENNKNGVDQEIIFPPIKTDVITMDPKDNCSKDANDTLLLQLTNTSAYYMYLLLLLKSVVYFAIITCCLLRRTAFCCNGEKSRAKRSGSGATNFSLLKQAGDVEENPGPTSMDWIWRILFLVGAATGAHSGPQLQLQESGPGLVKPSETLSLTCTVSGDSISSGDYYWGWIRQPPGKGLEWIGHIYYSGVTYYNPSLKSRVTISVDTSRNQFSLKLSSVTAADTAVYYCTREDSSNWRSRGQGTLVTVSSGSGGGGSGGGGSGGGGSFEEVQLVESGGGLVQPDRSLRLSCAASGFTFHDYAMHWVRQAPGKGLEWVSTISWNSGTIGYADSVKGRFTISRDNAKNSLYLQMNSLRAEDTALYYCAKDIQYGNYYYGMDVWGQGTTVTVSSTRIQNPDPAVYQLRDSKSSDKSVCLFTDFDSQTNVSQSKDSDVYITDKCVLDMRSMDFKSNSAVAWSNKSDFACANAFNNSIIPEDTFFPSPESSDSTDHVKPKETENTKQPSKSCHKPKAIVHTEKVNMMSLTVLGLRMLFAKTVAVNFLLTAKLFFL

SEQ ID NO: 16203 - protein, 991 aa, synthetic construct
MALPVTALLLPLALLLHAARPEVQLVESGGGLVQPGGSLRLSCAASGFSFSDFWMSWVRQAPGKGLEWVATISQAGSEKDYVDSVKGRFTISRDNAKKSLYLQMNSLRAEDTAVYYCASGVYSFDYRGQGTLVTVSSGTGGGGSGGGGSGGGGSEFDIQMTQSPSSLSASVGDRVTINCKASQDINSYLSWFQQKPGKAPKTLIYRANRLVDGVPSRFSGSGSGQDYTLTISSLQPEDFATYYCLQYDEFPLTFGGGTKVEIKLEDLKNVFPPEVAVFEPSEAEISHTQKATLVCLATGFYPDHVELSWWVNGKEVHSGVCTDPQPLKEQPALNDSRYCLSSRLRVSATFWQNPRNHFRCQVQFYGLSENDEWTQDRAKPVTQIVSAEAWGRADDVIKIHWQEKKSNTILGSQEGNTMKTNDTYMKFSWLTVPEKSLDKEHRCIVRHENNKNGVDQEIIFPPIKTDVITMDPKDNCSKDANDTLLLQLTNTSAYYMYLLLLLKSVVYFAIITCCLLRRTAFCCNGEKSRAKRSGSGATNFSLLKQAGDVEENPGPTSMDWIWRILFLVGAATGAHSGPQLQLQESGPGLVKPSETLSLTCTVSGDSISSGDYYWGWIRQPPGKGLEWIGHIYYSGVTYYNPSLKSRVTISVDTSRNQFSLKLSSVTAADTAVYYCTREDSSNWRSRGQGTLVTVSSGSGGGGSGGGGSGGGGSFEQVQLVQSGAEVKKPGASVKVSCKASGYTFTNYDINWVRQAPGQGLEWIGWIYPGDGSTKYNEKFKAKATLTADTSTSTAYMELRSLRSDDTAVYYCASGYEDAMDYWGQGTTVTVSSTRIQNPDPAVYQLRDSKSSDKSVCLFTDFDSQTNVSQSKDSDVYITDKCVLDMRSMDFKSNSAVAWSNKSDFACANAFNNSIIPEDTFFPSPESSDSTDHVKPKETENTKQPSKSCHKPKAIVHTEKVNMMSLTVLGLRMLFAKTVAVNFLLTAKLFFL

SEQ ID NO: 16204 - protein, 993 aa, synthetic construct
MALPVTALLLPLALLLHAARPEVQLVESGGGLVQPGGSLRLSCAASGFSFSDFWMSWVRQAPGKGLEWVATISQAGSEKDYVDSVKGRFTISRDNAKKSLYLQMNSLRAEDTAVYYCASGVYSFDYRGQGTLVTVSSGTGGGGSGGGGSGGGGSEFDIVMTQTPLSLSVTPGQPASISCKSSQSLLDGDGKTYLNWLLQKPGQSPQRLIYLVSKLDSGVPDRFSGSGSGTDFTLKISRVEAEDVGVYYCWQGTHFPRTFGQGTKLEIKLEDLKNVFPPEVAVFEPSEAEISHTQKATLVCLATGFYPDHVELSWWVNGKEVHSGVCTDPQPLKEQPALNDSRYCLSSRLRVSATFWQNPRNHFRCQVQFYGLSENDEWTQDRAKPVTQIVSAEAWGRADDVIKIHWQEKKSNTILGSQEGNTMKTNDTYMKFSWLTVPEKSLDKEHRCIVRHENNKNGVDQEIIFPPIKTDVITMDPKDNCSKDANDTLLLQLTNTSAYYMYLLLLLKSVVYFAIITCCLLRRTAFCCNGEKSRAKRSGSGATNFSLLKQAGDVEENPGPTSMDWIWRILFLVGAATGAHSGPQLQLQESGPGLVKPSETLSLTCTVSGDSISSGDYYWGWIRQPPGKGLEWIGHIYYSGVTYYNPSLKSRVTISVDTSRNQFSLKLSSVTAADTAVYYCTREDSSNWRSRGQGTLVTVSSGSGGGGSGGGGSGGGGSFEQVQLVQSGAEVKKPGASVKVSCKASGYTFKDTYIHWVRQAPGQGLEWMGRIDPANGNTKYDPKFQGRVTMTRDTSISTAYMELSRLRSDDTAVYYCARRGGVDWGQGTLVTVSSTRIQNPDPAVYQLRDSKSSDKSVCLFTDFDSQTNVSQSKDSDVYITDKCVLDMRSMDFKSNSAVAWSNKSDFACANAFNNSIIPEDTFFPSPESSDSTDHVKPKETENTKQPSKSCHKPKAIVHTEKVNMMSLTVLGLRMLFAKTVAVNFLLTAKLFFL

SEQ ID NO: 16205 - protein, 994 aa, synthetic construct
MALPVTALLLPLALLLHAARPEVQLVESGGGLVQPGGSLRLSCAASGFSFSDFWMSWVRQAPGKGLEWVATISQAGSEKDYVDSVKGRFTISRDNAKKSLYLQMNSLRAEDTAVYYCASGVYSFDYRGQGTLVTVSSGTGGGGSGGGGSGGGGSEFDIQMTQSPSSLSASVGDRVTITCKASQDVSTAVAWFQQKPGKAPKLLIYSPSYRYTGVPSRFSGSGSGTDFTLTISSLQPEDFTYYCQQLYSTPYTFGQGTKVEIKLEDLKNVFPPEVAVFEPSEAEISHTQKATLVCLATGFYPDHVELSWWVNGKEVHSGVCTDPQPLKEQPALNDSRYCLSSRLRVSATFWQNPRNHFRCQVQFYGLSENDEWTQDRAKPVTQIVSAEAWGRADDVIKIHWQEKKSNTILGSQEGNTMKTNDTYMKFSWLTVPEKSLDKEHRCIVRHENNKNGVDQEIIFPPIKTDVITMDPKDNCSKDANDTLLLQLTNTSAYYMYLLLLLKSVVYFAIITCCLLRRTAFCCNGEKSRAKRSGSGATNFSLLKQAGDVEENPGPTSMDWIWRILFLVGAATGAHSGPQLQLQESGPGLVKPSETLSLTCTVSGDSISSGDYYWGWIRQPPGKGLEWIGHIYYSGVTYYNPSLKSRVTISVDTSRNQFSLKLSSVTAADTAVYYCTREDSSNWRSRGQGTLVTVSSGSGGGGSGGGGSGGGGSFEEVQLVQSGAEVKKPGASVKVSCKASGYTFTDYYLDVVVRQAPGQGLEWIGRVNPYNGGTIYNQKFKGRVTLTRDTSTSTAYLELSSLRSEDTAVYYCARDHYRYDPLLDYWGQGTLVTVSSTRIQNPDPAVYQLRDSKSSDKSVCLFTDFDSQTNVSQSKDSDVYITDKCVLDMRSMDFKSNSAVAWSNKSDFACANAFNNSIIPEDTFFPSPESSDSTDHVKPKETENTKQPSKSCHKPKAIVHTEKVNMMSLTVLGLRMLFAKTVAVNFLLTAKLFFL

SEQ ID NO: 16206 - protein, 1000 aa, synthetic construct
MALPVTALLLPLALLLHAARPEVQLVESGGGLVQPGGSLRLSCAASGFSFSDFWMSWVRQAPGKGLEWVATISQAGSEKDYVDSVKGRFTISRDNAKKSLYLQMNSLRAEDTAVYYCASGVYSFDYRGQGTLVTVSSGTGGGGSGGGGSGGGGSEFDIQMTQSPSSLSASVGDRVTITCRASQSVSTSSYNYMHWYQQKPGKPPKLLIKYASNLESGVPSRFSGSGSGTDFTLTISSLQPEDFATYYCQHSWEIPLTFGQGTKVEIKLEDLKNVFPPEVAVFEPSEAEISHTQKATLVCLATGFYPDHVELSWWVNGKEVHSGVCTDPQPLKEQPALNDSRYCLSSRLRVSATFWQNPRNHFRCQVQFYGLSENDEWTQDRAKPVTQIVSAEAWGRADDVIKIHWQEKKSNTILGSQEGNTMKTNDTYMKFSWLTVPEKSLDKEHRCIVRHENNKNGVDQEIIFPPIKTDVITMDPKDNCSKDANDTLLLQLTNTSAYYMYLLLLLKSVVYFAIITCCLLRRTAFCCNGEKSRAKRSGSGATNFSLLKQAGDVEENPGPTSMDWIWRILFLVGAATGAHSGPQLQLQESGPGLVKPSETLSLTCTVSGDSISSGDYYWGWIRQPPGKGLEWIGHIYYSGVTYYNPSLKSRVTISVDTSRNQFSLKLSSVTAADTAVYYCTREDSSNWRSRGQGTLVTVSSGSGGGGSGGGGSGGGGSFEEVQLVQSGAEVKKPGASVKVSCKASGYSFTDYYMHWVRQAPGQGLEWIGRINPYNGAAFYSQNFKDRVTLTVDTSTSTAYLELSSLRSEDTAVYYCAIERGADLEGYAMDYWGQGTLVTVSSTRIQNPDPAVYQLRDSKSSDKSVCLFTDFDSQTNVSQSKDSDVYITDKCVLDMRSMDFKSNSAVAWSNKSDFACANAFNNSIIPEDTFFPSPESSDSTDHVKPKETENTKQPSKSCHKPKAIVHTEKVNMMSLTVLGLRMLFAKTVAVNFLLTAKLFFL

SEQ ID NO: 16207 - protein, 998 aa, synthetic construct
MALPVTALLLPLALLLHAARPEVQLVESGGGLVQPGGSLRLSCAASGFSFSDFWMSWVRQAPGKGLEWVATISQAGSEKDYVDSVKGRFTISRDNAKKSLYLQMNSLRAEDTAVYYCASGVYSFDYRGQGTLVTVSSGTGGGGSGGGGSGGGGSEFEIVLTQSPATLSASPGERVTLTCRASSNVISSYVHWYQQKPGSSPRLFLYSTSNLASGVPSRFSGSGSGTDFTFTISSLEAEDAATYYCQQYSGYPLTFGQGTRLEIKLEDLKNVFPPEVAVFEPSEAEISHTQKATLVCLATGFYPDHVELSWWVNGKEVHSGVCTDPQPLKEQPALNDSRYCLSSRLRVSATFWQNPRNHFRCQVQFYGLSENDEWTQDRAKPVTQIVSAEAWGRADDVIKIHWQEKKSNTILGSQEGNTMKTNDTYMKFSWLTVPEKSLDKEHRCIVRHENNKNGVDQEIIFPPIKTDVITMDPKDNCSKDANDTLLLQLTNTSAYYMYLLLLLKSVVYFAIITCCLLRRTAFCCNGEKSRAKRSGSGATNFSLLKQAGDVEENPGPTSMDWIWRILFLVGAATGAHSGPQLQLQESGPGLVKPSETLSLTCTVSGDSISSGDYYWGWIRQPPGKGLEWIGHIYYSGVTYYNPSLKSRVTISVDTSRNQFSLKLSSVTAADTAVYYCTREDSSNWRSRGQGTLVTVSSGSGGGGSGGGGSGGGGSFEQVQLQESGPGLVKPSETLSLTCAVSGYSITSAYYWNWIRQPPGKGLEWIGYISYDGRNNYNPSLKNRITINPDTSKNQFSLQLNSVTPEDTAVYYCAREGDYDVGNYYAMDYWGQGTLVTVSSTRIQNPDPAVYQLRDSKSSDKSVCLFTDFDSQTNVSQSKDSDVYITDKCVLDMRSMDFKSNSAVAWSNKSDFACANAFNNSIIPEDTFFPSPESSDSTDHVKPKETENTKQPSKSCHKPKAIVHTEKVNMMSLTVLGLRMLFAKTVAVNFLLTAKLFFL

SEQ ID NO: 16208 - protein, 998 aa, synthetic construct
MALPVTALLLPLALLLHAARPEVQLVESGGGLVQPGGSLRLSCAASGFSFSDFWMSWVRQAPGKGLEWVATISQAGSEKDYVDSVKGRFTISRDNAKKSLYLQMNSLRAEDTAVYYCASGVYSFDYRGQGTLVTVSSGTGGGGSGGGGSGGGGSEFEIVLTQSPATLSLSPGERATLSCRASSNVISSYVHWYQQKPGQAPRLLIYSTSNLASGIPARFSGSGSGTDFTLTISSLEPEDFAVYYCQQYSGYPLTFGQGTRLEIKLEDLKNVFPPEVAVFEPSEAEISHTQKATLVCLATGFYPDHVELSWWVNGKEVHSGVCTDPQPLKEQPALNDSRYCLSSRLRVSATFWQNPRNHFRCQVQFYGLSENDEWTQDRAKPVTQIVSAEAWGRADDVIKIHWQEKKSNTILGSQEGNTMKTNDTYMKFSWLTVPEKSLDKEHRCIVRHENNKNGVDQEIIFPPIKTDVITMDPKDNCSKDANDTLLLQLTNTSAYYMYLLLLLKSVVYFAIITCCLLRRTAFCCNGEKSRAKRSGSGATNFSLLKQAGDVEENPGPTSMDWIWRILFLVGAATGAHSGPQLQLQESGPGLVKPSETLSLTCTVSGDSISSGDYYWGWIRQPPGKGLEWIGHIYYSGVTYYNPSLKSRVTISVDTSRNQFSLKLSSVTAADTAVYYCTREDSSNWRSRGQGTLVTVSSGSGGGGSGGGGSGGGGSFEEVQLVESGGGLVQPGRSLRLSCAASGYSITSAYYWNWVRQAPGKGLEWVSYISYDGRNNYNPSLKNRFTISRDNAKKSLYLQMNSLRAEDTALYYCAKEGDYDVGNYYAMDYWGQGTTVTVSSTRIQNPDPAVYQLRDSKSSDKSVCLFTDFDSQTNVSQSKDSDVYITDKCVLDMRSMDFKSNSAVAWSNKSDFACANAFNNSIIPEDTFFPSPESSDSTDHVKPKETENTKQPSKSCHKPKAIVHTEKVNMMSLTVLGLRMLFAKTVAVNFLLTAKLFFL

SEQ ID NO: 16209 - protein, 997 aa, synthetic construct
MALPVTALLLPLALLLHAARPEVQLVESGGGLVQPGGSLRLSCAASGFSFSDFWMSWVRQAPGKGLEWVATISQAGSEKDYVDSVKGRFTISRDNAKKSLYLQMNSLRAEDTAVYYCASGVYSFDYRGQGTLVTVSSGTGGGGSGGGGSGGGGSEFDVVMTQTPLSLPVSLGDQASISCRSSQSLVHSNGNTYLRWYLQKPGQSPKVLIYKVSNRVSGVPDRFSGSGSGTDFTLKINRVEAEDLGVYFCSQSTHVPWTFGGGTKLEIKLEDLKNVFPPEVAVFEPSEAEISHTQKATLVCLATGFYPDHVELSWWVNGKEVHSGVCTDPQPLKEQPALNDSRYCLSSRLRVSATFWQNPRNHFRCQVQFYGLSENDEWTQDRAKPVTQIVSAEAWGRADDVIKIHWQEKKSNTILGSQEGNTMKTNDTYMKFSWLTVPEKSLDKEHRCIVRHENNKNGVDQEIIFPPIKTDVITMDPKDNCSKDANDTLLLQLTNTSAYYMYLLLLLKSVVYFAIITCCLLRRTAFCCNGEKSRAKRSGSGATNFSLLKQAGDVEENPGPTSMDWIWRILFLVGAATGAHSGPQLQLQESGPGLVKPSETLSLTCTVSGDSISSGDYYWGWIRQPPGKGLEWIGHIYYSGVTYYNPSLKSRVTISVDTSRNQFSLKLSSVTAADTAVYYCTREDSSNWRSRGQGTLVTVSSGSGGGGSGGGGSGGGGSFEGVKLDETGGGLVQPGGAMKLSCVTSGFTFGHYWMNWVRQSPEKGLEWVAQFRNKPYNYETYYSDSVKGRFTISRDDSKSSVYLQMNNLRVEDTGIYYCTGASYGMEYLGQGTSVTVSTTRIQNPDPAVYQLRDSKSSDKSVCLFTDFDSQTNVSQSKDSDVYITDKCVLDMRSMDFKSNSAVAWSNKSDFACANAFNNSIIPEDTFFPSPESSDSTDHVKPKETENTKQPSKSCHKPKAIVHTEKVNMMSLTVLGLRMLFAKTVAVNFLLTAKLFFL

SEQ ID NO: 16210 - protein, 1003 aa, synthetic construct
MALPVTALLLPLALLLHAARPEVQLVESGGGLVQPGGSLRLSCAASGFSFSDFWMSWVRQAPGKGLEWVATISQAGSEKDYVDSVKGRFTISRDNAKKSLYLQMNSLRAEDTAVYYCASGVYSFDYRGQGTLVTVSSGTGGGGSGGGGSGGGGSEFQVQLVESGGNLVQPGGSLRLSCAASGFTFGSFSMSWVRQAPGGGLEWVAGLSARSSLTHYADSVKGRFTISRDNAKNSVYLQMNSLRVEDTAVYYCARRSYDSSGYWGHFYSYMDVWGQGTLVTVSLEDLKNVFPPEVAVFEPSEAEISHTQKATLVCLATGFYPDHVELSWWVNGKEVHSGVCTDPQPLKEQPALNDSRYCLSSRLRVSATFWQNPRNHFRCQVQFYGLSENDEWTQDRAKPVTQIVSAEAWGRADDVIKIHWQEKKSNTILGSQEGNTMKTNDTYMKFSWLTVPEKSLDKEHRCIVRHENNKNGVDQEIIFPPIKTDVITMDPKDNCSKDANDTLLLQLTNTSAYYMYLLLLLKSVVYFAIITCCLLRRTAFCCNGEKSRAKRSGSGATNFSLLKQAGDVEENPGPTSMDWIWRILFLVGAATGAHSGPQLQLQESGPGLVKPSETLSLTCTVSGDSISSGDYYWGWIRQPPGKGLEWIGHIYYSGVTYYNPSLKSRVTISVDTSRNQFSLKLSSVTAADTAVYYCTREDSSNWRSRGQGTLVTVSSGSGGGGSGGGGSGGGGSFESVLTQPSSVSAAPGQKVTISCSGSTSNIGNNYVSWYQQHPGKAPKLMIYDVSKRPSGVPDRFSGSKSGNSASLDISGLQSEDEADYYCAAWDDSLSEFLFGTGTKLTVLGTRIQNPDPAVYQLRDSKSSDKSVCLFTDFDSQTNVSQSKDSDVYITDKCVLDMRSMDFKSNSAVAWSNKSDFACANAFNNSIIPEDTFFPSPESSDSTDHVKPKETENTKQPSKSCHKPKAIVHTEKVNMMSLTVLGLRMLFAKTVAVNFLLTAKLFFL

SEQ ID NO: 16211 - protein, 998 aa, synthetic construct
MALPVTALLLPLALLLHAARPEVQLVESGGGLVQPGGSLRLSCAASGFSFSDFWMSWVRQAPGKGLEWVATISQAGSEKDYVDSVKGRFTISRDNAKKSLYLQMNSLRAEDTAVYYCASGVYSFDYRGQGTLVTVSSGTGGGGSGGGGSGGGGSEFDVVMTQSPSSLSASVGDRVTITCQSSLDISHYLNWYQQKPGKAPKLLIYDASNLETGVPSRFSGSGSGTHFTFTISSLQPEDFATYYCQQYDNLPLTFGGGTKLEIKRLEDLKNVFPPEVAVFEPSEAEISHTQKATLVCLATGFYPDHVELSWWVNGKEVHSGVCTDPQPLKEQPALNDSRYCLSSRLRVSATFWQNPRNHFRCQVQFYGLSENDEWTQDRAKPVTQIVSAEAWGRADDVIKIHWQEKKSNTILGSQEGNTMKTNDTYMKFSWLTVPEKSLDKEHRCIVRHENNKNGVDQEIIFPPIKTDVITMDPKDNCSKDANDTLLLQLTNTSAYYMYLLLLLKSVVYFAIITCCLLRRTAFCCNGEKSRAKRSGSGATNFSLLKQAGDVEENPGPTSMDWIWRILFLVGAATGAHSGPQLQLQESGPGLVKPSETLSLTCTVSGDSISSGDYYWGWIRQPPGKGLEWIGHIYYSGVTYYNPSLKSRVTISVDTSRNQFSLKLSSVTAADTAVYYCTREDSSNWRSRGQGTLVTVSSGSGGGGSGGGGSGGGGSFEQVQLVQSGGGVVQPGGSLRVSCAASGVTLSDYGMHWVRQAPGKGLEWVAFIRNDGSDKYYADSVKGRFTISRDNSEKTVSLQMSSLRAEDTAVYYCAKNGESGPLDYWYLDLWGRGTLVTVSSTRIQNPDPAVYQLRDSKSSDKSVCLFTDFDSQTNVSQSKDSDVYITDKCVLDMRSMDFKSNSAVAWSNKSDFACANAFNNSIIPEDTFFPSPESSDSTDHVKPKETENTKQPSKSCHKPKAIVHTEKVNMMSLTVLGLRMLFAKTVAVNFLLTAKLFFL

SEQ ID NO: 16212 - protein, 1002 aa, synthetic construct
MALPVTALLLPLALLLHAARPEVQLVESGGGLVQPGGSLRLSCAASGFSFSDFWMSWVRQAPGKGLEWVATISQAGSEKDYVDSVKGRFTISRDNAKKSLYLQMNSLRAEDTAVYYCASGVYSFDYRGQGTLVTVSSGTGGGGSGGGGSGGGGSEFSYELTQPPSVSGTPGQRVAISCSGSSSNIGTRMVTWYQHVPGTAPKLLIFNNNQRPSGVPDRFSASKSGTSASLAIIGLQSDDEADYYCATWDDNVKSYVFGTGTKVTVLGSRLEDLKNVFPPEVAVFEPSEAEISHTQKATLVCLATGFYPDHVELSWWVNGKEVHSGVCTDPQPLKEQPALNDSRYCLSSRLRVSATFWQNPRNHFRCQVQFYGLSENDEWTQDRAKPVTQIVSAEAWGRADDVIKIHWQEKKSNTILGSQEGNTMKTNDTYMKFSWLTVPEKSLDKEHRCIVRHENNKNGVDQEIIFPPIKTDVITMDPKDNCSKDANDTLLLQLTNTSAYYMYLLLLLKSVVYFAIITCCLLRRTAFCCNGEKSRAKRSGSGATNFSLLKQAGDVEENPGPTSMDWIWRILFLVGAATGAHSGPQLQLQESGPGLVKPSETLSLTCTVSGDSISSGDYYWGWIRQPPGKGLEWIGHIYYSGVTYYNPSLKSRVTISVDTSRNQFSLKLSSVTAADTAVYYCTREDSSNWRSRGQGTLVTVSSGSGGGGSGGGGSGGGGSFELEMAQVQLQQWGAGLLKPSETLSLTCAVYGGSFSGYYWSWIRQPPGKGLEWIGEINHSGSTNYNPSLKSRVTISVDTSKNQFSLKLSSVTAADTAVYYCARAPQSWYVGDVWGQGTLVTVSSTRIQNPDPAVYQLRDSKSSDKSVCLFTDFDSQTNVSQSKDSDVYITDKCVLDMRSMDFKSNSAVAWSNKSDFACANAFNNSIIPEDTFFPSPESSDSTDHVKPKETENTKQPSKSCHKPKAIVHTEKVNMMSLTVLGLRMLFAKTVAVNFLLTAKLFFL

SEQ ID NO: 16213 - protein, 999 aa, synthetic construct
MALPVTALLLPLALLLHAARPEVQLVESGGGLVQPGGSLRLSCAASGFSFSDFWMSWVRQAPGKGLEWVATISQAGSEKDYVDSVKGRFTISRDNAKKSLYLQMNSLRAEDTAVYYCASGVYSFDYRGQGTLVTVSSGTGGGGSGGGGSGGGGSEFQSVLTQPPSLSVAPGKTASITCGGNNIGMKSVHWYQQRPGQAPVLVIYYDSDRPSGIPGRFSGSNSGNTATLTISRVEAGDEADYYCQVWDTTGDHPGYVFGTGTKVTVLLEDLKNVFPPEVAVFEPSEAEISHTQKATLVCLATGFYPDHVELSWWVNGKEVHSGVCTDPQPLKEQPALNDSRYCLSSRLRVSATFWQNPRNHFRCQVQFYGLSENDEWTQDRAKPVTQIVSAEAWGRADDVIKIHWQEKKSNTILGSQEGNTMKTNDTYMKFSWLTVPEKSLDKEHRCIVRHENNKNGVDQEIIFPPIKTDVITMDPKDNCSKDANDTLLLQLTNTSAYYMYLLLLLKSVVYFAIITCCLLRRTAFCCNGEKSRAKRSGSGATNFSLLKQAGDVEENPGPTSMDWIWRILFLVGAATGAHSGPQLQLQESGPGLVKPSETLSLTCTVSGDSISSGDYYWGWIRQPPGKGLEWIGHIYYSGVTYYNPSLKSRVTISVDTSRNQFSLKLSSVTAADTAVYYCTREDSSNWRSRGQGTLVTVSSGSGGGGSGGGGSGGGGSFEQVQLVQSGAEVKKPGSSVKVSCKASGGTFSSYAISWVRQAPGQGLEWMGGIIPIFGTANYAQKFQGRVTITADESTSTAYMELSSLRSEDTAVYYCARGVYGYSGSAPYDEWGQGTLVTVSSTRIQNPDPAVYQLRDSKSSDKSVCLFTDFDSQTNVSQSKDSDVYITDKCVLDMRSMDFKSNSAVAWSNKSDFACANAFNNSIIPEDTFFPSPESSDSTDHVKPKETENTKQPSKSCHKPKAIVHTEKVNMMSLTVLGLRMLFAKTVAVNFLLTAKLFFL

SEQ ID NO: 16214 - protein, 997 aa, synthetic construct
MALPVTALLLPLALLLHAARPEVQLVESGGGLVQPGGSLRLSCAASGFSFSDFWMSWVRQAPGKGLEWVATISQAGSEKDYVDSVKGRFTISRDNAKKSLYLQMNSLRAEDTAVYYCASGVYSFDYRGQGTLVTVSSGTGGGGSGGGGSGGGGSEFEVQLVESGGGLVQPGRSLRLSCAASGFTFDDYAMHWVRQAPGKGLEWVSGISWNSGSIGYADSVKGRFTISRDNAKNSLYLQMNSLRAEDTALYYCAKDKGGGYYDFWSGSDYWGQGTLVTVSSLEDLKNVFPPEVAVFEPSEAEISHTQKATLVCLATGFYPDHVELSWWVNGKEVHSGVCTDPQPLKEQPALNDSRYCLSSRLRVSATFWQNPRNHFRCQVQFYGLSENDEWTQDRAKPVTQIVSAEAWGRADDVIKIHWQEKKSNTILGSQEGNTMKTNDTYMKFSWLTVPEKSLDKEHRCIVRHENNKNGVDQEIIFPPIKTDVITMDPKDNCSKDANDTLLLQLTNTSAYYMYLLLLLKSVVYFAIITCCLLRRTAFCCNGEKSRAKRSGSGATNFSLLKQAGDVEENPGPTSMDWIWRILFLVGAATGAHSGPQLQLQESGPGLVKPSETLSLTCTVSGDSISSGDYYWGWIRQPPGKGLEWIGHIYYSGVTYYNPSLKSRVTISVDTSRNQFSLKLSSVTAADTAVYYCTREDSSNWRSRGQGTLVTVSSGSGGGGSGGGGSGGGGSFESSELTQDPAVSVALGQTVRITCQGDSLRSYYASWYQQKPGQAPVLVIYGKNNRPSGIPDRFSGSSSGNTASLTITGAQAEDEADYYCNSRDSSGWVFGGGTKLTVLTRIQNPDPAVYQLRDSKSSDKSVCLFTDFDSQTNVSQSKDSDVYITDKCVLDMRSMDFKSNSAVAWSNKSDFACANAFNNSIIPEDTFFPSPESSDSTDHVKPKETENTKQPSKSCHKPKAIVHTEKVNMMSLTVLGLRMLFAKTVAVNFLLTAKLFFL

SEQ ID NO: 16215 - protein, 1006 aa, synthetic construct
MALPVTALLLPLALLLHAARPEVQLVESGGGLVQPGGSLRLSCAASGFSFSDFWMSWVRQAPGKGLEWVATISQAGSEKDYVDSVKGRFTISRDNAKKSLYLQMNSLRAEDTAVYYCASGVYSFDYRGQGTLVTVSSGTGGGGSGGGGSGGGGSEFEVQLQQSGPGLVKPSQTLSLTCAISGDSVLSNSDTWNWIRQSPSRGLEWLGRTYHRSTWYDDYASSVRGRVSINVDTSKNQYSLQLNAVTPEDTGVYYCARDRLQDGNSWSDAFDVWGQGTMVTVSSLEDLKNVFPPEVAVFEPSEAEISHTQKATLVCLATGFYPDHVELSWWVNGKEVHSGVCTDPQPLKEQPALNDSRYCLSSRLRVSATFWQNPRNHFRCQVQFYGLSENDEWTQDRAKPVTQIVSAEAWGRADDVIKIHWQEKKSNTILGSQEGNTMKTNDTYMKFSWLTVPEKSLDKEHRCIVRHENNKNGVDQEIIFPPIKTDVITMDPKDNCSKDANDTLLLQLTNTSAYYMYLLLLLKSVVYFAIITCCLLRRTAFCCNGEKSRAKRSGSGATNFSLLKQAGDVEENPGPTSMDWIWRILFLVGAATGAHSGPQLQLQESGPGLVKPSETLSLTCTVSGDSISSGDYYWGWIRQPPGKGLEWIGHIYYSGVTYYNPSLKSRVTISVDTSRNQFSLKLSSVTAADTAVYYCTREDSSNWRSRGQGTLVTVSSGSGGGGSGGGGSGGGGSFEQSALTQPASVSGSPGQSITISCTGTSSDVGGYNYVSWYQQHPGKAPKLMIYDVSNRPSGVSNRFSGSKSGNTASLTISGLQAEDEADYYCSSYTSSSTLVYVFGTGTKVTVLTRIQNPDPAVYQLRDSKSSDKSVCLFTDFDSQTNVSQSKDSDVYITDKCVLDMRSMDFKSNSAVAWSNKSDFACANAFNNSIIPEDTFFPSPESSDSTDHVKPKETENTKQPSKSCHKPKAIVHTEKVNMMSLTVLGLRMLFAKTVAVNFLLTAKLFFL

SEQ ID NO: 16216 - protein, 984 aa, synthetic construct
MALPVTALLLPLALLLHAARPEVQLVESGGGLVQPGGSLRLSCAASGFSFSDFWMSWVRQAPGKGLEWVATISQAGSEKDYVDSVKGRFTISRDNAKKSLYLQMNSLRAEDTAVYYCASGVYSFDYRGQGTLVTVSSGTGGGGSGGGGSGGGGSEFQVQLVQSGAEVKKPGASVKVSCKASGYTFTSYDINWVRQATGQGLEWMGWMNPNSGNTGYAQKFQGRVTMTRNTSISTAYMELSSLRSEDTAVYYCARGDSTKVEIKLEDLKNVFPPEVAVFEPSEAEISHTQKATLVCLATGFYPDHVELSWWVNGKEVHSGVCTDPQPLKEQPALNDSRYCLSSRLRVSATFWQNPRNHFRCQVQFYGLSENDEWTQDRAKPVTQIVSAEAWGRADDVIKIHWQEKKSNTILGSQEGNTMKTNDTYMKFSWLTVPEKSLDKEHRCIVRHENNKNGVDQEIIFPPIKTDVITMDPKDNCSKDANDTLLLQLTNTSAYYMYLLLLLKSVVYFAIITCCLLRRTAFCCNGEKSRAKRSGSGATNFSLLKQAGDVEENPGPTSMDWIWRILFLVGAATGAHSGPQLQLQESGPGLVKPSETLSLTCTVSGDSISSGDYYWGWIRQPPGKGLEWIGHIYYSGVTYYNPSLKSRVTISVDTSRNQFSLKLSSVTAADTAVYYCTREDSSNWRSRGQGTLVTVSSGSGGGGSGGGGSGGGGSFEQSVLTQPRSVSGSPGQSVTISCTGTSSDVGGYNYVSWYQQHPGEAPKLIIYDADKRPSGISNRFSSGKSGNTASLTISGLQVEDEADYYCCSYAGGSTWVFGGGTKVTVLTRIQNPDPAVYQLRDSKSSDKSVCLFTDFDSQTNVSQSKDSDVYITDKCVLDMRSMDFKSNSAVAWSNKSDFACANAFNNSIIPEDTFFPSPESSDSTDHVKPKETENTKQPSKSCHKPKAIVHTEKVNMMSLTVLGLRMLFAKTVAVNFLLTAKLFFL

SEQ ID NO: 16217 - protein, 1006 aa, synthetic construct
MALPVTALLLPLALLLHAARPEVQLVESGGGLVQPGGSLRLSCAASGFSFSDFWMSWVRQAPGKGLEWVATISQAGSEKDYVDSVKGRFTISRDNAKKSLYLQMNSLRAEDTAVYYCASGVYSFDYRGQGTLVTVSSGTGGGGSGGGGSGGGGSEFEVQLQQSGPGLVKPSQTLSLTCAISGDSVSSNSAAWNWIRQSPSRGLEWLGRTYYRSKWYSDYAVSVKSRITINPDTSKNQFSLQLNSVTPEDTAVYYCARDPYDFWSGYPDAFDIWGQGTMVTVSSLEDLKNVFPPEVAVFEPSEAEISHTQKATLVCLATGFYPDHVELSWWVNGKEVHSGVCTDPQPLKEQPALNDSRYCLSSRLRVSATFWQNPRNHFRCQVQFYGLSENDEWTQDRAKPVTQIVSAEAWGRADDVIKIHWQEKKSNTILGSQEGNTMKTNDTYMKFSWLTVPEKSLDKEHRCIVRHENNKNGVDQEIIFPPIKTDVITMDPKDNCSKDANDTLLLQLTNTSAYYMYLLLLLKSVVYFAIITCCLLRRTAFCCNGEKSRAKRSGSGATNFSLLKQAGDVEENPGPTSMDWIWRILFLVGAATGAHSGPQLQLQESGPGLVKPSETLSLTCTVSGDSISSGDYYWGWIRQPPGKGLEWIGHIYYSGVTYYNPSLKSRVTISVDTSRNQFSLKLSSVTAADTAVYYCTREDSSNWRSRGQGTLVTVSSGSGGGGSGGGGSGGGGSFEQSALTQPASVSGSPGQSITISCTGTSSDVGGYNYVSWYQQHPGKAPKVIISEVNNRPSGVSHRFSGSKSGNTASLTISGLQAEDEADYFCSSYTSGRTLYVFGTGSKVTVLGTRIQNPDPAVYQLRDSKSSDKSVCLFTDFDSQTNVSQSKDSDVYITDKCVLDMRSMDFKSNSAVAWSNKSDFACANAFNNSIIPEDTFFPSPESSDSTDHVKPKETENTKQPSKSCHKPKAIVHTEKVNMMSLTVLGLRMLFAKTVAVNFLLTAKLFFL

SEQ ID NO: 16218 - protein, 1005 aa, synthetic construct
MALPVTALLLPLALLLHAARPEVQLVESGGGLVQPGGSLRLSCAASGFSFSDFWMSWVRQAPGKGLEWVATISQAGSEKDYVDSVKGRFTISRDNAKKSLYLQMNSLRAEDTAVYYCASGVYSFDYRGQGTLVTVSSGTGGGGSGGGGSGGGGSEFQSALTQPASASGSPGQSVTISCTGTSSDVGGYNYVSWYQQHPGKAPKLMIYDVSNRPSGVSNRFSGSKSGNTASLTISGLQAEDEADYYCSSYTSSSTLYVFGTGTQLTVLLEDLKNVFPPEVAVFEPSEAEISHTQKATLVCLATGFYPDHVELSWWVNGKEVHSGVCTDPQPLKEQPALNDSRYCLSSRLRVSATFWQNPRNHFRCQVQFYGLSENDEWTQDRAKPVTQIVSAEAWGRADDVIKIHWQEKKSNTILGSQEGNTMKTNDTYMKFSWLTVPEKSLDKEHRCIVRHENNKNGVDQEIIFPPIKTDVITMDPKDNCSKDANDTLLLQLTNTSAYYMYLLLLLKSVVYFAIITCCLLRRTAFCCNGEKSRAKRSGSGATNFSLLKQAGDVEENPGPTSMDWIWRILFLVGAATGAHSGPQLQLQESGPGLVKPSETLSLTCTVSGDSISSGDYYWGWIRQPPGKGLEWIGHIYYSGVTYYNPSLKSRVTISVDTSRNQFSLKLSSVTAADTAVYYCTREDSSNWRSRGQGTLVTVSSGSGGGGSGGGGSGGGGSFEEVQLQQSGPGLVKPSQTLSLTCAISGDSMLSNSDTWNWIRQSPSRGLEWLGRTYHRSTWYDDYASSVRGRVSINVDTSKNQYSLQLNAVTPEDTGVYYCARVRLQDGNSWSDAFDVWGQGTMVTVSSTRIQNPDPAVYQLRDSKSSDKSVCLFTDFDSQTNVSQSKDSDVYITDKCVLDMRSMDFKSNSAVAWSNKSDFACANAFNNSIIPEDTFFPSPESSDSTDHVKPKETENTKQPSKSCHKPKAIVHTEKVNMMSLTVLGLRMLFAKTVAVNFLLTAKLFFL

SEQ ID NO: 16219 - protein, 1005 aa, synthetic construct
MALPVTALLLPLALLLHAARPEVQLVESGGGLVQPGGSLRLSCAASGFSFSDFWMSWVRQAPGKGLEWVATISQAGSEKDYVDSVKGRFTISRDNAKKSLYLQMNSLRAEDTAVYYCASGVYSFDYRGQGTLVTVSSGTGGGGSGGGGSGGGGSEFDVMLTQTPLSLPVSLGDQASISCRSSQSILHSTGDTYLEWYLQKPGQSPKLLINKVSNRLSGVPDRFSGSGSGTDFTLKISRVEAEDLGVYYCFQGSHVPWTFGGGTKLEIKRADAAPTVSIFPLEDLKNVFPPEVAVFEPSEAEISHTQKATLVCLATGFYPDHVELSWWVNGKEVHSGVCTDPQPLKEQPALNDSRYCLSSRLRVSATFWQNPRNHFRCQVQFYGLSENDEWTQDRAKPVTQIVSAEAWGRADDVIKIHWQEKKSNTILGSQEGNTMKTNDTYMKFSWLTVPEKSLDKEHRCIVRHENNKNGVDQEIIFPPIKTDVITMDPKDNCSKDANDTLLLQLTNTSAYYMYLLLLLKSVVYFAIITCCLLRRTAFCCNGEKSRAKRSGSGATNFSLLKQAGDVEENPGPTSMDWIWRILFLVGAATGAHSGPQLQLQESGPGLVKPSETLSLTCTVSGDSISSGDYYWGWIRQPPGKGLEWIGHIYYSGVTYYNPSLKSRVTISVDTSRNQFSLKLSSVTAADTAVYYCTREDSSNWRSRGQGTLVTVSSGSGGGGSGGGGSGGGGSFEQVKLQQSGPSLVKPGASVKMSCKASGYTFTDFYMKWVKQSHGKSLEWIGDINPNIGDTFYNQKFKGKATLTVDKSSSTAYMQLNSLTSEDSAVYFCSVGYFDVWGAGTTVTVSSTRIQNPDPAVYQLRDSKSSDKSVCLFTDFDSQTNVSQSKDSDVYITDKCVLDMRSMDFKSNSAVAWSNKSDFACANAFNNSIIPEDTFFPSPESSDSTDHVKPKETENTKQPSKSCHKPKAIVHTEKVNMMSLTVLGLRMLFAKTVAVNFLLTAKLFFL

SEQ ID NO: 16220 - protein, 1001 aa, synthetic construct
MALPVTALLLPLALLLHAARPEVQLVESGGGLVQPGGSLRLSCAASGFSFSDFWMSWVRQAPGKGLEWVATISQAGSEKDYVDSVKGRFTISRDNAKKSLYLQMNSLRAEDTAVYYCASGVYSFDYRGQGTLVTVSSGTGGGGSGGGGSGGGGSEFEIVLTQSPATLSLSPGERATLSCRASQSVSIYLAWYQQKPGQAPRLLIYDASNRATGIPARFSGSGSGTDFTLTISSLEPEDFAVYYCQQRSNWPPFTFGPGTKVDIKLEDLKNVFPPEVAVFEPSEAEISHTQKATLVCLATGFYPDHVELSWWVNGKEVHSGVCTDPQPLKEQPALNDSRYCLSSRLRVSATFWQNPRNHFRCQVQFYGLSENDEWTQDRAKPVTQIVSAEAWGRADDVIKIHWQEKKSNTILGSQEGNTMKTNDTYMKFSWLTVPEKSLDKEHRCIVRHENNKNGVDQEIIFPPIKTDVITMDPKDNCSKDANDTLLLQLTNTSAYYMYLLLLLKSVVYFAIITCCLLRRTAFCCNGEKSRAKRSGSGATNFSLLKQAGDVEENPGPTSMDWIWRILFLVGAATGAHSGPQLQLQESGPGLVKPSETLSLTCTVSGDSISSGDYYWGWIRQPPGKGLEWIGHIYYSGVTYYNPSLKSRVTISVDTSRNQFSLKLSSVTAADTAVYYCTREDSSNWRSRGQGTLVTVSSGSGGGGSGGGGSGGGGSFEQVQLVESGGGVVQPGRSLRLSCAASGFTFSSYGMHWVRQAPGKGLEWVAVIWDDGSNKYYVDSVKGRFTISRDNSKNTLYLQMNSLRAEDTAVYYCARDDYYGSGSFNSYYGTDVWGQGTTVTVSSTRIQNPDPAVYQLRDSKSSDKSVCLFTDFDSQTNVSQSKDSDVYITDKCVLDMRSMDFKSNSAVAWSNKSDFACANAFNNSIIPEDTFFPSPESSDSTDHVKPKETENTKQPSKSCHKPKAIVHTEKVNMMSLTVLGLRMLFAKTVAVNFLLTAKLFFL

SEQ ID NO: 16221 - protein, 986 aa, synthetic construct
MALPVTALLLPLALLLHAARPEVQLVESGGGLVQPGGSLRLSCAASGFSFSDFWMSWVRQAPGKGLEWVATISQAGSEKDYVDSVKGRFTISRDNAKKSLYLQMNSLRAEDTAVYYCASGVYSFDYRGQGTLVTVSSGTGGGGSGGGGSGGGGSEFDIQMTQSPSSLSASVGDRVTITCRASQGISSWLAWYQQKPEKAPKSLIYAASSLQSGVPSRFSGSGSGTDFTLTISSLQPEDFATYYCQQYNSYPYTFGQGTKLEIKLEDLKNVFPPEVAVFEPSEAEISHTQKATLVCLATGFYPDHVELSWWVNGKEVHSGVCTDPQPLKEQPALNDSRYCLSSRLRVSATFWQNPRNHFRCQVQFYGLSENDEWTQDRAKPVTQIVSAEAWGRADDVIKIHWQEKKSNTILGSQEGNTMKTNDTYMKFSWLTVPEKSLDKEHRCIVRHENNKNGVDQEIIFPPIKTDVITMDPKDNCSKDANDTLLLQLTNTSAYYMYLLLLLKSVVYFAIITCCLLRRTAFCCNGEKSRAKRSGSGATNFSLLKQAGDVEENPGPTSMDWIWRILFLVGAATGAHSGPQLQLQESGPGLVKPSETLSLTCTVSGDSISSGDYYWGWIRQPPGKGLEWIGHIYYSGVTYYNPSLKSRVTISVDTSRNQFSLKLSSVTAADTAVYYCTREDSSNWRSRGQGTLVTVSSGSGGGGSGGGGSGGGGSFEEVQLVQSGGGLVHPGGSLRLSCAGSGFTFSTYLMYWVRQAPGKTLEWVSAIGSGGDTYYADSVKGRFTISRDNAKNSLYLQMNSLRAEDMAVYYCARGLGYWGQGTLVTVSSTRIQNPDPAVYQLRDSKSSDKSVCLFTDFDSQTNVSQSKDSDVYITDKCVLDMRSMDFKSNSAVAWSNKSDFACANAFNNSIIPEDTFFPSPESSDSTDHVKPKETENTKQPSKSCHKPKAIVHTEKVNMMSLTVLGLRMLFAKTVAVNFLLTAKLFFL

SEQ ID NO: 16222 - protein, 1005 aa, synthetic construct
MALPVTALLLPLALLLHAARPEVQLVESGGGLVQPGGSLRLSCAASGFSFSDFWMSWVRQAPGKGLEWVATISQAGSEKDYVDSVKGRFTISRDNAKKSLYLQMNSLRAEDTAVYYCASGVYSFDYRGQGTLVTVSSGTGGGGSGGGGSGGGGSEFLPVLTQPPSVSVAPGKTARITCGGNNIGSKSVHWYQQKPGQAPVLVVYDDSDRPSGIPERFSGSNSGNTATLTISRVEAGDEADYYCQVWDSSSDYVVFGGGTKLTVLLEDLKNVFPPEVAVFEPSEAEISHTQKATLVCLATGFYPDHVELSWWVNGKEVHSGVCTDPQPLKEQPALNDSRYCLSSRLRVSATFWQNPRNHFRCQVQFYGLSENDEWTQDRAKPVTQIVSAEAWGRADDVIKIHWQEKKSNTILGSQEGNTMKTNDTYMKFSWLTVPEKSLDKEHRCIVRHENNKNGVDQEIIFPPIKTDVITMDPKDNCSKDANDTLLLQLTNTSAYYMYLLLLLKSVVYFAIITCCLLRRTAFCCNGEKSRAKRSGSGATNFSLLKQAGDVEENPGPTSMDWIWRILFLVGAATGAHSGPQLQLQESGPGLVKPSETLSLTCTVSGDSISSGDYYWGWIRQPPGKGLEWIGHIYYSGVTYYNPSLKSRVTISVDTSRNQFSLKLSSVTAADTAVYYCTREDSSNWRSRGQGTLVTVSSGSGGGGSGGGGSGGGGSFEEVQLVQSGAEVKKPGESLKISCKGSGYSFTSYWIGWVRQMPGKGLEWMGIIYPGDSDTRYSPSFQGQVTISADKSISTAYLQWSSLKASDTAMYYCARQVWGWQGGMYPRSNWWYNLDSWGQGTLVTVSSTRIQNPDPAVYQLRDSKSSDKSVCLFTDFDSQTNVSQSKDSDVYITDKCVLDMRSMDFKSNSAVAWSNKSDFACANAFNNSIIPEDTFFPSPESSDSTDHVKPKETENTKQPSKSCHKPKAIVHTEKVNMMSLTVLGLRMLFAKTVAVNFLLTAKLFFL

SEQ ID NO: 16223 - protein, 998 aa, synthetic construct
MALPVTALLLPLALLLHAARPEVQLVESGGGLVQPGGSLRLSCAASGFSFSDFWMSWVRQAPGKGLEWVATISQAGSEKDYVDSVKGRFTISRDNAKKSLYLQMNSLRAEDTAVYYCASGVYSFDYRGQGTLVTVSSGTGGGGSGGGGSGGGGSEFELVMTQSPASLAVSLGQRATISCRASESVDSYGKSFMHWYQLKPGQPPKLLIYRASNLESGVPARFSGSGSRTDFTLTIDPVEADDAATYYCQQNNEDPWTFGGGTKLEIKLEDLKNVFPPEVAVFEPSEAEISHTQKATLVCLATGFYPDHVELSWWVNGKEVHSGVCTDPQPLKEQPALNDSRYCLSSRLRVSATFWQNPRNHFRCQVQFYGLSENDEWTQDRAKPVTQIVSAEAWGRADDVIKIHWQEKKSNTILGSQEGNTMKTNDTYMKFSWLTVPEKSLDKEHRCIVRHENNKNGVDQEIIFPPIKTDVITMDPKDNCSKDANDTLLLQLTNTSAYYMYLLLLLKSVVYFAIITCCLLRRTAFCCNGEKSRAKRSGSGATNFSLLKQAGDVEENPGPTSMDWIWRILFLVGAATGAHSGPQLQLQESGPGLVKPSETLSLTCTVSGDSISSGDYYWGWIRQPPGKGLEWIGHIYYSGVTYYNPSLKSRVTISVDTSRNQFSLKLSSVTAADTAVYYCTREDSSNWRSRGQGTLVTVSSGSGGGGSGGGGSGGGGSFEEVQLEQSGPELVKPGASVKMSCKASGYTFTNYYMKWVKQSHGKSLEWIGDLNPNNGDTFYNQKFKGKATLTVDKSSNTAYMQLNSLTSEDSAVYYCARTGRYEENAMDYWGQGTSVTVSSTRIQNPDPAVYQLRDSKSSDKSVCLFTDFDSQTNVSQSKDSDVYITDKCVLDMRSMDFKSNSAVAWSNKSDFACANAFNNSIIPEDTFFPSPESSDSTDHVKPKETENTKQPSKSCHKPKAIVHTEKVNMMSLTVLGLRMLFAKTVAVNFLLTAKLFFL

SEQ ID NO: 16224 - protein, 992 aa, synthetic construct
MALPVTALLLPLALLLHAARPEVQLVESGGGLVQPGGSLRLSCAASGFSFSDFWMSWVRQAPGKGLEWVATISQAGSEKDYVDSVKGRFTISRDNAKKSLYLQMNSLRAEDTAVYYCASGVYSFDYRGQGTLVTVSSGTGGGGSGGGGSGGGGSEFDVVMTQSPSSLSASVGDRVTITCMASEDIYIRLAWYQQKPGNAPKLLIYAATSLETGVPSRFSGSGSGTDFTLTISSLQPEDFATYYCQQYWSSPWTFGGGTKVEIKLEDLKNVFPPEVAVFEPSEAEISHTQKATLVCLATGFYPDHVELSWWVNGKEVHSGVCTDPQPLKEQPALNDSRYCLSSRLRVSATFWQNPRNHFRCQVQFYGLSENDEWTQDRAKPVTQIVSAEAWGRADDVIKIHWQEKKSNTILGSQEGNTMKTNDTYMKFSWLTVPEKSLDKEHRCIVRHENNKNGVDQEIIFPPIKTDVITMDPKDNCSKDANDTLLLQLTNTSAYYMYLLLLLKSVVYFAIITCCLLRRTAFCCNGEKSRAKRSGSGATNFSLLKQAGDVEENPGPTSMDWIWRILFLVGAATGAHSGPQLQLQESGPGLVKPSETLSLTCTVSGDSISSGDYYWGWIRQPPGKGLEWIGHIYYSGVTYYNPSLKSRVTISVDTSRNQFSLKLSSVTAADTAVYYCTREDSSNWRSRGQGTLVTVSSGSGGGGSGGGGSGGGGSFEQVQLQESGPGLVKPSQTLSLTCTVSGYSITSDYTWNWIRQPPGNGLEWIGYITYSGSTSYNPSLKSRVLISVDTSKNQVSLKLSSVTAADTAVYYCARLGRRYTMDYWGQGTTVTVSSTRIQNPDPAVYQLRDSKSSDKSVCLFTDFDSQTNVSQSKDSDVYITDKCVLDMRSMDFKSNSAVAWSNKSDFACANAFNNSIIPEDTFFPSPESSDSTDHVKPKETENTKQPSKSCHKPKAIVHTEKVNMMSLTVLGLRMLFAKTVAVNFLLTAKLFFL

SEQ ID NO: 16225 - protein, 996 aa, synthetic construct; identical to SEQ ID NO: 16088

SEQ ID NO: 16226 - protein, 996 aa, synthetic construct
MALPVTALLLPLALLLHAARPEVQLVESGGGLVQPGGSLRLSCAASGFSFSDFWMSWVRQAPGKGLEWVATISQAGSEKDYVDSVKGRFTISRDNAKKSLYLQMNSLRAEDTAVYYCASGVYSFDYRGQGTLVTVSSGTGGGGSGGGGSGGGGSEFDIVLTQSPATLSLSPGDRATLSCRASESVTILGSHLIYWYQQKPGQAPRLLIQLASNVQTGIPARFSGSGSRTDFTLTISSLEPEDFAVYYCLQSRTIPRTFGQGTKLEIKRLEDLKNVFPPEVAVFEPSEAEISHTQKATLVCLATGFYPDHVELSWWVNGKEVHSGVCTDPQPLKEQPALNDSRYCLSSRLRVSATFWQNPRNHFRCQVQFYGLSENDEWTQDRAKPVTQIVSAEAWGRADDVIKIHWQEKKSNTILGSQEGNTMKTNDTYMKFSWLTVPEKSLDKEHRCIVRHENNKNGVDQEIIFPPIKTDVITMDPKDNCSKDANDTLLLQLTNTSAYYMYLLLLLKSVVYFAIITCCLLRRTAFCCNGEKSRAKRSGSGATNFSLLKQAGDVEENPGPTSMDWIWRILFLVGAATGAHSGPQLQLQESGPGLVKPSETLSLTCTVSGDSISSGDYYWGWIRQPPGKGLEWIGHIYYSGVTYYNPSLKSRVTISVDTSRNQFSLKLSSVTAADTAVYYCTREDSSNWRSRGQGTLVTVSSGSGGGGSGGGGSGGGGSFEQVQLVQSGSELKKPGESVKISCKASGYTFTHYSMNWVRQAPGQGLEWMGRINTETGEPLYADDFKGRFVFSLDTSASTAYLQISSLKAEDTAVYYCSNDYLYSLDYWGQGTLVTVSSTRIQNPDPAVYQLRDSKSSDKSVCLFTDFDSQTNVSQSKDSDVYITDKCVLDMRSMDFKSNSAVAWSNKSDFACANAFNNSIIPEDTFFPSPESSDSTDHVKPKETENTKQPSKSCHKPKAIVHTEKVNMMSLTVLGLRMLFAKTVAVNFLLTAKLFFL

SEQ ID NO: 16227 - protein, 997 aa, synthetic construct
MALPVTALLLPLALLLHAARPEVQLVESGGGLVQPGGSLRLSCAASGFSFSDFWMSWVRQAPGKGLEWVATISQAGSEKDYVDSVKGRFTISRDNAKKSLYLQMNSLRAEDTAVYYCASGVYSFDYRGQGTLVTVSSGTGGGGSGGGGSGGGGSEFDIQLTQSPSFLSASVGDRVTITCRASQGISTDLNWYQQKPGKAPKLLIYAASNLESGVPSRFSGSGSGTEFTLTISSLQPEDFATYYCQQSYNWPYTFGGGTKVEIKRLEDLKNVFPPEVAVFEPSEAEISHTQKATLVCLATGFYPDHVELSWWVNGKEVHSGVCTDPQPLKEQPALNDSRYCLSSRLRVSATFWQNPRNHFRCQVQFYGLSENDEWTQDRAKPVTQIVSAEAWGRADDVIKIHWQEKKSNTILGSQEGNTMKTNDTYMKFSWLTVPEKSLDKEHRCIVRHENNKNGVDQEIIFPPIKTDVITMDPKDNCSKDANDTLLLQLTNTSAYYMYLLLLLKSVVYFAIITCCLLRRTAFCCNGEKSRAKRSGSGATNFSLLKQAGDVEENPGPTSMDWIWRILFLVGAATGAHSGPQLQLQESGPGLVKPSETLSLTCTVSGDSISSGDYYWGWIRQPPGKGLEWIGHIYYSGVTYYNPSLKSRVTISVDTSRNQFSLKLSSVTAADTAVYYCTREDSSNWRSRGQGTLVTVSSGSGGGGSGGGGSGGGGSFEEVQLVESGGGLVKPGGSLRLSCAASGFTFSNFEMNWVRQAPGKGLEWVSGISSNGRYINYADSVKGRFTISRDNAKNSLYLQMNSLRAEDTAVYYCARVVDFDQDYNGFDYWGQGTLVTVSSTRIQNPDPAVYQLRDSKSSDKSVCLFTDFDSQTNVSQSKDSDVYITDKCVLDMRSMDFKSNSAVAWSNKSDFACANAFNNSIIPEDTFFPSPESSDSTDHVKPKETENTKQPSKSCHKPKAIVHTEKVNMMSLTVLGLRMLFAKTVAVNFLLTAKLFFL

SEQ ID NO: 16228 - protein, 995 aa, synthetic construct
MALPVTALLLPLALLLHAARPEVQLVESGGGLVQPGGSLRLSCAASGFSFSDFWMSWVRQAPGKGLEWVATISQAGSEKDYVDSVKGRFTISRDNAKKSLYLQMNSLRAEDTAVYYCASGVYSFDYRGQGTLVTVSSGTGGGGSGGGGSGGGGSEFDIQLTQSPSFLSASVGDRVTITCSLSLGISTWRDWFPPRLGRGLEPLTYAASTLQSGVPSRFSGSGSGTEFTLTISSLQPEDFATYYCQQLNSYPLTFGGGTKVEIKRLEDLKNVFPPEVAVFEPSEAEISHTQKATLVCLATGFYPDHVELSWWVNGKEVHSGVCTDPQPLKEQPALNDSRYCLSSRLRVSATFWQNPRNHFRCQVQFYGLSENDEWTQDRAKPVTQIVSAEAWGRADDVIKIHWQEKKSNTILGSQEGNTMKTNDTYMKFSWLTVPEKSLDKEHRCIVRHENNKNGVDQEIIFPPIKTDVITMDPKDNCSKDANDTLLLQLTNTSAYYMYLLLLLKSVVYFAIITCCLLRRTAFCCNGEKSRAKRSGSGATNFSLLKQAGDVEENPGPTSMDWIWRILFLVGAATGAHSGPQLQLQESGPGLVKPSETLSLTCTVSGDSISSGDYYWGWIRQPPGKGLEWIGHIYYSGVTYYNPSLKSRVTISVDTSRNQFSLKLSSVTAADTAVYYCTREDSSNWRSRGQGTLVTVSSGSGGGGSGGGGSGGGGSFEEVQLVESGGGLVKPGGSLRLSCAASGFTFSTYGMSWVRQAPGKGLEWVAYINNGSGYIYYADSVKGRFTISRDNAKNSLYLQMNSLRAEDTAVYYCARGQWWSGGDFDYWGQGTLVTVSSTRIQNPDPAVYQLRDSKSSDKSVCLFTDFDSQTNVSQSKDSDVYITDKCVLDMRSMDFKSNSAVAWSNKSDFACANAFNNSIIPEDTFFPSPESSDSTDHVKPKETENTKQPSKSCHKPKAIVHTEKVNMMSLTVLGLRMLFAKTVAVNFLLTAKLFFL

SEQ ID NO: 16229 - protein, 996 aa, synthetic construct
MALPVTALLLPLALLLHAARPEVQLVESGGGLVQPGGSLRLSCAASGFSFSDFWMSWVRQAPGKGLEWVATISQAGSEKDYVDSVKGRFTISRDNAKKSLYLQMNSLRAEDTAVYYCASGVYSFDYRGQGTLVTVSSGTGGGGSGGGGSGGGGSEFEIVLTQSPATLSLSPGERATLSCSASSSVSYMYWYQQKPGQAPRLLIYRTSNLASGIPARFSGSGSGTDFTLTISSLEPEDFAVYYCQQYHSYPTTFGQGTKVEIKRTVLEDLKNVFPPEVAVFEPSEAEISHTQKATLVCLATGFYPDHVELSWWVNGKEVHSGVCTDPQPLKEQPALNDSRYCLSSRLRVSATFWQNPRNHFRCQVQFYGLSENDEWTQDRAKPVTQIVSAEAWGRADDVIKIHWQEKKSNTILGSQEGNTMKTNDTYMKFSWLTVPEKSLDKEHRCIVRHENNKNGVDQEIIFPPIKTDVITMDPKDNCSKDANDTLLLQLTNTSAYYMYLLLLLKSVVYFAIITCCLLRRTAFCCNGEKSRAKRSGSGATNFSLLKQAGDVEENPGPTSMDWIWRILFLVGAATGAHSGPQLQLQESGPGLVKPSETLSLTCTVSGDSISSGDYYWGWIRQPPGKGLEWIGHIYYSGVTYYNPSLKSRVTISVDTSRNQFSLKLSSVTAADTAVYYCTREDSSNWRSRGQGTLVTVSSGSGGGGSGGGGSGGGGSFEEVQLVESGGGLVQPGGSLRLSCAASGFSFNTYAMNWVRQAPGKGLEWVSHIRSKSNNFATYYADSVKDRFTISRDNAKNSLYLQMNSLRAEDTAVYYCARQGGDFPMDYWGQGTLVTVSSTRIQNPDPAVYQLRDSKSSDKSVCLFTDFDSQTNVSQSKDSDVYITDKCVLDMRSMDFKSNSAVAWSNKSDFACANAFNNSIIPEDTFFPSPESSDSTDHVKPKETENTKQPSKSCHKPKAIVHTEKVNMMSLTVLGLRMLFAKTVAVNFLLTAKLFFL

SEQ ID NO: 16230 - protein, 992 aa, synthetic construct
MALPVTALLLPLALLLHAARPEVQLVESGGGLVQPGGSLRLSCAASGFSFSDFWMSWVRQAPGKGLEWVATISQAGSEKDYVDSVKGRFTISRDNAKKSLYLQMNSLRAEDTAVYYCASGVYSFDYRGQGTLVTVSSGTGGGGSGGGGSGGGGSEFDVVMTQSPSSLSASVGDRVTITCKASEDIYIRLAWYQQKPGKAPKLLIYAATSLETGVPSRFSGSGSGTDFTLTISSLQPEDFATYYCQQYWTTPWTFGGGTKVEIKLEDLKNVFPPEVAVFEPSEAEISHTQKATLVCLATGFYPDHVELSWWVNGKEVHSGVCTDPQPLKEQPALNDSRYCLSSRLRVSATFWQNPRNHFRCQVQFYGLSENDEWTQDRAKPVTQIVSAEAWGRADDVIKIHWQEKKSNTILGSQEGNTMKTNDTYMKFSWLTVPEKSLDKEHRCIVRHENNKNGVDQEIIFPPIKTDVITMDPKDNCSKDANDTLLLQLTNTSAYYMYLLLLLKSVVYFAIITCCLLRRTAFCCNGEKSRAKRSGSGATNFSLLKQAGDVEENPGPTSMDWIWRILFLVGAATGAHSGPQLQLQESGPGLVKPSETLSLTCTVSGDSISSGDYYWGWIRQPPGKGLEWIGHIYYSGVTYYNPSLKSRVTISVDTSRNQFSLKLSSVTAADTAVYYCTREDSSNWRSRGQGTLVTVSSGSGGGGSGGGGSGGGGSFEQVQLQESGPGLVKPSQTLSLTCTVSGYSITIDYTWNWIRQPPGKGLEWIGYITYSGSTDYNPSLKSRVLISVDTSKNQVSLKLSSVTAADTAVYYCARLGRRYALDYWGQGTTVTVSSTRIQNPDPAVYQLRDSKSSDKSVCLFTDFDSQTNVSQSKDSDVYITDKCVLDMRSMDFKSNSAVAWSNKSDFACANAFNNSIIPEDTFFPSPESSDSTDHVKPKETENTKQPSKSCHKPKAIVHTEKVNMMSLTVLGLRMLFAKTVAVNFLLTAKLFFL

SEQ ID NO: 16231 - protein, 997 aa, synthetic construct
MALPVTALLLPLALLLHAARPEVQLVESGGGLVQPGGSLRLSCAASGFSFSDFWMSWVRQAPGKGLEWVATISQAGSEKDYVDSVKGRFTISRDNAKKSLYLQMNSLRAEDTAVYYCASGVYSFDYRGQGTLVTVSSGTGGGGSGGGGSGGGGSEFDIQMTQTTSSLSASLGDRVTISCRASQDISNYLNWYQQKPDGTVKLLIYYTSILHSGVPSRFSGSGSGTDYSLTISNLEQEDFATYFCQQGNTLPWTFGGGTKLEIKALEDLKNVFPPEVAVFEPSEAEISHTQKATLVCLATGFYPDHVELSWWVNGKEVHSGVCTDPQPLKEQPALNDSRYCLSSRLRVSATFWQNPRNHFRCQVQFYGLSENDEWTQDRAKPVTQIVSAEAWGRADDVIKIHWQEKKSNTILGSQEGNTMKTNDTYMKFSWLTVPEKSLDKEHRCIVRHENNKNGVDQEIIFPPIKTDVITMDPKDNCSKDANDTLLLQLTNTSAYYMYLLLLLKSVVYFAIITCCLLRRTAFCCNGEKSRAKRSGSGATNFSLLKQAGDVEENPGPTSMDWIWRILFLVGAATGAHSGPQLQLQESGPGLVKPSETLSLTCTVSGDSISSGDYYWGWIRQPPGKGLEWIGHIYYSGVTYYNPSLKSRVTISVDTSRNQFSLKLSSVTAADTAVYYCTREDSSNWRSRGQGTLVTVSSGSGGGGSGGGGSGGGGSFEEVQLVESGGGLVKPGGSLKLSCAASGFAFSIYDMSWVRQTPEKRLEWVAYISSGGGTYYPDTVKGRFTISRDNAKNTLYLQMSSLKSEDTAMYYCARHSGYGTHWGVLFAYWGQGTLVTVSATRIQNPDPAVYQLRDSKSSDKSVCLFTDFDSQTNVSQSKDSDVYITDKCVLDMRSMDFKSNSAVAWSNKSDFACANAFNNSIIPEDTFFPSPESSDSTDHVKPKETENTKQPSKSCHKPKAIVHTEKVNMMSLTVLGLRMLFAKTVAVNFLLTAKLFFL

SEQ ID NO: 16232 - protein, 1007 aa, synthetic construct
MALPVTALLLPLALLLHAARPEVQLVESGGGLVQPGGSLRLSCAASGFSFSDFWMSWVRQAPGKGLEWVATISQAGSEKDYVDSVKGRFTISRDNAKKSLYLQMNSLRAEDTAVYYCASGVYSFDYRGQGTLVTVSSGTGGGGSGGGGSGGGGSEFDIVMTQSPDSLAVSLGERATINCKSSQSLLYRSNQKNYLAWYQQKPGQPPKLLIYWASTRESGVPDRFSGSGSGTDFTLTISSLQAEDVAVYYCQQYYNYPRTFGQGTKVEIKRTVLEDLKNVFPPEVAVFEPSEAEISHTQKATLVCLATGFYPDHVELSWWVNGKEVHSGVCTDPQPLKEQPALNDSRYCLSSRLRVSATFWQNPRNHFRCQVQFYGLSENDEWTQDRAKPVTQIVSAEAWGRADDVIKIHWQEKKSNTILGSQEGNTMKTNDTYMKFSWLTVPEKSLDKEHRCIVRHENNKNGVDQEIIFPPIKTDVITMDPKDNCSKDANDTLLLQLTNTSAYYMYLLLLLKSVVYFAIITCCLLRRTAFCCNGEKSRAKRSGSGATNFSLLKQAGDVEENPGPTSMDWIWRILFLVGAATGAHSGPQLQLQESGPGLVKPSETLSLTCTVSGDSISSGDYYWGWIRQPPGKGLEWIGHIYYSGVTYYNPSLKSRVTISVDTSRNQFSLKLSSVTAADTAVYYCTREDSSNWRSRGQGTLVTVSSGSGGGGSGGGGSGGGGSFEEVQLLESGGGLVQPGGSLRLSCAASGYSITSDYAWNWVRQAPGKGLEWVSYISNSGSTSYNPSLKSRFTISRDNSKNTLYLQMNSLRAEDTAVYYCAKERNYDYDDYYYAMDYWGQGTLVTVSSTRIQNPDPAVYQLRDSKSSDKSVCLFTDFDSQTNVSQSKDSDVYITDKCVLDMRSMDFKSNSAVAWSNKSDFACANAFNNSIIPEDTFFPSPESSDSTDHVKPKETENTKQPSKSCHKPKAIVHTEKVNMMSLTVLGLRMLFAKTVAVNFLLTAKLFFL

SEQ ID NO: 16233 - protein, 1000 aa, synthetic construct
MALPVTALLLPLALLLHAARPEVQLVESGGGLVQPGGSLRLSCAASGFSFSDFWMSWVRQAPGKGLEWVATISQAGSEKDYVDSVKGRFTISRDNAKKSLYLQMNSLRAEDTAVYYCASGVYSFDYRGQGTLVTVSSGTGGGGSGGGGSGGGGSEFDVVMTQSPLSLPVTLGQPASISCRSSQSLLHSSGNTYLEWYQQRPGQSPRPLIYKISTRFSGVPDRFSGSGSGTDFTLKISRVEAEDVGVYYCFQGSHVPYTFGGGTKVEIKRLEDLKNVFPPEVAVFEPSEAEISHTQKATLVCLATGFYPDHVELSWWVNGKEVHSGVCTDPQPLKEQPALNDSRYCLSSRLRVSATFWQNPRNHFRCQVQFYGLSENDEWTQDRAKPVTQIVSAEAWGRADDVIKIHWQEKKSNTILGSQEGNTMKTNDTYMKFSWLTVPEKSLDKEHRCIVRHENNKNGVDQEIIFPPIKTDVITMDPKDNCSKDANDTLLLQLTNTSAYYMYLLLLLKSVVYFAIITCCLLRRTAFCCNGEKSRAKRSGSGATNFSLLKQAGDVEENPGPTSMDWIWRILFLVGAATGAHSGPQLQLQESGPGLVKPSETLSLTCTVSGDSISSGDYYWGWIRQPPGKGLEWIGHIYYSGVTYYNPSLKSRVTISVDTSRNQFSLKLSSVTAADTAVYYCTREDSSNWRSRGQGTLVTVSSGSGGGGSGGGGSGGGGSFEQVQLVQSGAEVKKPGASVKVSCKASGLTIEDYYMHWVRQAPGQGLEWMGWIDPENGDTEYGPKFQGRVTMTRDTSINTAYMELSRLRSDDTAVYYCAVHNAHYGTWFAYWGQGTLVTVSSTRIQNPDPAVYQLRDSKSSDKSVCLFTDFDSQTNVSQSKDSDVYITDKCVLDMRSMDFKSNSAVAWSNKSDFACANAFNNSIIPEDTFFPSPESSDSTDHVKPKETENTKQPSKSCHKPKAIVHTEKVNMMSLTVLGLRMLFAKTVAVNFLLTAKLFFL

SEQ ID NO: 16234 - protein, 992 aa, synthetic construct
MALPVTALLLPLALLLHAARPEVQLVESGGGLVQPGGSLRLSCAASGFSFSDFWMSWVRQAPGKGLEWVATISQAGSEKDYVDSVKGRFTISRDNAKKSLYLQMNSLRAEDTAVYYCASGVYSFDYRGQGTLVTVSSGTGGGGSGGGGSGGGGSEFDIQMTQSPSSLSASVGDRVTITCRASENIYSNLAWYQQKPGKAPKLLIYAATNLADGVPSRFSGSGSGTDFTLTISSLQPEDFATYYCQHFWGTPTFGQGTKVEIKRTVLEDLKNVFPPEVAVFEPSEAEISHTQKATLVCLATGFYPDHVELSWWVNGKEVHSGVCTDPQPLKEQPALNDSRYCLSSRLRVSATFWQNPRNHFRCQVQFYGLSENDEWTQDRAKPVTQIVSAEAWGRADDVIKIHWQEKKSNTILGSQEGNTMKTNDTYMKFSWLTVPEKSLDKEHRCIVRHENNKNGVDQEIIFPPIKTDVITMDPKDNCSKDANDTLLLQLTNTSAYYMYLLLLLKSVVYFAIITCCLLRRTAFCCNGEKSRAKRSGSGATNFSLLKQAGDVEENPGPTSMDWIWRILFLVGAATGAHSGPQLQLQESGPGLVKPSETLSLTCTVSGDSISSGDYYWGWIRQPPGKGLEWIGHIYYSGVTYYNPSLKSRVTISVDTSRNQFSLKLSSVTAADTAVYYCTREDSSNWRSRGQGTLVTVSSGSGGGGSGGGGSGGGGSFEEVQLVESGGGLVQPGGSLRLSCAASGFSLTNYGVHWVRQAPGKGLEWVSVIWSGGSTDYNAAFISRFTISADTSKNTAYLQMNSLRAEDTAVYYCARELIHAMDNWGQGTLVTVSSTRIQNPDPAVYQLRDSKSSDKSVCLFTDFDSQTNVSQSKDSDVYITDKCVLDMRSMDFKSNSAVAWSNKSDFACANAFNNSIIPEDTFFPSPESSDSTDHVKPKETENTKQPSKSCHKPKAIVHTEKVNMMSLTVLGLRMLFAKTVAVNFLLTAKLFFL

SEQ ID NO: 16235 - protein, 999 aa, synthetic construct
MALPVTALLLPLALLLHAARPEVQLVESGGGLVQPGGSLRLSCAASGFSFSDFWMSWVRQAPGKGLEWVATISQAGSEKDYVDSVKGRFTISRDNAKKSLYLQMNSLRAEDTAVYYCASGVYSFDYRGQGTLVTVSSGTGGGGSGGGGSGGGGSEFDFVMTQSPLSLPVTPGEPASISCRSSQSIVHSNGNTYLEWYLQKPGQSPQLLIYKVSNRFSGVPDRFSGSGSGTDFTLKISRVEAEDVGVYYCFQGSHVPLTFGQGTKLEIKRLEDLKNVFPPEVAVFEPSEAEISHTQKATLVCLATGFYPDHVELSWWVNGKEVHSGVCTDPQPLKEQPALNDSRYCLSSRLRVSATFWQNPRNHFRCQVQFYGLSENDEWTQDRAKPVTQIVSAEAWGRADDVIKIHWQEKKSNTILGSQEGNTMKTNDTYMKFSWLTVPEKSLDKEHRCIVRHENNKNGVDQEIIFPPIKTDVITMDPKDNCSKDANDTLLLQLTNTSAYYMYLLLLLKSVVYFAIITCCLLRRTAFCCNGEKSRAKRSGSGATNFSLLKQAGDVEENPGPTSMDWIWRILFLVGAATGAHSGPQLQLQESGPGLVKPSETLSLTCTVSGDSISSGDYYWGWIRQPPGKGLEWIGHIYYSGVTYYNPSLKSRVTISVDTSRNQFSLKLSSVTAADTAVYYCTREDSSNWRSRGQGTLVTVSSGSGGGGSGGGGSGGGGSFEEVQLVESGAEVKKPGASVKVSCKASGYTFTSYWIHWVRQAPGQGLEWMGENDPSNGRTNYNEKFKNRVTLTVDTSISTAYMELSRLRSDDTAVYYCARGPNYFYSMDYWGQGTMVTVSSTRIQNPDPAVYQLRDSKSSDKSVCLFTDFDSQTNVSQSKDSDVYITDKCVLDMRSMDFKSNSAVAWSNKSDFACANAFNNSIIPEDTFFPSPESSDSTDHVKPKETENTKQPSKSCHKPKAIVHTEKVNMMSLTVLGLRMLFAKTVAVNFLLTAKLFFL

SEQ ID NO: 16236 - protein, 992 aa, synthetic construct
MALPVTALLLPLALLLHAARPEVQLVESGGGLVQPGGSLRLSCAASGFSFSDFWMSWVRQAPGKGLEWVATISQAGSEKDYVDSVKGRFTISRDNAKKSLYLQMNSLRAEDTAVYYCASGVYSFDYRGQGTLVTVSSGTGGGGSGGGGSGGGGSEFDIQLTQSPSFLSASVGDRVTITCSARSSISFMYWYQQKPGKAPKLLIYDTSNLASGVPSRFSGSGSGTEFTLTISSLEAEDAATYYCQQWSSYPLTFGQGTKLEIKLEDLKNVFPPEVAVFEPSEAEISHTQKATLVCLATGFYPDHVELSWWVNGKEVHSGVCTDPQPLKEQPALNDSRYCLSSRLRVSATFWQNPRNHFRCQVQFYGLSENDEWTQDRAKPVTQIVSAEAWGRADDVIKIHWQEKKSNTILGSQEGNTMKTNDTYMKFSWLTVPEKSLDKEHRCIVRHENNKNGVDQEIIFPPIKTDVITMDPKDNCSKDANDTLLLQLTNTSAYYMYLLLLLKSVVYFAIITCCLLRRTAFCCNGEKSRAKRSGSGATNFSLLKQAGDVEENPGPTSMDWIWRILFLVGAATGAHSGPQLQLQESGPGLVKPSETLSLTCTVSGDSISSGDYYWGWIRQPPGKGLEWIGHIYYSGVTYYNPSLKSRVTISVDTSRNQFSLKLSSVTAADTAVYYCTREDSSNWRSRGQGTLVTVSSGSGGGGSGGGGSGGGGSFEQVQLVQSGAEVKKPGASVKVSCKASGYTFTGSWMNWVRQAPGQGLEWIGRIYPGDGETNYNGKFKDRVTITADKSTSTAYMELSSLRSEDTAVYYCARIYGNNVYFDVWGQGTTVTVSSTRIQNPDPAVYQLRDSKSSDKSVCLFTDFDSQTNVSQSKDSDVYITDKCVLDMRSMDFKSNSAVAWSNKSDFACANAFNNSIIPEDTFFPSPESSDSTDHVKPKETENTKQPSKSCHKPKAIVHTEKVNMMSLTVLGLRMLFAKTVAVNFLLTAKLFFL

SEQ ID NO: 16237 - protein, 1000 aa, synthetic construct
MALPVTALLLPLALLLHAARPEVQLVESGGGLVQPGGSLRLSCAASGFSFSDFWMSWVRQAPGKGLEWVATISQAGSEKDYVDSVKGRFTISRDNAKKSLYLQMNSLRAEDTAVYYCASGVYSFDYRGQGTLVTVSSGTGGGGSGGGGSGGGGSEFQLVLTQSPSASASLGSSVKLTCTLSSGHKTDTIDWYQQQPGKAPRYLMKLEGSGSYNKGSGVPDRFSGSSSGADWYLTISSLQSEDEADYYCGTDYPGNYLFGGGTQLTVLGLEDLKNVFPPEVAVFEPSEAEISHTQKATLVCLATGFYPDHVELSWWVNGKEVHSGVCTDPQPLKEQPALNDSRYCLSSRLRVSATFWQNPRNHFRCQVQFYGLSENDEWTQDRAKPVTQIVSAEAWGRADDVIKIHWQEKKSNTILGSQEGNTMKTNDTYMKFSWLTVPEKSLDKEHRCIVRHENNKNGVDQEIIFPPIKTDVITMDPKDNCSKDANDTLLLQLTNTSAYYMYLLLLLKSVVYFAIITCCLLRRTAFCCNGEKSRAKRSGSGATNFSLLKQAGDVEENPGPTSMDWIWRILFLVGAATGAHSGPQLQLQESGPGLVKPSETLSLTCTVSGDSISSGDYYWGWIRQPPGKGLEWIGHIYYSGVTYYNPSLKSRVTISVDTSRNQFSLKLSSVTAADTAVYYCTREDSSNWRSRGQGTLVTVSSGSGGGGSGGGGSGGGGSFEQEQLVESGGGLVQPGGSLRLSCAASGFTFSDYYMSWIRQAPGKGLEWVATIYPSSGKTYYADSAKGRLTISSDNAKDSLYLQMNSLRAEDTAVYYCTRDSYADDAALFDIWGQGTTVTVSSTRIQNPDPAVYQLRDSKSSDKSVCLFTDFDSQTNVSQSKDSDVYITDKCVLDMRSMDFKSNSAVAWSNKSDFACANAFNNSIIPEDTFFPSPESSDSTDHVKPKETENTKQPSKSCHKPKAIVHTEKVNMMSLTVLGLRMLFAKTVAVNFLLTAKLFFL

SEQ ID NO: 16238 - protein, 992 aa, synthetic construct; identical to SEQ ID NO: 16234

SEQ ID NO: 16239 - protein, 999 aa, synthetic construct; identical to SEQ ID NO: 16235

SEQ ID NO: 16240 - protein, 992 aa, synthetic construct; identical to SEQ ID NO: 16236

SEQ ID NO: 16241 - protein, 1000 aa, synthetic construct; identical to SEQ ID NO: 16237

SEQ ID NO: 16242 - protein, 999 aa, synthetic construct
MALPVTALLLPLALLLHAARPEVQLVESGGGLVQPGGSLRLSCAASGFSFSDFWMSWVRQAPGKGLEWVATISQAGSEKDYVDSVKGRFTISRDNAKKSLYLQMNSLRAEDTAVYYCASGVYSFDYRGQGTLVTVSSGTGGGGSGGGGSGGGGSEFDIQLTQSPSSLSASVGDRVSFTCQASQDINNFLNWYQQKPGKAPKLLIYDASNLETGVPSRFSGSGSGTDFTFTISSLQPEDIATYYCQQYGNLPFTFGGGTKVEIKRLEDLKNVFPPEVAVFEPSEAEISHTQKATLVCLATGFYPDHVELSWWVNGKEVHSGVCTDPQPLKEQPALNDSRYCLSSRLRVSATFWQNPRNHFRCQVQFYGLSENDEWTQDRAKPVTQIVSAEAWGRADDVIKIHWQEKKSNTILGSQEGNTMKTNDTYMKFSWLTVPEKSLDKEHRCIVRHENNKNGVDQEIIFPPIKTDVITMDPKDNCSKDANDTLLLQLTNTSAYYMYLLLLLKSVVYFAIITCCLLRRTAFCCNGEKSRAKRSGSGATNFSLLKQAGDVEENPGPTSMDWIWRILFLVGAATGAHSGPQLQLQESGPGLVKPSETLSLTCTVSGDSISSGDYYWGWIRQPPGKGLEWIGHIYYSGVTYYNPSLKSRVTISVDTSRNQFSLKLSSVTAADTAVYYCTREDSSNWRSRGQGTLVTVSSGSGGGGSGGGGSGGGGSFEQVQLQESGPGLVKPSQTLSLTCTVSGGSISSGGFYWSWIRQHPGKGLEWIGYIHHSGSTHYNPSLKSRVTISIDTSKNLFSLRLSSVTAADTAVYYCASLVYCGGDCYSGFDYWGQGTLVTVSSTRIQNPDPAVYQLRDSKSSDKSVCLFTDFDSQTNVSQSKDSDVYITDKCVLDMRSMDFKSNSAVAWSNKSDFACANAFNNSIIPEDTFFPSPESSDSTDHVKPKETENTKQPSKSCHKPKAIVHTEKVNMMSLTVLGLRMLFAKTVAVNFLLTAKLFFL

SEQ ID NO: 16243 - protein, 995 aa, synthetic construct
MALPVTALLLPLALLLHAARPEVQLVESGGGLVQPGGSLRLSCAASGFSFSDFWMSWVRQAPGKGLEWVATISQAGSEKDYVDSVKGRFTISRDNAKKSLYLQMNSLRAEDTAVYYCASGVYSFDYRGQGTLVTVSSGTGGGGSGGGGSGGGGSEFDIQMTQSPSSLSASVGDRVTITCKSSQSVLYSSNQKNYLAWFQQKPGKAPKLLIYWASTRESGVPSRFSGSGSGTDFTLTISSLQPEDFATYFCHQYLSSYTFGQGTKVEIKRLEDLKNVFPPEVAVFEPSEAEISHTQKATLVCLATGFYPDHVELSWWVNGKEVHSGVCTDPQPLKEQPALNDSRYCLSSRLRVSATFWQNPRNHFRCQVQFYGLSENDEWTQDRAKPVTQIVSAEAWGRADDVIKIHWQEKKSNTILGSQEGNTMKTNDTYMKFSWLTVPEKSLDKEHRCIVRHENNKNGVDQEIIFPPIKTDVITMDPKDNCSKDANDTLLLQLTNTSAYYMYLLLLLKSVVYFAIITCCLLRRTAFCCNGEKSRAKRSGSGATNFSLLKQAGDVEENPGPTSMDWIWRILFLVGAATGAHSGPQLQLQESGPGLVKPSETLSLTCTVSGDSISSGDYYWGWIRQPPGKGLEWIGHIYYSGVTYYNPSLKSRVTISVDTSRNQFSLKLSSVTAADTAVYYCTREDSSNWRSRGQGTLVTVSSGSGGGGSGGGGSGGGGSFEEVQLVESGGGLVQPGGSLRLSCAASGYTFTTYWMHWVRQAPGKGLEWVGYIRPSTGYTEYNQKFKDRFTISADTSKNTAYLQMNSLRAEDTAVYYCARSRWLLDYWGQGTLVTVSTRIQNPDPAVYQLRDSKSSDKSVCLFTDFDSQTNVSQSKDSDVYITDKCVLDMRSMDFKSNSAVAWSNKSDFACANAFNNSIIPEDTFFPSPESSDSTDHVKPKETENTKQPSKSCHKPKAIVHTEKVNMMSLTVLGLRMLFAKTVAVNFLLTAKLFFL

SEQ ID NO: 16244 - protein, 992 aa, synthetic construct
MALPVTALLLPLALLLHAARPEVQLVESGGGLVQPGGSLRLSCAASGFSFSDFWMSWVRQAPGKGLEWVATISQAGSEKDYVDSVKGRFTISRDNAKKSLYLQMNSLRAEDTAVYYCASGVYSFDYRGQGTLVTVSSGTGGGGSGGGGSGGGGSEFDIQMTQSPSSLSASVGDRVTITCRASQDISNYLNWYQQKPGKAPKLLIYYTSRLHSGVPSRFSGSGSGTDFTLTISSLQPEDFATYYCQQGNTLPYTFGQGTKVEIKRLEDLKNVFPPEVAVFEPSEAEISHTQKATLVCLATGFYPDHVELSWWVNGKEVHSGVCTDPQPLKEQPALNDSRYCLSSRLRVSATFWQNPRNHFRCQVQFYGLSENDEWTQDRAKPVTQIVSAEAWGRADDVIKIHWQEKKSNTILGSQEGNTMKTNDTYMKFSWLTVPEKSLDKEHRCIVRHENNKNGVDQEIIFPPIKTDVITMDPKDNCSKDANDTLLLQLTNTSAYYMYLLLLLKSVVYFAIITCCLLRRTAFCCNGEKSRAKRSGSGATNFSLLKQAGDVEENPGPTSMDWIWRILFLVGAATGAHSGPQLQLQESGPGLVKPSETLSLTCTVSGDSISSGDYYWGWIRQPPGKGLEWIGHIYYSGVTYYNPSLKSRVTISVDTSRNQFSLKLSSVTAADTAVYYCTREDSSNWRSRGQGTLVTVSSGSGGGGSGGGGSGGGGSFEEVQLVESGGGLVQPGGSLRLSCAASGFTFSDYFMSWVRQAPGKGLEWVATISNGGTYTYYPDSVKGRFTISRDNSKNTLYLQMNSLRAEDTAVYYCARFDGYIFDYWGQGTLVTVSSTRIQNPDPAVYQLRDSKSSDKSVCLFTDFDSQTNVSQSKDSDVYITDKCVLDMRSMDFKSNSAVAWSNKSDFACANAFNNSIIPEDTFFPSPESSDSTDHVKPKETENTKQPSKSCHKPKAIVHTEKVNMMSLTVLGLRMLFAKTVAVNFLLTAKLFFL

SEQ ID NO: 16245 - protein, 997 aa, synthetic construct
MALPVTALLLPLALLLHAARPEVQLVESGGGLVQPGGSLRLSCAASGFSFSDFWMSWVRQAPGKGLEWVATISQAGSEKDYVDSVKGRFTISRDNAKKSLYLQMNSLRAEDTAVYYCASGVYSFDYRGQGTLVTVSSGTGGGGSGGGGSGGGGSEFDIQMTQTTSSLSASLGDRVTISCRASQDISKYLNWYQQKPDGTVKLLIYHTSRLHSGVPSRFSGSGSGTDYSLTISNLEQEDIATYFCQQGNTLPYTFGGGTKLEITLEIQNPDPAVYQLRDSKSSDKSVCLFTDFDSQTNVSQSKDSDVYITDKCVLDMRSMDFKSNSAVAWSNKSDFACANAFNNSIIPEDTFFPSPESSDSTDHVKPKETENTKQPSKSCHKPKAIVHTEKVNMMSLTVLGLRMLFAKTVAVNFLLTAKLFFLRAKRSGSGVKQTLNFDLLKLAGDVESNPGPTSMDWIWRILFLVGAATGAHSGPQLQLQESGPGLVKPSETLSLTCTVSGDSISSGDYYWGWIRQPPGKGLEWIGHIYYSGVTYYNPSLKSRVTISVDTSRNQFSLKLSSVTAADTAVYYCTREDSSNWRSRGQGTLVTVSSGSGGGGSGGGGSGGGGSFEVKLQESGPGLVAPSQSLSVTCTVSGVSLPDYGVSWIRQPPRKGLEWLGVIWGSETTYYNSALKSRLTIIKDNSKSQVFLKMNSLQTDDTAIYYCAKHYYYGGSYAMDYWGQGTSVTVSSTREDLKNVFPPEVAVFEPSEAEISHTQKATLVCLATGFYPDHVELSWWVNGKEVHSGVCTDPQPLKEQPALNDSRYCLSSRLRVSATFWQNPRNHFRCQVQFYGLSENDEWTQDRAKPVTQIVSAEAWGRADDVIKIHWQEKKSNTILGSQEGNTMKTNDTYMKFSWLTVPEKSLDKEHRCIVRHENNKNGVDQEIIFPPIKTDVITMDPKDNCSKDANDTLLLQLTNTSAYYMYLLLLLKSVVYFAIITCCLLRRTAFCCNGEKS

SEQ ID NO: 16246 - protein, 998 aa, synthetic construct
MALPVTALLLPLALLLHAARPEVQLVESGGGLVQPGGSLRLSCAASGFSFSDFWMSWVRQAPGKGLEWVATISQAGSEKDYVDSVKGRFTISRDNAKKSLYLQMNSLRAEDTAVYYCASGVYSFDYRGQGTLVTVSSGTGGGGSGGGGSGGGGSEFEIVMTQSPATLSLSPGERATLSCRASQDISKYLNWYQQKPGQAPRLLIYHTSRLHSGIPARFSGSGSGTDYTLTISSLQPEDFAVYFCQQGNTLPYTFGQGTKLEIKLEIQNPDPAVYQLRDSKSSDKSVCLFTDFDSQTNVSQSKDSDVYITDKCVLDMRSMDFKSNSAVAWSNKSDFACANAFNNSIIPEDTFFPSPESSDSTDHVKPKETENTKQPSKSCHKPKAIVHTEKVNMMSLTVLGLRMLFAKTVAVNFLLTAKLFFLRAKRSGSGVKQTLNFDLLKLAGDVESNPGPTSMDWIWRILFLVGAATGAHSGPQLQLQESGPGLVKPSETLSLTCTVSGDSISSGDYYWGWIRQPPGKGLEWIGHIYYSGVTYYNPSLKSRVTISVDTSRNQFSLKLSSVTAADTAVYYCTREDSSNWRSRGQGTLVTVSSGSGGGGSGGGGSGGGGSFEQVQLQESGPGLVKPSETLSLTCTVSGVSLPDYGVSWIRQPPGKGLEWIGVIWGSETTYYNSSLKSRVTISKDNSKNQVSLKLSSVTAADTAVYYCAKHYYYGGSYAMDYWGQGTLVTVSSTREDLKNVFPPEVAVFEPSEAEISHTQKATLVCLATGFYPDHVELSWWVNGKEVHSGVCTDPQPLKEQPALNDSRYCLSSRLRVSATFWQNPRNHFRCQVQFYGLSENDEWTQDRAKPVTQIVSAEAWGRADDVIKIHWQEKKSNTILGSQEGNTMKTNDTYMKFSWLTVPEKSLDKEHRCIVRHENNKNGVDQEIIFPPIKTDVITMDPKDNCSKDANDTLLLQLTNTSAYYMYLLLLLKSVVYFAIITCCLLRRTAFCCNGEKS

SEQ ID NO: 16247 - protein, 999 aa, synthetic construct
MALPVTALLLPLALLLHAARPEVQLVESGGGLVQPGGSLRLSCAASGFSFSDFWMSWVRQAPGKGLEWVATISQAGSEKDYVDSVKGRFTISRDNAKKSLYLQMNSLRAEDTAVYYCASGVYSFDYRGQGTLVTVSSGTGGGGSGGGGSGGGGSEFDEIVLTQSPATLSLSPGERATLSCSASSSVSYMHWYQQKPGQAPRLLIYDTSKLASGIPARFSGSGSGTDFTLTISSLEPEDVAVYYCFQGSVYPFTFGQGTKLEIKRLEIQNPDPAVYQLRDSKSSDKSVCLFTDFDSQTNVSQSKDSDVYITDKCVLDMRSMDFKSNSAVAWSNKSDFACANAFNNSIIPEDTFFPSPESSDSTDHVKPKETENTKQPSKSCHKPKAIVHTEKVNMMSLTVLGLRMLFAKTVAVNFLLTAKLFFLRAKRSGSGVKQTLNFDLLKLAGDVESNPGPTSMDWIWRILFLVGAATGAHSGPQLQLQESGPGLVKPSETLSLTCTVSGDSISSGDYYWGWIRQPPGKGLEWIGHIYYSGVTYYNPSLKSRVTISVDTSRNQFSLKLSSVTAADTAVYYCTREDSSNWRSRGQGTLVTVSSGSGGGGSGGGGSGGGGSFEQVQLQESGPGLVKPSQTLSLTCTVSGGSISTSGMGVGWIRQHPGKGLEWIGHIWWDDDKRYNPALKSRVTISVDTSKNQFSLKLSSVTAADTAVYYCARMELWSYYFDYWGQGTLVTVSSTREDLKNVFPPEVAVFEPSEAEISHTQKATLVCLATGFYPDHVELSWWVNGKEVHSGVCTDPQPLKEQPALNDSRYCLSSRLRVSATFWQNPRNHFRCQVQFYGLSENDEWTQDRAKPVTQIVSAEAWGRADDVIKIHWQEKKSNTILGSQEGNTMKTNDTYMKFSWLTVPEKSLDKEHRCIVRHENNKNGVDQEIIFPPIKTDVITMDPKDNCSKDANDTLLLQLTNTSAYYMYLLLLLKSVVYFAIITCCLLRRTAFCCNGEKS

SEQ ID NO: 16248 - protein, 997 aa, synthetic construct
MALPVTALLLPLALLLHAARPEVQLVESGGGLVQPGGSLRLSCAASGFSFSDFWMSWVRQAPGKGLEWVATISQAGSEKDYVDSVKGRFTISRDNAKKSLYLQMNSLRAEDTAVYYCASGVYSFDYRGQGTLVTVSSGTGGGGSGGGGSGGGGSEFDYIHVTQSPSSLSVSIGDRVTINCQTSQGVGSDLHWYQHKPGRAPKLLIHHASSVEDGVPSRFSGTGFHTSFNLTINDLQADDIGTYYCQVLQSFGRGSRLDTKLEIQNPDPAVYQLRDSKSSDKSVCLFTDFDSQTNVSQSKDSDVYITDKCVLDMRSMDFKSNSAVAWSNKSDFACANAFNNSIIPEDTFFPSPESSDSTDHVKPKETENTKQPSKSCHKPKAIVHTEKVNMMSLTVLGLRMLFAKTVAVNFLLTAKLFFLRAKRSGSGVKQTLNFDLLKLAGDVESNPGPTSMDWIWRILFLVGAATGAHSGPQLQLQESGPGLVKPSETLSLTCTVSGDSISSGDYYWGWIRQPPGKGLEWIGHIYYSGVTYYNPSLKSRVTISVDTSRNQFSLKLSSVTAADTAVYYCTREDSSNWRSRGQGTLVTVSSGSGGGGSGGGGSGGGGSFERAHLVQSGTAMKKPGASVRVSCQTSGYTFTAHILFWFRQAPGRGLEWVGWIKPQYGAVNFGGGFRDRVTLTRDVYREIAYMDIRGLKPDDTAVYYCARDRSYGDSSWALDAWGQGTTVVVSATREDLKNVFPPEVAVFEPSEAEISHTQKATLVCLATGFYPDHVELSWWVNGKEVHSGVCTDPQPLKEQPALNDSRYCLSSRLRVSATFWQNPRNHFRCQVQFYGLSENDEWTQDRAKPVTQIVSAEAWGRADDVIKIHWQEKKSNTILGSQEGNTMKTNDTYMKFSWLTVPEKSLDKEHRCIVRHENNKNGVDQEIIFPPIKTDVITMDPKDNCSKDANDTLLLQLTNTSAYYMYLLLLLKSVVYFAIITCCLLRRTAFCCNGEKS

SEQ ID NO: 16249 - protein, 1007 aa, synthetic construct
MALPVTALLLPLALLLHAARPEVQLVESGGGLVQPGGSLRLSCAASGFSFSDFWMSWVRQAPGKGLEWVATISQAGSEKDYVDSVKGRFTISRDNAKKSLYLQMNSLRAEDTAVYYCASGVYSFDYRGQGTLVTVSSGTGGGGSGGGGSGGGGSEFDVQMIQTPDSLAVSLGQRATISCRASESVDNYGISFMHWYQQKPGQSPKLLIYRASNLESGIPARFSGSGSRTDFTLTINPVETDDVATYYCQQNNKDPPTFGGGTKLEIKLEIQNPDPAVYQLRDSKSSDKSVCLFTDFDSQTNVSQSKDSDVYITDKCVLDMRSMDFKSNSAVAWSNKSDFACANAFNNSIIPEDTFFPSPESSDSTDHVKPKETENTKQPSKSCHKPKAIVHTEKVNMMSLTVLGLRMLFAKTVAVNFLLTAKLFFLRAKRSGSGVKQTLNFDLLKLAGDVESNPGPTSMDWIWRILFLVGAATGAHSGPQLQLQESGPGLVKPSETLSLTCTVSGDSISSGDYYWGWIRQPPGKGLEWIGHIYYSGVTYYNPSLKSRVTISVDTSRNQFSLKLSSVTAADTAVYYCTREDSSNWRSRGQGTLVTVSSGSGGGGSGGGGSGGGGSFEGGGGSQVQLQQSGAELVKPGASVKISCKASGYAFSSYWMNWVKQRPGKGLEWIGQIYPGDGDTTYNGKFKGKATLTADKSSSTVYMQLNSLTSEDSAVYFCVRYYYGSSGYFDYWGQGTTLTVSSTREDLKNVFPPEVAVFEPSEAEISHTQKATLVCLATGFYPDHVELSWWVNGKEVHSGVCTDPQPLKEQPALNDSRYCLSSRLRVSATFWQNPRNHFRCQVQFYGLSENDEWTQDRAKPVTQIVSAEAWGRADDVIKIHWQEKKSNTILGSQEGNTMKTNDTYMKFSWLTVPEKSLDKEHRCIVRHENNKNGVDQEIIFPPIKTDVITMDPKDNCSKDANDTLLLQLTNTSAYYMYLLLLLKSVVYFAIITCCLLRRTAFCCNGEKS

SEQ ID NO: 16250 - protein, 998 aa, synthetic construct
MALPVTALLLPLALLLHAARPEVQLVESGGGLVQPGGSLRLSCAASGFSFSDFWMSWVRQAPGKGLEWVATISQAGSEKDYVDSVKGRFTISRDNAKKSLYLQMNSLRAEDTAVYYCASGVYSFDYRGQGTLVTVSSGTGGGGSGGGGSGGGGSEFDVQMIQTPSSLSASLGDRVTISCRASQDIGNYLNWYQQKPDGTVKLLIYYTSRLHSGVPSRFSGSGSGTEYSLTISNLEQEDIATYFCQQGSALPPTFGGGTKLEINLEIQNPDPAVYQLRDSKSSDKSVCLFTDFDSQTNVSQSKDSDVYITDKCVLDMRSMDFKSNSAVAWSNKSDFACANAFNNSIIPEDTFFPSPESSDSTDHVKPKETENTKQPSKSCHKPKAIVHTEKVNMMSLTVLGLRMLFAKTVAVNFLLTAKLFFLRAKRSGSGVKQTLNFDLLKLAGDVESNPGPTSMDWIWRILFLVGAATGAHSGPQLQLQESGPGLVKPSETLSLTCTVSGDSISSGDYYWGWIRQPPGKGLEWIGHIYYSGVTYYNPSLKSRVTISVDTSRNQFSLKLSSVTAADTAVYYCTREDSSNWRSRGQGTLVTVSSGSGGGGSGGGGSGGGGSFEALQLQQSGAELVRPGASVTLSCKASGYTFTDYEMHWVKQTPVHGLEWIGAIDPETGGTAYNQKFEGKAILTADKSSSTAYMELRSLTSEDSPVYYCARRRYYGSSSFDYWGQGTTLTVSSTREDLKNVFPPEVAVFEPSEAEISHTQKATLVCLATGFYPDHVELSWWVNGKEVHSGVCTDPQPLKEQPALNDSRYCLSSRLRVSATFWQNPRNHFRCQVQFYGLSENDEWTQDRAKPVTQIVSAEAWGRADDVIKIHWQEKKSNTILGSQEGNTMKTNDTYMKFSWLTVPEKSLDKEHRCIVRHENNKNGVDQEIIFPPIKTDVITMDPKDNCSKDANDTLLLQLTNTSAYYMYLLLLLKSVVYFAIITCCLLRRTAFCCNGEKS

SEQ ID NO: 16251 - protein, 1002 aa, synthetic construct
MALPVTALLLPLALLLHAARPEVQLVESGGGLVQPGGSLRLSCAASGFSFSDFWMSWVRQAPGKGLEWVATISQAGSEKDYVDSVKGRFTISRDNAKKSLYLQMNSLRAEDTAVYYCASGVYSFDYRGQGTLVTVSSGTGGGGSGGGGSGGGGSEFDIVLTQSPASLAVSLGQRATISCRASKSVSTSGYSYLHWYQQKPGQPPKLLIYLASNLESGVPARFSGSGSGTDFTLNIHPVEEEDAATYYCQHSRELPFTFGSGTKLEIKLEIQNPDPAVYQLRDSKSSDKSVCLFTDFDSQTNVSQSKDSDVYITDKCVLDMRSMDFKSNSAVAWSNKSDFACANAFNNSIIPEDTFFPSPESSDSTDHVKPKETENTKQPSKSCHKPKAIVHTEKVNMMSLTVLGLRMLFAKTVAVNFLLTAKLFFLRAKRSGSGVKQTLNFDLLKLAGDVESNPGPTSMDWIWRILFLVGAATGAHSGPQLQLQESGPGLVKPSETLSLTCTVSGDSISSGDYYWGWIRQPPGKGLEWIGHIYYSGVTYYNPSLKSRVTISVDTSRNQFSLKLSSVTAADTAVYYCTREDSSNWRSRGQGTLVTVSSGSGGGGSGGGGSGGGGSFEQVQLVESGGGLVQPGGSLKLSCAASGFDFSRYWMSWVRQAPGKGLEWIGEINPTSSTINFTPSLKDKVFISRDNAKNTLYLQMSKVRSEDTALYYCARGNYYRYGDAMDYWGQGTSVTVSTREDLKNVFPPEVAVFEPSEAEISHTQKATLVCLATGFYPDHVELSWWVNGKEVHSGVCTDPQPLKEQPALNDSRYCLSSRLRVSATFWQNPRNHFRCQVQFYGLSENDEWTQDRAKPVTQIVSAEAWGRADDVIKIHWQEKKSNTILGSQEGNTMKTNDTYMKFSWLTVPEKSLDKEHRCIVRHENNKNGVDQEIIFPPIKTDVITMDPKDNCSKDANDTLLLQLTNTSAYYMYLLLLLKSVVYFAIITCCLLRRTAFCCNGEKS

SEQ ID NO: 16252 - protein, 1000 aa, synthetic construct
MALPVTALLLPLALLLHAARPEVQLVESGGGLVQPGGSLRLSCAASGFSFSDFWMSWVRQAPGKGLEWVATISQAGSEKDYVDSVKGRFTISRDNAKKSLYLQMNSLRAEDTAVYYCASGVYSFDYRGQGTLVTVSSGTGGGGSGGGGSGGGGSEFDIQMTQSPSSLSASVGDRVTITCSASQDISNYLNWYQQKPGKAPKLLIYYTSNLHSGVPSRFSGSGSGTDFTLTISSLQPEDFATYYCQQYRKLPWTFGQGTKLEIKRLEIQNPDPAVYQLRDSKSSDKSVCLFTDFDSQTNVSQSKDSDVYITDKCVLDMRSMDFKSNSAVAWSNKSDFACANAFNNSIIPEDTFFPSPESSDSTDHVKPKETENTKQPSKSCHKPKAIVHTEKVNMMSLTVLGLRMLFAKTVAVNFLLTAKLFFLRAKRSGSGVKQTLNFDLLKLAGDVESNPGPTSMDWIWRILFLVGAATGAHSGPQLQLQESGPGLVKPSETLSLTCTVSGDSISSGDYYWGWIRQPPGKGLEWIGHIYYSGVTYYNPSLKSRVTISVDTSRNQFSLKLSSVTAADTAVYYCTREDSSNWRSRGQGTLVTVSSGSGGGGSGGGGSGGGGSFEQVQLVQSGAEVKKPGSSVKVSCKASGGTFSNYWMHWVRQAPGQGLEWMGATYRGHSDTYYNQKFKGRVTITADKSTSTAYMELSSLRSEDTAVYYCARGAIYDGYDVLDNWGQGTLVTVSSTREDLKNVFPPEVAVFEPSEAEISHTQKATLVCLATGFYPDHVELSWWVNGKEVHSGVCTDPQPLKEQPALNDSRYCLSSRLRVSATFWQNPRNHFRCQVQFYGLSENDEWTQDRAKPVTQIVSAEAWGRADDVIKIHWQEKKSNTILGSQEGNTMKTNDTYMKFSWLTVPEKSLDKEHRCIVRHENNKNGVDQEIIFPPIKTDVITMDPKDNCSKDANDTLLLQLTNTSAYYMYLLLLLKSVVYFAIITCCLLRRTAFCCNGEKS

SEQ ID NO: 16253 - protein, 1000 aa, synthetic construct
MALPVTALLLPLALLLHAARPEVQLVESGGGLVQPGGSLRLSCAASGFSFSDFWMSWVRQAPGKGLEWVATISQAGSEKDYVDSVKGRFTISRDNAKKSLYLQMNSLRAEDTAVYYCASGVYSFDYRGQGTLVTVSSGTGGGGSGGGGSGGGGSEFDIVLTQSPATLSLSPGDRATISCRASESVTILGSHLIYWYQQKPGQPPRLLIQLASNVQTGVPARFSGSGSRTDFTLTISSVEPEDFAVYYCLQSRTIPRTFGQGTKLEIKRLEIQNPDPAVYQLRDSKSSDKSVCLFTDFDSQTNVSQSKDSDVYITDKCVLDMRSMDFKSNSAVAWSNKSDFACANAFNNSIIPEDTFFPSPESSDSTDHVKPKETENTKQPSKSCHKPKAIVHTEKVNMMSLTVLGLRMLFAKTVAVNFLLTAKLFFLRAKRSGSGVKQTLNFDLLKLAGDVESNPGPTSMDWIWRILFLVGAATGAHSGPQLQLQESGPGLVKPSETLSLTCTVSGDSISSGDYYWGWIRQPPGKGLEWIGHIYYSGVTYYNPSLKSRVTISVDTSRNQFSLKLSSVTAADTAVYYCTREDSSNWRSRGQGTLVTVSSGSGGGGSGGGGSGGGGSFEQVQLVQSGPEVKKPGESVKISCKASGYTFRHYSMNWVKQAPGQGLKWMGRINTESGVPIYADDFKGRFSFTVDTSASTAYLEISSLTSEDTAVYFCSNDYLYSLDFWGQGTTLTVSSTREDLKNVFPPEVAVFEPSEAEISHTQKATLVCLATGFYPDHVELSWWVNGKEVHSGVCTDPQPLKEQPALNDSRYCLSSRLRVSATFWQNPRNHFRCQVQFYGLSENDEWTQDRAKPVTQIVSAEAWGRADDVIKIHWQEKKSNTILGSQEGNTMKTNDTYMKFSWLTVPEKSLDKEHRCIVRHENNKNGVDQEIIFPPIKTDVITMDPKDNCSKDANDTLLLQLTNTSAYYMYLLLLLKSVVYFAIITCCLLRRTAFCCNGEKS

SEQ ID NO: 16254 - protein, 1001 aa, synthetic construct
MALPVTALLLPLALLLHAARPEVQLVESGGGLVQPGGSLRLSCAASGFSFSDFWMSWVRQAPGKGLEWVATISQAGSEKDYVDSVKGRFTISRDNAKKSLYLQMNSLRAEDTAVYYCASGVYSFDYRGQGTLVTVSSGTGGGGSGGGGSGGGGSEFQSVLTQPPSVSGAPGQRVTISCTGSSSNIGAGFDVHWYQQLPGTAPKLLIYGNSNRPSGVPDRFSGSKSGTSASLAITGLQAEDEADYYCQSYDSSLSGYVFGTGTKVTVLGLEIQNPDPAVYQLRDSKSSDKSVCLFTDFDSQTNVSQSKDSDVYITDKCVLDMRSMDFKSNSAVAWSNKSDFACANAFNNSIIPEDTFFPSPESSDSTDHVKPKETENTKQPSKSCHKPKAIVHTEKVNMMSLTVLGLRMLFAKTVAVNFLLTAKLFFLRAKRSGSGVKQTLNFDLLKLAGDVESNPGPTSMDWIWRILFLVGAATGAHSGPQLQLQESGPGLVKPSETLSLTCTVSGDSISSGDYYWGWIRQPPGKGLEWIGHIYYSGVTYYNPSLKSRVTISVDTSRNQFSLKLSSVTAADTAVYYCTREDSSNWRSRGQGTLVTVSSGSGGGGSGGGGSGGGGSFEQVQLVQSGAEVKKPGASVKVSCKASGYTFTDYYMHWVRQAPGQRLEWMGWINPNSGGTNYAQKFQDRITVTRDTSSNTGYMELTRLRSDDTAVYYCARSPYSGVLDKWGQGTLVTVSSTREDLKNVFPPEVAVFEPSEAEISHTQKATLVCLATGFYPDHVELSWWVNGKEVHSGVCTDPQPLKEQPALNDSRYCLSSRLRVSATFWQNPRNHFRCQVQFYGLSENDEWTQDRAKPVTQIVSAEAWGRADDVIKIHWQEKKSNTILGSQEGNTMKTNDTYMKFSWLTVPEKSLDKEHRCIVRHENNKNGVDQEIIFPPIKTDVITMDPKDNCSKDANDTLLLQLTNTSAYYMYLLLLLKSVVYFAIITCCLLRRTAFCCNGEKS

SEQ ID NO: 16255 - protein, 998 aa, synthetic construct
MALPVTALLLPLALLLHAARPEVQLVESGGGLVQPGGSLRLSCAASGFSFSDFWMSWVRQAPGKGLEWVATISQAGSEKDYVDSVKGRFTISRDNAKKSLYLQMNSLRAEDTAVYYCASGVYSFDYRGQGTLVTVSSGTGGGGSGGGGSGGGGSEFQAVLTQPPSASGTPGQRVTISCSGSSSNIGSYTVSWYQQLPGTAPKFLIYSNNQRPSGVPDRFSGSKSGTSASLAISGLQSEDEADYYCAAWDDSLNGYVFGTGTKVTVLGLEIQNPDPAVYQLRDSKSSDKSVCLFTDFDSQTNVSQSKDSDVYITDKCVLDMRSMDFKSNSAVAWSNKSDFACANAFNNSIIPEDTFFPSPESSDSTDHVKPKETENTKQPSKSCHKPKAIVHTEKVNMMSLTVLGLRMLFAKTVAVNFLLTAKLFFLRAKRSGSGVKQTLNFDLLKLAGDVESNPGPTSMDWIWRILFLVGAATGAHSGPQLQLQESGPGLVKPSETLSLTCTVSGDSISSGDYYWGWIRQPPGKGLEWIGHIYYSGVTYYNPSLKSRVTISVDTSRNQFSLKLSSVTAADTAVYYCTREDSSNWRSRGQGTLVTVSSGSGGGGSGGGGSGGGGSFEVQLVQSGAEVKKPGESLKISCKGSGYDFTTYWIGWVRQMPGKGLEWMGIIYPGDSDTRYSPSVRGRVTISADKSINTAYLQWSSLEASDTAMYYCARMWTFSQDGWGQGTLVTVSSTREDLKNVFPPEVAVFEPSEAEISHTQKATLVCLATGFYPDHVELSWWVNGKEVHSGVCTDPQPLKEQPALNDSRYCLSSRLRVSATFWQNPRNHFRCQVQFYGLSENDEWTQDRAKPVTQIVSAEAWGRADDVIKIHWQEKKSNTILGSQEGNTMKTNDTYMKFSWLTVPEKSLDKEHRCIVRHENNKNGVDQEIIFPPIKTDVITMDPKDNCSKDANDTLLLQLTNTSAYYMYLLLLLKSVVYFAIITCCLLRRTAFCCNGEKS

SEQ ID NO: 16256 - protein, 1001 aa, synthetic construct
MALPVTALLLPLALLLHAARPEVQLVESGGGLVQPGGSLRLSCAASGFSFSDFWMSWVRQAPGKGLEWVATISQAGSEKDYVDSVKGRFTISRDNAKKSLYLQMNSLRAEDTAVYYCASGVYSFDYRGQGTLVTVSSGTGGGGSGGGGSGGGGSEFDIVMTQSPDSLAVSLGERATINCKSSQSILYSSNQKNYLAWYQQKPGQSPKLLIYWASTRESGVPDRFSGSGSGTDFTLTISSLQAEDVAVYYCHQYISSYTFGQGTKLEIKLEIQNPDPAVYQLRDSKSSDKSVCLFTDFDSQTNVSQSKDSDVYITDKCVLDMRSMDFKSNSAVAWSNKSDFACANAFNNSIIPEDTFFPSPESSDSTDHVKPKETENTKQPSKSCHKPKAIVHTEKVNMMSLTVLGLRMLFAKTVAVNFLLTAKLFFLRAKRSGSGVKQTLNFDLLKLAGDVESNPGPTSMDWIWRILFLVGAATGAHSGPQLQLQESGPGLVKPSETLSLTCTVSGDSISSGDYYWGWIRQPPGKGLEWIGHIYYSGVTYYNPSLKSRVTISVDTSRNQFSLKLSSVTAADTAVYYCTREDSSNWRSRGQGTLVTVSSGSGGGGSGGGGSGGGGSFEQVQLVQSGAEVKKPGASVKVSCKASGYTFASQWMHWMRQAPGQGLEWIGWINPGNVNTKYNEKFKGRATLTVDTSTNTAYMELSSLRSEDTAVYYCARSTWYRPLDYWGQGTLVTVSSTREDLKNVFPPEVAVFEPSEAEISHTQKATLVCLATGFYPDHVELSWWVNGKEVHSGVCTDPQPLKEQPALNDSRYCLSSRLRVSATFWQNPRNHFRCQVQFYGLSENDEWTQDRAKPVTQIVSAEAWGRADDVIKIHWQEKKSNTILGSQEGNTMKTNDTYMKFSWLTVPEKSLDKEHRCIVRHENNKNGVDQEIIFPPIKTDVITMDPKDNCSKDANDTLLLQLTNTSAYYMYLLLLLKSVVYFAIITCCLLRRTAFCCNGEKS

SEQ ID NO: 16257 - protein, 1001 aa, synthetic construct
MALPVTALLLPLALLLHAARPEVQLVESGGGLVQPGGSLRLSCAASGFSFSDFWMSWVRQAPGKGLEWVATISQAGSEKDYVDSVKGRFTISRDNAKKSLYLQMNSLRAEDTAVYYCASGVYSFDYRGQGTLVTVSSGTGGGGSGGGGSGGGGSEFDHIVLTQSPSSLSASLGDRVTISCRASQDISTYLNWYQQKPDGTVKLLIFYTSRLHAGVPSRFSGSGSGTHHSLTISNLEQEDIATYFCQQGNSLPFTFGSGTKLEIKRLEIQNPDPAVYQLRDSKSSDKSVCLFTDFDSQTNVSQSKDSDVYITDKCVLDMRSMDFKSNSAVAWSNKSDFACANAFNNSIIPEDTFFPSPESSDSTDHVKPKETENTKQPSKSCHKPKAIVHTEKVNMMSLTVLGLRMLFAKTVAVNFLLTAKLFFLRAKRSGSGVKQTLNFDLLKLAGDVESNPGPTSMDWIWRILFLVGAATGAHSGPQLQLQESGPGLVKPSETLSLTCTVSGDSISSGDYYWGWIRQPPGKGLEWIGHIYYSGVTYYNPSLKSRVTISVDTSRNQFSLKLSSVTAADTAVYYCTREDSSNWRSRGQGTLVTVSSGSGGGGSGGGGSGGGGSFEQVQLKESGPELEKPGASVKISCKASGYSFTAYSMNWVKQNNGMSLEWIGSIDPYYGDTKYAQKFKGKATLTVDKASSTAYLQLKSLTSEDSAVYYCARRMITTGDWYFDVWGAGTTVTVSSTREDLKNVFPPEVAVFEPSEAEISHTQKATLVCLATGFYPDHVELSWWVNGKEVHSGVCTDPQPLKEQPALNDSRYCLSSRLRVSATFWQNPRNHFRCQVQFYGLSENDEWTQDRAKPVTQIVSAEAWGRADDVIKIHWQEKKSNTILGSQEGNTMKTNDTYMKFSWLTVPEKSLDKEHRCIVRHENNKNGVDQEIIFPPIKTDVITMDPKDNCSKDANDTLLLQLTNTSAYYMYLLLLLKSVVYFAIITCCLLRRTAFCCNGEKS

SEQ ID NO: 16258 - protein, 1001 aa, synthetic construct; identical to SEQ ID NO: 16257

SEQ ID NO: 16259 - protein, 1001 aa, synthetic construct
MALPVTALLLPLALLLHAARPEVQLVESGGGLVQPGGSLRLSCAASGFSFSDFWMSWVRQAPGKGLEWVATISQAGSEKDYVDSVKGRFTISRDNAKKSLYLQMNSLRAEDTAVYYCASGVYSFDYRGQGTLVTVSSGTGGGGSGGGGSGGGGSEFDEIVLTQSPATLSLSPGERATLSCRASQSVSSYLAWYQQKPGQAPRLLIYDASNRATGIPARFSGSGSGTDFTLTISSLEPEDFAVYYCQQRSNWPITFGQGTRLEIKLEIQNPDPAVYQLRDSKSSDKSVCLFTDFDSQTNVSQSKDSDVYITDKCVLDMRSMDFKSNSAVAWSNKSDFACANAFNNSIIPEDTFFPSPESSDSTDHVKPKETENTKQPSKSCHKPKAIVHTEKVNMMSLTVLGLRMLFAKTVAVNFLLTAKLFFLRAKRSGSGVKQTLNFDLLKLAGDVESNPGPTSMDWIWRILFLVGAATGAHSGPQLQLQESGPGLVKPSETLSLTCTVSGDSISSGDYYWGWIRQPPGKGLEWIGHIYYSGVTYYNPSLKSRVTISVDTSRNQFSLKLSSVTAADTAVYYCTREDSSNWRSRGQGTLVTVSSGSGGGGSGGGGSGGGGSFEEVQLVESGGGLVQPGRSLRLSCAASGFTFNDYAMHWVRQAPGKGLEWVSTISWNSGSIGYADSVKGRFTISRDNAKKSLYLQMNSLRAEDTALYYCAKDIQYGNYYYGMDVWGQGTTVTVSSTREDLKNVFPPEVAVFEPSEAEISHTQKATLVCLATGFYPDHVELSWWVNGKEVHSGVCTDPQPLKEQPALNDSRYCLSSRLRVSATFWQNPRNHFRCQVQFYGLSENDEWTQDRAKPVTQIVSAEAWGRADDVIKIHWQEKKSNTILGSQEGNTMKTNDTYMKFSWLTVPEKSLDKEHRCIVRHENNKNGVDQEIIFPPIKTDVITMDPKDNCSKDANDTLLLQLTNTSAYYMYLLLLLKSVVYFAIITCCLLRRTAFCCNGEKS

SEQ ID NO: 16260 - protein, 1003 aa, synthetic construct
MALPVTALLLPLALLLHAARPEVQLVESGGGLVQPGGSLRLSCAASGFSFSDFWMSWVRQAPGKGLEWVATISQAGSEKDYVDSVKGRFTISRDNAKKSLYLQMNSLRAEDTAVYYCASGVYSFDYRGQGTLVTVSSGTGGGGSGGGGSGGGGSEFDIVMTQTPLSLPVTPGEPASISCRSSKSLLHSNGITYLYWYLQKPGQSPQLLIYQMSNLVSGVPDRFSGSGSGTDFTLKISRVEAEDVGVYYCAQNLELPYTFGGGTKVEIKRLEIQNPDPAVYQLRDSKSSDKSVCLFTDFDSQTNVSQSKDSDVYITDKCVLDMRSMDFKSNSAVAWSNKSDFACANAFNNSIIPEDTFFPSPESSDSTDHVKPKETENTKQPSKSCHKPKAIVHTEKVNMMSLTVLGLRMLFAKTVAVNFLLTAKLFFLRAKRSGSGVKQTLNFDLLKLAGDVESNPGPTSMDWIWRILFLVGAATGAHSGPQLQLQESGPGLVKPSETLSLTCTVSGDSISSGDYYWGWIRQPPGKGLEWIGHIYYSGVTYYNPSLKSRVTISVDTSRNQFSLKLSSVTAADTAVYYCTREDSSNWRSRGQGTLVTVSSGSGGGGSGGGGSGGGGSFEQVQLVQSGAEVKKPGSSVKVSCKASGYAFSYSWINWVRQAPGQGLEWMGRIFPGDGDTDYNGKFKGRVTITADKSTSTAYMELSSLRSEDTAVYYCARNVFDGYWLVYWGQGTLVTVSSTREDLKNVFPPEVAVFEPSEAEISHTQKATLVCLATGFYPDHVELSWWVNGKEVHSGVCTDPQPLKEQPALNDSRYCLSSRLRVSATFWQNPRNHFRCQVQFYGLSENDEWTQDRAKPVTQIVSAEAWGRADDVIKIHWQEKKSNTILGSQEGNTMKTNDTYMKFSWLTVPEKSLDKEHRCIVRHENNKNGVDQEIIFPPIKTDVITMDPKDNCSKDANDTLLLQLTNTSAYYMYLLLLLKSVVYFAIITCCLLRRTAFCCNGEKS

SEQ ID NO: 16261 - protein, 1004 aa, synthetic construct
MALPVTALLLPLALLLHAARPEVQLVESGGGLVQPGGSLRLSCAASGFSFSDFWMSWVRQAPGKGLEWVATISQAGSEKDYVDSVKGRFTISRDNAKKSLYLQMNSLRAEDTAVYYCASGVYSFDYRGQGTLVTVSSGTGGGGSGGGGSGGGGSEFDIQMTQSPSSLSASVGDRVTITCRSSQSIVHSVGNTFLEWYQQKPGKAPKLLIYKVSNRFSGVPSRFSGSGSGTDFTLTISSLQPEDFATYYCFQGSQFPYTFGQGTKVEIKRLEIQNPDPAVYQLRDSKSSDKSVCLFTDFDSQTNVSQSKDSDVYITDKCVLDMRSMDFKSNSAVAWSNKSDFACANAFNNSIIPEDTFFPSPESSDSTDHVKPKETENTKQPSKSCHKPKAIVHTEKVNMMSLTVLGLRMLFAKTVAVNFLLTAKLFFLRAKRSGSGVKQTLNFDLLKLAGDVESNPGPTSMDWIWRILFLVGAATGAHSGPQLQLQESGPGLVKPSETLSLTCTVSGDSISSGDYYWGWIRQPPGKGLEWIGHIYYSGVTYYNPSLKSRVTISVDTSRNQFSLKLSSVTAADTAVYYCTREDSSNWRSRGQGTLVTVSSGSGGGGSGGGGSGGGGSFEEVQLVESGGGLVQPGGSLRLSCAASGYEFSRSWMNWVRQAPGKGLEWVGRIYPGDGDTNYSGKFKGRFTISADTSKNTAYLQMNSLRAEDTAVYYCARDGSSWDWYFDVWGQGTLVTVSSTREDLKNVFPPEVAVFEPSEAEISHTQKATLVCLATGFYPDHVELSWWVNGKEVHSGVCTDPQPLKEQPALNDSRYCLSSRLRVSATFWQNPRNHFRCQVQFYGLSENDEWTQDRAKPVTQIVSAEAWGRADDVIKIHWQEKKSNTILGSQEGNTMKTNDTYMKFSWLTVPEKSLDKEHRCIVRHENNKNGVDQEIIFPPIKTDVITMDPKDNCSKDANDTLLLQLTNTSAYYMYLLLLLKSVVYFAIITCCLLRRTAFCCNGEKS

SEQ ID NO: 16262 - protein, 1002 aa, synthetic construct
MALPVTALLLPLALLLHAARPEVQLVESGGGLVQPGGSLRLSCAASGFSFSDFWMSWVRQAPGKGLEWVATISQAGSEKDYVDSVKGRFTISRDNAKKSLYLQMNSLRAEDTAVYYCASGVYSFDYRGQGTLVTVSSGTGGGGSGGGGSGGGGSEFDIQMTQSPSSLSASVGDRVTITCRASQTIWSYLNWYQQRPGKAPNLLIYAASSLQSGVPSRFSGRGSGTDFTLTISSLQAEDFATYYCQQSYSIPQIFGQGTKLEIKLEIQNPDPAVYQLRDSKSSDKSVCLFTDFDSQTNVSQSKDSDVYITDKCVLDMRSMDFKSNSAVAWSNKSDFACANAFNNSIIPEDTFFPSPESSDSTDHVKPKETENTKQPSKSCHKPKAIVHTEKVNMMSLTVLGLRMLFAKTVAVNFLLTAKLFFLRAKRSGSGVKQTLNFDLLKLAGDVESNPGPTSMDWIWRILFLVGAATGAHSGPQLQLQESGPGLVKPSETLSLTCTVSGDSISSGDYYWGWIRQPPGKGLEWIGHIYYSGVTYYNPSLKSRVTISVDTSRNQFSLKLSSVTAADTAVYYCTREDSSNWRSRGQGTLVTVSSGSGGGGSGGGGSGGGGSFEQVQLQQSGPGLVKPSQTLSLTCAISGDSVSSNSAAWNWIRQSPSRGLEWLGRTYYRSKWYNDYAVSVKSRITINPDTSKNQFSLQLNSVTPEDTAVYYCAREVTGDLEDAFDIWGQGTMVTVSSTREDLKNVFPPEVAVFEPSEAEISHTQKATLVCLATGFYPDHVELSWWVNGKEVHSGVCTDPQPLKEQPALNDSRYCLSSRLRVSATFWQNPRNHFRCQVQFYGLSENDEWTQDRAKPVTQIVSAEAWGRADDVIKIHWQEKKSNTILGSQEGNTMKTNDTYMKFSWLTVPEKSLDKEHRCIVRHENNKNGVDQEIIFPPIKTDVITMDPKDNCSKDANDTLLLQLTNTSAYYMYLLLLLKSVVYFAIITCCLLRRTAFCCNGEKS

SEQ ID NO: 16263 - protein, 995 aa, synthetic construct
MALPVTALLLPLALLLHAARPEVQLVESGGGLVQPGGSLRLSCAASGFSFSDFWMSWVRQAPGKGLEWVATISQAGSEKDYVDSVKGRFTISRDNAKKSLYLQMNSLRAEDTAVYYCASGVYSFDYRGQGTLVTVSSGTGGGGSGGGGSGGGGSEFDIQMTQSPATIENTSLSASVGDRVTITCRASQGISSWLTWYQQKPEKAPKSLIYAASSLQSGVPSRFSGSGSGTDFTLTISSLQPEDFATYYCQQYDSYPITFGQGTRLEIKLEIQNPDPAVYQLRDSKSSDKSVCLFTDFDSQTNVSQSKDSDVYITDKCVLDMRSMDFKSNSAVAWSNKSDFACANAFNNSIIPEDTFFPSPESSDSTDHVKPKETENTKQPSKSCHKPKAIVHTEKVNMMSLTVLGLRMLFAKTVAVNFLLTAKLFFLRAKRSGSGVKQTLNFDLLKLAGDVESNPGPTSMDWIWRILFLVGAATGAHSGPQLQLQESGPGLVKPSETLSLTCTVSGDSISSGDYYWGWIRQPPGKGLEWIGHIYYSGVTYYNPSLKSRVTISVDTSRNQFSLKLSSVTAADTAVYYCTREDSSNWRSRGQGTLVTVSSGSGGGGSGGGGSGGGGSFEQVQLQQWGAGLLKPSETLSLTCAVYGGSFSAYYWSWIRQPPGKGLEWIGDINHGGGTNYNPSLKSRVTISVDTSKNQFSLKLNSVTAADTAVYYCASLTAYWGQGSLVTVSSTREDLKNVFPPEVAVFEPSEAEISHTQKATLVCLATGFYPDHVELSWWVNGKEVHSGVCTDPQPLKEQPALNDSRYCLSSRLRVSATFWQNPRNHFRCQVQFYGLSENDEWTQDRAKPVTQIVSAEAWGRADDVIKIHWQEKKSNTILGSQEGNTMKTNDTYMKFSWLTVPEKSLDKEHRCIVRHENNKNGVDQEIIFPPIKTDVITMDPKDNCSKDANDTLLLQLTNTSAYYMYLLLLLKSVVYFAIITCCLLRRTAFCCNGEKS

SEQ ID NO: 16264 - protein, 1000 aa, synthetic construct
MALPVTALLLPLALLLHAARPEVQLVESGGGLVQPGGSLRLSCAASGFSFSDFWMSWVRQAPGKGLEWVATISQAGSEKDYVDSVKGRFTISRDNAKKSLYLQMNSLRAEDTAVYYCASGVYSFDYRGQGTLVTVSSGTGGGGSGGGGSGGGGSEFDEIVLTQSPDSLAVSLGERATINCKASQSVDFDGDSYLNWYQQKPGQPPKVLIYAASTLQSGVPSRFSGSGSGTDFTLTINSLEAEDAATYYCQQSNEDPWTFGGGTKVEIKLEIQNPDPAVYQLRDSKSSDKSVCLFTDFDSQTNVSQSKDSDVYITDKCVLDMRSMDFKSNSAVAWSNKSDFACANAFNNSIIPEDTFFPSPESSDSTDHVKPKETENTKQPSKSCHKPKAIVHTEKVNMMSLTVLGLRMLFAKTVAVNFLLTAKLFFLRAKRSGSGVKQTLNFDLLKLAGDVESNPGPTSMDWIWRILFLVGAATGAHSGPQLQLQESGPGLVKPSETLSLTCTVSGDSISSGDYYWGWIRQPPGKGLEWIGHIYYSGVTYYNPSLKSRVTISVDTSRNQFSLKLSSVTAADTAVYYCTREDSSNWRSRGQGTLVTVSSGSGGGGSGGGGSGGGGSFEQVQLVQSGAEVKKPGASVKVSCKVSGYTFTDYYITWVRQAPGQALEWMGWIYPGSGNTKYSQKFQGRFVFSVDTSASTAYLQLSSLKAEDTAVYYCANYGNYWFAYWGQGTLVTVSSTREDLKNVFPPEVAVFEPSEAEISHTQKATLVCLATGFYPDHVELSWWVNGKEVHSGVCTDPQPLKEQPALNDSRYCLSSRLRVSATFWQNPRNHFRCQVQFYGLSENDEWTQDRAKPVTQIVSAEAWGRADDVIKIHWQEKKSNTILGSQEGNTMKTNDTYMKFSWLTVPEKSLDKEHRCIVRHENNKNGVDQEIIFPPIKTDVITMDPKDNCSKDANDTLLLQLTNTSAYYMYLLLLLKSVVYFAIITCCLLRRTAFCCNGEKS

SEQ ID NO: 16265 - protein, 997 aa, synthetic construct
MALPVTALLLPLALLLHAARPEVQLVESGGGLVQPGGSLRLSCAASGFSFSDFWMSWVRQAPGKGLEWVATISQAGSEKDYVDSVKGRFTISRDNAKKSLYLQMNSLRAEDTAVYYCASGVYSFDYRGQGTLVTVSSGTGGGGSGGGGSGGGGSEFDIQMTQSPSSLSASVGDRVTITCRASQGISSWLAWYQQKPEKAPKSLIYAASSLQSGVPSRFSGSGSGTDFTLTISSLQPEDFATYYCQQYNSYPPTFGGGTKVEIKLEIQNPDPAVYQLRDSKSSDKSVCLFTDFDSQTNVSQSKDSDVYITDKCVLDMRSMDFKSNSAVAWSNKSDFACANAFNNSIIPEDTFFPSPESSDSTDHVKPKETENTKQPSKSCHKPKAIVHTEKVNMMSLTVLGLRMLFAKTVAVNFLLTAKLFFLRAKRSGSGVKQTLNFDLLKLAGDVESNPGPTSMDWIWRILFLVGAATGAHSGPQLQLQESGPGLVKPSETLSLTCTVSGDSISSGDYYWGWIRQPPGKGLEWIGHIYYSGVTYYNPSLKSRVTISVDTSRNQFSLKLSSVTAADTAVYYCTREDSSNWRSRGQGTLVTVSSGSGGGGSGGGGSGGGGSFEEVQLVQSGGGLVHPGGSLRLSCAGSGFAFSSSTMHWIRQAPGKGLEWISLIGSGGGIYYGDSVKGRFTISRDNAKNSLYLQMNSLRAEDMAVYYCVRGYFDWVDYFDYWGQGTLVTVSSTREDLKNVFPPEVAVFEPSEAEISHTQKATLVCLATGFYPDHVELSWWVNGKEVHSGVCTDPQPLKEQPALNDSRYCLSSRLRVSATFWQNPRNHFRCQVQFYGLSENDEWTQDRAKPVTQIVSAEAWGRADDVIKIHWQEKKSNTILGSQEGNTMKTNDTYMKFSWLTVPEKSLDKEHRCIVRHENNKNGVDQEIIFPPIKTDVITMDPKDNCSKDANDTLLLQLTNTSAYYMYLLLLLKSVVYFAIITCCLLRRTAFCCNGEKS

SEQ ID NO: 16266 - protein, 1007 aa, synthetic construct
MALPVTALLLPLALLLHAARPEVQLVESGGGLVQPGGSLRLSCAASGFSFSDFWMSWVRQAPGKGLEWVATISQAGSEKDYVDSVKGRFTISRDNAKKSLYLQMNSLRAEDTAVYYCASGVYSFDYRGQGTLVTVSSGTGGGGSGGGGSGGGGSEFDDIVMTQSPDSLTVSLGERTTINCKSSQSVLDSSKNKNSLAWYQQKPGQPPKLLLSWASTRESGIPDRFSGSGSGTDFTLTIDSLQPEDSATYYCQQSAHFPITFGQGTRLEIKLEIQNPDPAVYQLRDSKSSDKSVCLFTDFDSQTNVSQSKDSDVYITDKCVLDMRSMDFKSNSAVAWSNKSDFACANAFNNSIIPEDTFFPSPESSDSTDHVKPKETENTKQPSKSCHKPKAIVHTEKVNMMSLTVLGLRMLFAKTVAVNFLLTAKLFFLRAKRSGSGVKQTLNFDLLKLAGDVESNPGPTSMDWIWRILFLVGAATGAHSGPQLQLQESGPGLVKPSETLSLTCTVSGDSISSGDYYWGWIRQPPGKGLEWIGHIYYSGVTYYNPSLKSRVTISVDTSRNQFSLKLSSVTAADTAVYYCTREDSSNWRSRGQGTLVTVSSGSGGGGSGGGGSGGGGSFEQVQLVQSGAEVKKPGASVKVSCKASGYTFTNYGMNWVKQAPGQGLKWMGWINTYTGEPTYADDFKGRVTMTSDTSTSTAYLELHNLRSDDTAVYYCARWSWSDGYYVYFDYWGQGTTVTVSSTREDLKNVFPPEVAVFEPSEAEISHTQKATLVCLATGFYPDHVELSWWVNGKEVHSGVCTDPQPLKEQPALNDSRYCLSSRLRVSATFWQNPRNHFRCQVQFYGLSENDEWTQDRAKPVTQIVSAEAWGRADDVIKIHWQEKKSNTILGSQEGNTMKTNDTYMKFSWLTVPEKSLDKEHRCIVRHENNKNGVDQEIIFPPIKTDVITMDPKDNCSKDANDTLLLQLTNTSAYYMYLLLLLKSVVYFAIITCCLLRRTAFCCNGEKS

SEQ ID NO: 16267 - protein, 1003 aa, synthetic construct
MALPVTALLLPLALLLHAARPEVQLVESGGGLVQPGGSLRLSCAASGFSFSDFWMSWVRQAPGKGLEWVATISQAGSEKDYVDSVKGRFTISRDNAKKSLYLQMNSLRAEDTAVYYCASGVYSFDYRGQGTLVTVSSGTGGGGSGGGGSGGGGSEFDEIVLTQSPGSLAVSPGERVTMSCKSSQSVFFSSSQKNYLAWYQQIPGQSPRLLIYWASTRESGVPDRFTGSGSGTDFTLTISSVQPEDLAIYYCHQYLSSRTFGQGTKLEIKRLEIQNPDPAVYQLRDSKSSDKSVCLFTDFDSQTNVSQSKDSDVYITDKCVLDMRSMDFKSNSAVAWSNKSDFACANAFNNSIIPEDTFFPSPESSDSTDHVKPKETENTKQPSKSCHKPKAIVHTEKVNMMSLTVLGLRMLFAKTVAVNFLLTAKLFFLRAKRSGSGVKQTLNFDLLKLAGDVESNPGPTSMDWIWRILFLVGAATGAHSGPQLQLQESGPGLVKPSETLSLTCTVSGDSISSGDYYWGWIRQPPGKGLEWIGHIYYSGVTYYNPSLKSRVTISVDTSRNQFSLKLSSVTAADTAVYYCTREDSSNWRSRGQGTLVTVSSGSGGGGSGGGGSGGGGSFEQVQLQQPGAEVVKPGASVKMSCKASGYTFTSYYIHWIKQTPGQGLEWVGVIYPGNDDISYNQKFQGKATLTADKSSTTAYMQLSSLTSEDSAVYYCAREVRLRYFDVWGQGTTVTVSSTREDLKNVFPPEVAVFEPSEAEISHTQKATLVCLATGFYPDHVELSWWVNGKEVHSGVCTDPQPLKEQPALNDSRYCLSSRLRVSATFWQNPRNHFRCQVQFYGLSENDEWTQDRAKPVTQIVSAEAWGRADDVIKIHWQEKKSNTILGSQEGNTMKTNDTYMKFSWLTVPEKSLDKEHRCIVRHENNKNGVDQEIIFPPIKTDVITMDPKDNCSKDANDTLLLQLTNTSAYYMYLLLLLKSVVYFAIITCCLLRRTAFCCNGEKS

SEQ ID NO: 16268 - protein, 1007 aa, synthetic construct
MALPVTALLLPLALLLHAARPEVQLVESGGGLVQPGGSLRLSCAASGFSFSDFWMSWVRQAPGKGLEWVATISQAGSEKDYVDSVKGRFTISRDNAKKSLYLQMNSLRAEDTAVYYCASGVYSFDYRGQGTLVTVSSGTGGGGSGGGGSGGGGSEFDVLLTQSPLSLPVTLGQPASISCRSSQTIVHSNGNTYLEWFQQRPGQSPRLLIYQVSNRFSGVPDRFSGSGSGTDFTLKISRVEAEDVGVYYCFQGSHVPRTFGGGTKVEIKRALEIQNPDPAVYQLRDSKSSDKSVCLFTDFDSQTNVSQSKDSDVYITDKCVLDMRSMDFKSNSAVAWSNKSDFACANAFNNSIIPEDTFFPSPESSDSTDHVKPKETENTKQPSKSCHKPKAIVHTEKVNMMSLTVLGLRMLFAKTVAVNFLLTAKLFFLRAKRSGSGVKQTLNFDLLKLAGDVESNPGPTSMDWIWRILFLVGAATGAHSGPQLQLQESGPGLVKPSETLSLTCTVSGDSISSGDYYWGWIRQPPGKGLEWIGHIYYSGVTYYNPSLKSRVTISVDTSRNQFSLKLSSVTAADTAVYYCTREDSSNWRSRGQGTLVTVSSGSGGGGSGGGGSGGGGSFEQIQLVQSGSELKKPGASVKVSCKASGYTFTNYGMNWVRQAPGQGLKWMGWINTNTGEPKYAEEFKGRFALSLDTSVSTAYLQINSLKAEDTAVYFCARGYGNYARGAWLAYWGQGTLVTVSSTREDLKNVFPPEVAVFEPSEAEISHTQKATLVCLATGFYPDHVELSWWVNGKEVHSGVCTDPQPLKEQPALNDSRYCLSSRLRVSATFWQNPRNHFRCQVQFYGLSENDEWTQDRAKPVTQIVSAEAWGRADDVIKIHWQEKKSNTILGSQEGNTMKTNDTYMKFSWLTVPEKSLDKEHRCIVRHENNKNGVDQEIIFPPIKTDVITMDPKDNCSKDANDTLLLQLTNTSAYYMYLLLLLKSVVYFAIITCCLLRRTAFCCNGEKS

SEQ ID NO: 16269 - protein, 992 aa, synthetic construct
MALPVTALLLPLALLLHAARPEVQLVESGGGLVQPGGSLRLSCAASGFSFSDFWMSWVRQAPGKGLEWVATISQAGSEKDYVDSVKGRFTISRDNAKKSLYLQMNSLRAEDTAVYYCASGVYSFDYRGQGTLVTVSSGTGGGGSGGGGSGGGGSEFDEIVLTQSPATLSLSPGERATLSCSASSSINYIYWLQQKPGQAPRILIYLTSNLASGVPARFSGSGSGTDFTLTISSLEPEDFAVYYCLQWSSNPLTFGGGTKVEIKLEIQNPDPAVYQLRDSKSSDKSVCLFTDFDSQTNVSQSKDSDVYITDKCVLDMRSMDFKSNSAVAWSNKSDFACANAFNNSIIPEDTFFPSPESSDSTDHVKPKETENTKQPSKSCHKPKAIVHTEKVNMMSLTVLGLRMLFAKTVAVNFLLTAKLFFLRAKRSGSGVKQTLNFDLLKLAGDVESNPGPTSMDWIWRILFLVGAATGAHSGPQLQLQESGPGLVKPSETLSLTCTVSGDSISSGDYYWGWIRQPPGKGLEWIGHIYYSGVTYYNPSLKSRVTISVDTSRNQFSLKLSSVTAADTAVYYCTREDSSNWRSRGQGTLVTVSSGSGGGGSGGGGSGGGGSFEEVQLVESGGGLVKPGGSLRLSCAASGFTFSSYDMSWVRQAPGKGLEWVSTISSGGSYTYYLDSIKGRFTISRDNAKNSLYLQMNSLRAEDTAVYYCARQGLDYWGRGTLVTVSSTREDLKNVFPPEVAVFEPSEAEISHTQKATLVCLATGFYPDHVELSWWVNGKEVHSGVCTDPQPLKEQPALNDSRYCLSSRLRVSATFWQNPRNHFRCQVQFYGLSENDEWTQDRAKPVTQIVSAEAWGRADDVIKIHWQEKKSNTILGSQEGNTMKTNDTYMKFSWLTVPEKSLDKEHRCIVRHENNKNGVDQEIIFPPIKTDVITMDPKDNCSKDANDTLLLQLTNTSAYYMYLLLLLKSVVYFAIITCCLLRRTAFCCNGEKS

SEQ ID NO: 16270 - protein, 1001 aa, synthetic construct
MALPVTALLLPLALLLHAARPEVQLVESGGGLVQPGGSLRLSCAASGFSFSDFWMSWVRQAPGKGLEWVATISQAGSEKDYVDSVKGRFTISRDNAKKSLYLQMNSLRAEDTAVYYCASGVYSFDYRGQGTLVTVSSGTGGGGSGGGGSGGGGSEFDIVMTQSPDSLAVSLGERATINCRASKSVSTSGYSFMHWYQQKPGQPPKLLIYLASNLESGVPDRFSGSGSGTDFTLTISSLQAEDVAVYYCQHSREVPWTFGQGTKVEIKRLEIQNPDPAVYQLRDSKSSDKSVCLFTDFDSQTNVSQSKDSDVYITDKCVLDMRSMDFKSNSAVAWSNKSDFACANAFNNSIIPEDTFFPSPESSDSTDHVKPKETENTKQPSKSCHKPKAIVHTEKVNMMSLTVLGLRMLFAKTVAVNFLLTAKLFFLRAKRSGSGVKQTLNFDLLKLAGDVESNPGPTSMDWIWRILFLVGAATGAHSGPQLQLQESGPGLVKPSETLSLTCTVSGDSISSGDYYWGWIRQPPGKGLEWIGHIYYSGVTYYNPSLKSRVTISVDTSRNQFSLKLSSVTAADTAVYYCTREDSSNWRSRGQGTLVTVSSGSGGGGSGGGGSGGGGSFEQVQLVQSGAEVKKPGASVKVSCKASGYTFTNYGMNWVRQAPGQGLEWMGWINTYTGEPTYADAFKGRFAFSLDTSTSTAYLQINSLRSDDTAVYYCARDYGDYGMDYWGQGTTVTVSSTREDLKNVFPPEVAVFEPSEAEISHTQKATLVCLATGFYPDHVELSWWVNGKEVHSGVCTDPQPLKEQPALNDSRYCLSSRLRVSATFWQNPRNHFRCQVQFYGLSENDEWTQDRAKPVTQIVSAEAWGRADDVIKIHWQEKKSNTILGSQEGNTMKTNDTYMKFSWLTVPEKSLDKEHRCIVRHENNKNGVDQEIIFPPIKTDVITMDPKDNCSKDANDTLLLQLTNTSAYYMYLLLLLKSVVYFAIITCCLLRRTAFCCNGEKS

SEQ ID NO: 16271 - protein, 997 aa, synthetic construct
MALPVTALLLPLALLLHAARPEVQLVESGGGLVQPGGSLRLSCAASGFSFSDFWMSWVRQAPGKGLEWVATISQAGSEKDYVDSVKGRFTISRDNAKKSLYLQMNSLRAEDTAVYYCASGVYSFDYRGQGTLVTVSSGTGGGGSGGGGSGGGGSEFDIVMTQTPLTLSVTIGQPASISCKSSQSLLDSDGKTYLNWLLQRPGQSPERLIYLVSKLDSGVPDRFTGSGSGTDFTLKISRVEAEDLGVYCCWQGTHFPYTFGGGTKVEIKGLEIQNPDPAVYQLRDSKSSDKSVCLFTDFDSQTNVSQSKDSDVYITDKCVLDMRSMDFKSNSAVAWSNKSDFACANAFNNSIIPEDTFFPSPESSDSTDHVKPKETENTKQPSKSCHKPKAIVHTEKVNMMSLTVLGLRMLFAKTVAVNFLLTAKLFFLRAKRSGSGVKQTLNFDLLKLAGDVESNPGPTSMDWIWRILFLVGAATGAHSGPQLQLQESGPGLVKPSETLSLTCTVSGDSISSGDYYWGWIRQPPGKGLEWIGHIYYSGVTYYNPSLKSRVTISVDTSRNQFSLKLSSVTAADTAVYYCTREDSSNWRSRGQGTLVTVSSGSGGGGSGGGGSGGGGSFEQVQLQQPGAELVRPGASVKLSCKASGYTFTSYWMNWVKQRPGQGLEWIGMIDPSDSETHYNHIFKDKATLTVDKSSSTAYLQLSSLTSEDSAVYYCARNLYLWGQGTSVTVSSTREDLKNVFPPEVAVFEPSEAEISHTQKATLVCLATGFYPDHVELSWWVNGKEVHSGVCTDPQPLKEQPALNDSRYCLSSRLRVSATFWQNPRNHFRCQVQFYGLSENDEWTQDRAKPVTQIVSAEAWGRADDVIKIHWQEKKSNTILGSQEGNTMKTNDTYMKFSWLTVPEKSLDKEHRCIVRHENNKNGVDQEIIFPPIKTDVITMDPKDNCSKDANDTLLLQLTNTSAYYMYLLLLLKSVVYFAIITCCLLRRTAFCCNGEKS

SEQ ID NO: 16272 - protein, 1005 aa, synthetic construct
MALPVTALLLPLALLLHAARPEVQLVESGGGLVQPGGSLRLSCAASGFSFSDFWMSWVRQAPGKGLEWVATISQAGSEKDYVDSVKGRFTISRDNAKKSLYLQMNSLRAEDTAVYYCASGVYSFDYRGQGTLVTVSSGTGGGGSGGGGSGGGGSEFDIVMTQSPDSLAVSLGERATINCESSQSLLNSGNQKNYLTWYQQKPGQPPKPLIYWASTRESGVPDRFSGSGSGTDFTLTISSLQAEDVAVYYCQNDYSYPYTFGQGTKLEIKRLEIQNPDPAVYQLRDSKSSDKSVCLFTDFDSQTNVSQSKDSDVYITDKCVLDMRSMDFKSNSAVAWSNKSDFACANAFNNSIIPEDTFFPSPESSDSTDHVKPKETENTKQPSKSCHKPKAIVHTEKVNMMSLTVLGLRMLFAKTVAVNFLLTAKLFFLRAKRSGSGVKQTLNFDLLKLAGDVESNPGPTSMDWIWRILFLVGAATGAHSGPQLQLQESGPGLVKPSETLSLTCTVSGDSISSGDYYWGWIRQPPGKGLEWIGHIYYSGVTYYNPSLKSRVTISVDTSRNQFSLKLSSVTAADTAVYYCTREDSSNWRSRGQGTLVTVSSGSGGGGSGGGGSGGGGSFEEVQLVQSGAEVKKPGESLKISCKGSGYSFTDYYMKWARQMPGKGLEWMGDIIPSNGATFYNQKFKGQVTISADKSISTTYLQWSSLKASDTAMYYCARSHLLRASWFAYWGQGTMVTVSSTREDLKNVFPPEVAVFEPSEAEISHTQKATLVCLATGFYPDHVELSWWVNGKEVHSGVCTDPQPLKEQPALNDSRYCLSSRLRVSATFWQNPRNHFRCQVQFYGLSENDEWTQDRAKPVTQIVSAEAWGRADDVIKIHWQEKKSNTILGSQEGNTMKTNDTYMKFSWLTVPEKSLDKEHRCIVRHENNKNGVDQEIIFPPIKTDVITMDPKDNCSKDANDTLLLQLTNTSAYYMYLLLLLKSVVYFAIITCCLLRRTAFCCNGEKS

SEQ ID NO: 16273 - protein, 1000 aa, synthetic construct
MALPVTALLLPLALLLHAARPEVQLVESGGGLVQPGGSLRLSCAASGFSFSDFWMSWVRQAPGKGLEWVATISQAGSEKDYVDSVKGRFTISRDNAKKSLYLQMNSLRAEDTAVYYCASGVYSFDYRGQGTLVTVSSGTGGGGSGGGGSGGGGSEFDIQMTQSTSSLSASLGDRVTISCSASQGINNYLNWYQQKPDGTVELLIYYTSTLQSGVPSRFSGSGSGTDYSLTISNLEPEDIGTYYCQQYSKLPRTFGGGTKLEIKLEIQNPDPAVYQLRDSKSSDKSVCLFTDFDSQTNVSQSKDSDVYITDKCVLDMRSMDFKSNSAVAWSNKSDFACANAFNNSIIPEDTFFPSPESSDSTDHVKPKETENTKQPSKSCHKPKAIVHTEKVNMMSLTVLGLRMLFAKTVAVNFLLTAKLFFLRAKRSGSGVKQTLNFDLLKLAGDVESNPGPTSMDWIWRILFLVGAATGAHSGPQLQLQESGPGLVKPSETLSLTCTVSGDSISSGDYYWGWIRQPPGKGLEWIGHIYYSGVTYYNPSLKSRVTISVDTSRNQFSLKLSSVTAADTAVYYCTREDSSNWRSRGQGTLVTVSSGSGGGGSGGGGSGGGGSFEQVQLQQSGSELMMPGASVKISCKATGYTFSNYWIEWVKQRPGHGLEWIGEILPGTGRTIYNEKFKGKATFTADISSNTVQMQLSSLTSEDSAVYYCARRDYYGNFYYAMDYWGQGTSVTVSSTREDLKNVFPPEVAVFEPSEAEISHTQKATLVCLATGFYPDHVELSWWVNGKEVHSGVCTDPQPLKEQPALNDSRYCLSSRLRVSATFWQNPRNHFRCQVQFYGLSENDEWTQDRAKPVTQIVSAEAWGRADDVIKIHWQEKKSNTILGSQEGNTMKTNDTYMKFSWLTVPEKSLDKEHRCIVRHENNKNGVDQEIIFPPIKTDVITMDPKDNCSKDANDTLLLQLTNTSAYYMYLLLLLKSVVYFAIITCCLLRRTAFCCNGEKS

SEQ ID NO: 16274 - protein, 995 aa, synthetic construct
MALPVTALLLPLALLLHAARPEVQLVESGGGLVQPGGSLRLSCAASGFSFSDFWMSWVRQAPGKGLEWVATISQAGSEKDYVDSVKGRFTISRDNAKKSLYLQMNSLRAEDTAVYYCASGVYSFDYRGQGTLVTVSSGTGGGGSGGGGSGGGGSEFDIQMTQSPASLSVSVGETVTITCRASENIYSNLAWYQQKQGKSPQLLVYAATNLADGVPSRFSGSGSGTQYSLKINSLQSEDFGSYYCQHFWGTWTFGGGTTLEIKLEIQNPDPAVYQLRDSKSSDKSVCLFTDFDSQTNVSQSKDSDVYITDKCVLDMRSMDFKSNSAVAWSNKSDFACANAFNNSIIPEDTFFPSPESSDSTDHVKPKETENTKQPSKSCHKPKAIVHTEKVNMMSLTVLGLRMLFAKTVAVNFLLTAKLFFLRAKRSGSGVKQTLNFDLLKLAGDVESNPGPTSMDWIWRILFLVGAATGAHSGPQLQLQESGPGLVKPSETLSLTCTVSGDSISSGDYYWGWIRQPPGKGLEWIGHIYYSGVTYYNPSLKSRVTISVDTSRNQFSLKLSSVTAADTAVYYCTREDSSNWRSRGQGTLVTVSSGSGGGGSGGGGSGGGGSFEEVQLQQSGPELVKPGASVKMSCKASGYTFTDYYMKWMKQSHGKSLEWIGDINPNNGGTTYNQKFKGKATLTVDKSSSTAYMQLNSLTSEDSAVYYCARDYGYGYFDYWGQGTTLTVSSTREDLKNVFPPEVAVFEPSEAEISHTQKATLVCLATGFYPDHVELSWWVNGKEVHSGVCTDPQPLKEQPALNDSRYCLSSRLRVSATFWQNPRNHFRCQVQFYGLSENDEWTQDRAKPVTQIVSAEAWGRADDVIKIHWQEKKSNTILGSQEGNTMKTNDTYMKFSWLTVPEKSLDKEHRCIVRHENNKNGVDQEIIFPPIKTDVITMDPKDNCSKDANDTLLLQLTNTSAYYMYLLLLLKSVVYFAIITCCLLRRTAFCCNGEKS

SEQ ID NO: 16275 - protein, 998 aa, synthetic construct
MALPVTALLLPLALLLHAARPEVQLVESGGGLVQPGGSLRLSCAASGFSFSDFWMSWVRQAPGKGLEWVATISQAGSEKDYVDSVKGRFTISRDNAKKSLYLQMNSLRAEDTAVYYCASGVYSFDYRGQGTLVTVSSGTGGGGSGGGGSGGGGSEFEIVLTQSPGTLSLSPGERATLSCRASQSVGGYLAWYQQKPGQAPRLLIYDASNRATGIPARFSGSGSGTDFTLTISSLEPEDFAVYYCQQRNNWPPMYTFGQGTKLEIKRLEIQNPDPAVYQLRDSKSSDKSVCLFTDFDSQTNVSQSKDSDVYITDKCVLDMRSMDFKSNSAVAWSNKSDFACANAFNNSIIPEDTFFPSPESSDSTDHVKPKETENTKQPSKSCHKPKAIVHTEKVNMMSLTVLGLRMLFAKTVAVNFLLTAKLFFLRAKRSGSGVKQTLNFDLLKLAGDVESNPGPTSMDWIWRILFLVGAATGAHSGPQLQLQESGPGLVKPSETLSLTCTVSGDSISSGDYYWGWIRQPPGKGLEWIGHIYYSGVTYYNPSLKSRVTISVDTSRNQFSLKLSSVTAADTAVYYCTREDSSNWRSRGQGTLVTVSSGSGGGGSGGGGSGGGGSFEQVQLVQSGAEVKKPGSSVKVSCKASGGTFSSYAISWVRQAPGQGLEWMGGIIPILGTANYAQKFQGRVTITADESTSTAYMELSSLRSEDTAVYYCARWGGGAFDIWGQGTMVTVSSTREDLKNVFPPEVAVFEPSEAEISHTQKATLVCLATGFYPDHVELSWWVNGKEVHSGVCTDPQPLKEQPALNDSRYCLSSRLRVSATFWQNPRNHFRCQVQFYGLSENDEWTQDRAKPVTQIVSAEAWGRADDVIKIHWQEKKSNTILGSQEGNTMKTNDTYMKFSWLTVPEKSLDKEHRCIVRHENNKNGVDQEIIFPPIKTDVITMDPKDNCSKDANDTLLLQLTNTSAYYMYLLLLLKSVVYFAIITCCLLRRTAFCCNGEKS

SEQ ID NO: 16276 - protein, 993 aa, synthetic construct
MALPVTALLLPLALLLHAARPEVQLVESGGGLVQPGGSLRLSCAASGFSFSDFWMSWVRQAPGKGLEWVATISQAGSEKDYVDSVKGRFTISRDNAKKSLYLQMNSLRAEDTAVYYCASGVYSFDYRGQGTLVTVSSGTGGGGSGGGGSGGGGSEFQIVLTQSPALMSASPGEKVTMTCSASSSVRYMYWYQQKPRSSPKPWIHLTSNLASGVPARFSGSGSGTSYSLTISSMEAEDAATYYCQQWSSHPFTFGSGTKLEIKLEIQNPDPAVYQLRDSKSSDKSVCLFTDFDSQTNVSQSKDSDVYITDKCVLDMRSMDFKSNSAVAWSNKSDFACANAFNNSIIPEDTFFPSPESSDSTDHVKPKETENTKQPSKSCHKPKAIVHTEKVNMMSLTVLGLRMLFAKTVAVNFLLTAKLFFLRAKRSGSGVKQTLNFDLLKLAGDVESNPGPTSMDWIWRILFLVGAATGAHSGPQLQLQESGPGLVKPSETLSLTCTVSGDSISSGDYYWGWIRQPPGKGLEWIGHIYYSGVTYYNPSLKSRVTISVDTSRNQFSLKLSSVTAADTAVYYCTREDSSNWRSRGQGTLVTVSSGSGGGGSGGGGSGGGGSFEDVQLQESGPGLVKPSQSLSLTCTVTGFSITSDYSWNWIRQFPGNKLEWMGYISYSGHTSYNPSLESRISITRDTSKNQFFLQLNSVTTEDTATYYCTRGNWDVVYWGQGTLVTVSATREDLKNVFPPEVAVFEPSEAEISHTQKATLVCLATGFYPDHVELSWWVNGKEVHSGVCTDPQPLKEQPALNDSRYCLSSRLRVSATFWQNPRNHFRCQVQFYGLSENDEWTQDRAKPVTQIVSAEAWGRADDVIKIHWQEKKSNTILGSQEGNTMKTNDTYMKFSWLTVPEKSLDKEHRCIVRHENNKNGVDQEIIFPPIKTDVITMDPKDNCSKDANDTLLLQLTNTSAYYMYLLLLLKSVVYFAIITCCLLRRTAFCCNGEKS

SEQ ID NO: 16277 - protein, 1003 aa, synthetic construct
MALPVTALLLPLALLLHAARPEVQLVESGGGLVQPGGSLRLSCAASGFSFSDFWMSWVRQAPGKGLEWVATISQAGSEKDYVDSVKGRFTISRDNAKKSLYLQMNSLRAEDTAVYYCASGVYSFDYRGQGTLVTVSSGTGGGGSGGGGSGGGGSEFDVVMTQSPLSLPVTLGQPASISCRSSQSIVHSDGNTYLEWYQQRPGQSPRRLIYKVSNRFSGVPDRFSGSGSGTDFTLKISRVEAEDVGVYYCFQGSHAPWTFGGGTKVEIKLEIQNPDPAVYQLRDSKSSDKSVCLFTDFDSQTNVSQSKDSDVYITDKCVLDMRSMDFKSNSAVAWSNKSDFACANAFNNSIIPEDTFFPSPESSDSTDHVKPKETENTKQPSKSCHKPKAIVHTEKVNMMSLTVLGLRMLFAKTVAVNFLLTAKLFFLRAKRSGSGVKQTLNFDLLKLAGDVESNPGPTSMDWIWRILFLVGAATGAHSGPQLQLQESGPGLVKPSETLSLTCTVSGDSISSGDYYWGWIRQPPGKGLEWIGHIYYSGVTYYNPSLKSRVTISVDTSRNQFSLKLSSVTAADTAVYYCTREDSSNWRSRGQGTLVTVSSGSGGGGSGGGGSGGGGSFEEVQLVESGGGLVQPGGSLRLSCAASGFTFSSYGMHWVRQAPGKGLEWVAYITTRSSTIYYADSVKGRFTISRDNAKNSLYLQMNSLRAEDTAVYYCTREPLTGYYAMDYWGQGTSVTVSSTREDLKNVFPPEVAVFEPSEAEISHTQKATLVCLATGFYPDHVELSWWVNGKEVHSGVCTDPQPLKEQPALNDSRYCLSSRLRVSATFWQNPRNHFRCQVQFYGLSENDEWTQDRAKPVTQIVSAEAWGRADDVIKIHWQEKKSNTILGSQEGNTMKTNDTYMKFSWLTVPEKSLDKEHRCIVRHENNKNGVDQEIIFPPIKTDVITMDPKDNCSKDANDTLLLQLTNTSAYYMYLLLLLKSVVYFAIITCCLLRRTAFCCNGEKS

SEQ ID NO: 16278 - protein, 995 aa, synthetic construct
MALPVTALLLPLALLLHAARPEVQLVESGGGLVQPGGSLRLSCAASGFSFSDFWMSWVRQAPGKGLEWVATISQAGSEKDYVDSVKGRFTISRDNAKKSLYLQMNSLRAEDTAVYYCASGVYSFDYRGQGTLVTVSSGTGGGGSGGGGSGGGGSEFDIQMTQSPSSLSASVGDRVTITCRASQSISLWLNWYQQKPGKAPKLLIYAASTLQSGVPSRFSGSGSGTDFTLTISSLQPEDFATYYCQQYYTSPYTFGQGTKVEIKRLEIQNPDPAVYQLRDSKSSDKSVCLFTDFDSQTNVSQSKDSDVYITDKCVLDMRSMDFKSNSAVAWSNKSDFACANAFNNSIIPEDTFFPSPESSDSTDHVKPKETENTKQPSKSCHKPKAIVHTEKVNMMSLTVLGLRMLFAKTVAVNFLLTAKLFFLRAKRSGSGVKQTLNFDLLKLAGDVESNPGPTSMDWIWRILFLVGAATGAHSGPQLQLQESGPGLVKPSETLSLTCTVSGDSISSGDYYWGWIRQPPGKGLEWIGHIYYSGVTYYNPSLKSRVTISVDTSRNQFSLKLSSVTAADTAVYYCTREDSSNWRSRGQGTLVTVSSGSGGGGSGGGGSGGGGSFEQVQLLESGGGLVQPGGSLRLSCAASGFTFSSYAMSWVRQAPGKGLEWVSVIRSSGSSTYYADSVKGRFTISRDNSKNTLYLQMNSLRAEDTAVYYCARGGGYFDYWGQGTLVTVSSTREDLKNVFPPEVAVFEPSEAEISHTQKATLVCLATGFYPDHVELSWWVNGKEVHSGVCTDPQPLKEQPALNDSRYCLSSRLRVSATFWQNPRNHFRCQVQFYGLSENDEWTQDRAKPVTQIVSAEAWGRADDVIKIHWQEKKSNTILGSQEGNTMKTNDTYMKFSWLTVPEKSLDKEHRCIVRHENNKNGVDQEIIFPPIKTDVITMDPKDNCSKDANDTLLLQLTNTSAYYMYLLLLLKSVVYFAIITCCLLRRTAFCCNGEKS

SEQ ID NO: 16279 - protein, 998 aa, synthetic construct
MALPVTALLLPLALLLHAARPEVQLVESGGGLVQPGGSLRLSCAASGFSFSDFWMSWVRQAPGKGLEWVATISQAGSEKDYVDSVKGRFTISRDNAKKSLYLQMNSLRAEDTAVYYCASGVYSFDYRGQGTLVTVSSGTGGGGSGGGGSGGGGSEFDIQMTQSPSSLSASVGDRVTITCRASQSISSYLNWYQQKPGKAPKLLIYAVSTLQSGVPSRFSGSGSGTDFTLTISSLQPEDFATYYCQQSGTFPPTTFGQGTKVEIKRLEIQNPDPAVYQLRDSKSSDKSVCLFTDFDSQTNVSQSKDSDVYITDKCVLDMRSMDFKSNSAVAWSNKSDFACANAFNNSIIPEDTFFPSPESSDSTDHVKPKETENTKQPSKSCHKPKAIVHTEKVNMMSLTVLGLRMLFAKTVAVNFLLTAKLFFLRAKRSGSGVKQTLNFDLLKLAGDVESNPGPTSMDWIWRILFLVGAATGAHSGPQLQLQESGPGLVKPSETLSLTCTVSGDSISSGDYYWGWIRQPPGKGLEWIGHIYYSGVTYYNPSLKSRVTISVDTSRNQFSLKLSSVTAADTAVYYCTREDSSNWRSRGQGTLVTVSSGSGGGGSGGGGSGGGGSFEQVQLLESGGGLVQPGGSLRLSCAASGFTFSSHGMHWVRQAPGKGLEWVSVISGSGSNTGYADSVKGRFTISRDNSKNTLYLQMNSLRAEDTAVYYCARQWGSYAFDSWGQGTLVTVSSTREDLKNVFPPEVAVFEPSEAEISHTQKATLVCLATGFYPDHVELSWWVNGKEVHSGVCTDPQPLKEQPALNDSRYCLSSRLRVSATFWQNPRNHFRCQVQFYGLSENDEWTQDRAKPVTQIVSAEAWGRADDVIKIHWQEKKSNTILGSQEGNTMKTNDTYMKFSWLTVPEKSLDKEHRCIVRHENNKNGVDQEIIFPPIKTDVITMDPKDNCSKDANDTLLLQLTNTSAYYMYLLLLLKSVVYFAIITCCLLRRTAFCCNGEKS

SEQ ID NO: 16280 - protein, 1008 aa, synthetic construct
MALPVTALLLPLALLLHAARPEVQLVESGGGLVQPGGSLRLSCAASGFSFSDFWMSWVRQAPGKGLEWVATISQAGSEKDYVDSVKGRFTISRDNAKKSLYLQMNSLRAEDTAVYYCASGVYSFDYRGQGTLVTVSSGTGGGGSGGGGSGGGGSEFDIVMSQSPSSLAVSVGEKVTMSCKSSQSLLHSSNQKNYLAWYQQKPGQSPKVLIYWASTRESGVPDRFTGSGSGTDFTLTITSVKSEDLAVYYCQQYYSYPWTFGGGTRLEIKRLEIQNPDPAVYQLRDSKSSDKSVCLFTDFDSQTNVSQSKDSDVYITDKCVLDMRSMDFKSNSAVAWSNKSDFACANAFNNSIIPEDTFFPSPESSDSTDHVKPKETENTKQPSKSCHKPKAIVHTEKVNMMSLTVLGLRMLFAKTVAVNFLLTAKLFFLRAKRSGSGVKQTLNFDLLKLAGDVESNPGPTSMDWIWRILFLVGAATGAHSGPQLQLQESGPGLVKPSETLSLTCTVSGDSISSGDYYWGWIRQPPGKGLEWIGHIYYSGVTYYNPSLKSRVTISVDTSRNQFSLKLSSVTAADTAVYYCTREDSSNWRSRGQGTLVTVSSGSGGGGSGGGGSGGGGSFEEVQLQQSVAELVKPGASVKMSCKVSGYTLTDHTIHWMKQRPEQGLEWIGYIYPRDGITGYNEKFKGKATLTADTSSSTAYMQLNSLTSEDSAVYFCARWGYSYRNYAYYYDYWGQGTTLTVSSTREDLKNVFPPEVAVFEPSEAEISHTQKATLVCLATGFYPDHVELSWWVNGKEVHSGVCTDPQPLKEQPALNDSRYCLSSRLRVSATFWQNPRNHFRCQVQFYGLSENDEWTQDRAKPVTQIVSAEAWGRADDVIKIHWQEKKSNTILGSQEGNTMKTNDTYMKFSWLTVPEKSLDKEHRCIVRHENNKNGVDQEIIFPPIKTDVITMDPKDNCSKDANDTLLLQLTNTSAYYMYLLLLLKSVVYFAIITCCLLRRTAFCCNGEKS

SEQ ID NO: 16281 - protein, 1005 aa, synthetic construct
MALPVTALLLPLALLLHAARPEVQLVESGGGLVQPGGSLRLSCAASGFSFSDFWMSWVRQAPGKGLEWVATISQAGSEKDYVDSVKGRFTISRDNAKKSLYLQMNSLRAEDTAVYYCASGVYSFDYRGQGTLVTVSSGTGGGGSGGGGSGGGGSEFEIVLTQSPGTLSLSPGERATLSCRASQSVSSSYLAWYQQKPGQAPRLLIYGTSSRATGIPDRFSGSGSGTDFTLTISRLEPEDFAVYYCQQYGSSPFTFGGGTKVEIKRLEIQNPDPAVYQLRDSKSSDKSVCLFTDFDSQTNVSQSKDSDVYITDKCVLDMRSMDFKSNSAVAWSNKSDFACANAFNNSIIPEDTFFPSPESSDSTDHVKPKETENTKQPSKSCHKPKAIVHTEKVNMMSLTVLGLRMLFAKTVAVNFLLTAKLFFLRAKRSGSGVKQTLNFDLLKLAGDVESNPGPTSMDWIWRILFLVGAATGAHSGPQLQLQESGPGLVKPSETLSLTCTVSGDSISSGDYYWGWIRQPPGKGLEWIGHIYYSGVTYYNPSLKSRVTISVDTSRNQFSLKLSSVTAADTAVYYCTREDSSNWRSRGQGTLVTVSSGSGGGGSGGGGSGGGGSFEQVQLQESGPGLAKPSETLSLTCTVSGDSITSYYWSWIRQPPGKGLEWIGYIYYSGSTNYNPSLKSRVTISVDTSKNQFSLKLSSVTAADTAVYYCARDQRRIAAAGTHFYGMDVWGQGTTVTVSSTREDLKNVFPPEVAVFEPSEAEISHTQKATLVCLATGFYPDHVELSWWVNGKEVHSGVCTDPQPLKEQPALNDSRYCLSSRLRVSATFWQNPRNHFRCQVQFYGLSENDEWTQDRAKPVTQIVSAEAWGRADDVIKIHWQEKKSNTILGSQEGNTMKTNDTYMKFSWLTVPEKSLDKEHRCIVRHENNKNGVDQEIIFPPIKTDVITMDPKDNCSKDANDTLLLQLTNTSAYYMYLLLLLKSVVYFAIITCCLLRRTAFCCNGEKS

SEQ ID NO: 16282 - protein, 997 aa, synthetic construct
MALPVTALLLPLALLLHAARPEVQLVESGGGLVQPGGSLRLSCAASGFSFSDFWMSWVRQAPGKGLEWVATISQAGSEKDYVDSVKGRFTISRDNAKKSLYLQMNSLRAEDTAVYYCASGVYSFDYRGQGTLVTVSSGTGGGGSGGGGSGGGGSEFDILLTQSPVILSVSPGERVSFSCRASQSIGTNIHWYQQRTNGSPRLLIKYASESISGIPSRFSGSGSGTDFTLSINSVESEDIADYYCQQNNNWPTTFGAGTKLELKLEIQNPDPAVYQLRDSKSSDKSVCLFTDFDSQTNVSQSKDSDVYITDKCVLDMRSMDFKSNSAVAWSNKSDFACANAFNNSIIPEDTFFPSPESSDSTDHVKPKETENTKQPSKSCHKPKAIVHTEKVNMMSLTVLGLRMLFAKTVAVNFLLTAKLFFLRAKRSGSGVKQTLNFDLLKLAGDVESNPGPTSMDWIWRILFLVGAATGAHSGPQLQLQESGPGLVKPSETLSLTCTVSGDSISSGDYYWGWIRQPPGKGLEWIGHIYYSGVTYYNPSLKSRVTISVDTSRNQFSLKLSSVTAADTAVYYCTREDSSNWRSRGQGTLVTVSSGSGGGGSGGGGSGGGGSFEQVQLKQSGPGLVQPSQSLSITCTVSGFSLTNYGVHWVRQSPGKGLEWLGVIWSGGNTDYNTPFTSRLSINKDNSKSQVFFKMNSLQSNDTAIYYCARALTYYDYEFAYWGQGTLVTVSATREDLKNVFPPEVAVFEPSEAEISHTQKATLVCLATGFYPDHVELSWWVNGKEVHSGVCTDPQPLKEQPALNDSRYCLSSRLRVSATFWQNPRNHFRCQVQFYGLSENDEWTQDRAKPVTQIVSAEAWGRADDVIKIHWQEKKSNTILGSQEGNTMKTNDTYMKFSWLTVPEKSLDKEHRCIVRHENNKNGVDQEIIFPPIKTDVITMDPKDNCSKDANDTLLLQLTNTSAYYMYLLLLLKSVVYFAIITCCLLRRTAFCCNGEKS

SEQ ID NO: 16283 - protein, 990 aa, synthetic construct
MALPVTALLLPLALLLHAARPEVQLVESGGGLVQPGGSLRLSCAASGFSFSDFWMSWVRQAPGKGLEWVATISQAGSEKDYVDSVKGRFTISRDNAKKSLYLQMNSLRAEDTAVYYCASGVYSFDYRGQGTLVTVSSGTGGGGSGGGGSGGGGSEFMTQSPKFLLVSAGDRVTLTCKASQSVNNDVYWYQQEPGQSPKLLIYWASTRESGVPDRFTGSGSGTDFTLTISSVQAEDLAVYYCKQSYNLYTFGGGTKLEIKRLEIQNPDPAVYQLRDSKSSDKSVCLFTDFDSQTNVSQSKDSDVYITDKCVLDMRSMDFKSNSAVAWSNKSDFACANAFNNSIIPEDTFFPSPESSDSTDHVKPKETENTKQPSKSCHKPKAIVHTEKVNMMSLTVLGLRMLFAKTVAVNFLLTAKLFFLRAKRSGSGVKQTLNFDLLKLAGDVESNPGPTSMDWIWRILFLVGAATGAHSGPQLQLQESGPGLVKPSETLSLTCTVSGDSISSGDYYWGWIRQPPGKGLEWIGHIYYSGVTYYNPSLKSRVTISVDTSRNQFSLKLSSVTAADTAVYYCTREDSSNWRSRGQGTLVTVSSGSGGGGSGGGGSGGGGSFEESGRGLVQPGGSRKLSCAASGFTFSTSGMHWVRQAPEKGLEWVAYISSGSTTIYHADTVKGRFTISRDNPKNTLFLQMTSLRSEDTAMYYCCARSGQFGNYFDYWGQGTTLTVSSTREDLKNVFPPEVAVFEPSEAEISHTQKATLVCLATGFYPDHVELSWWVNGKEVHSGVCTDPQPLKEQPALNDSRYCLSSRLRVSATFWQNPRNHFRCQVQFYGLSENDEWTQDRAKPVTQIVSAEAWGRADDVIKIHWQEKKSNTILGSQEGNTMKTNDTYMKFSWLTVPEKSLDKEHRCIVRHENNKNGVDQEIIFPPIKTDVITMDPKDNCSKDANDTLLLQLTNTSAYYMYLLLLLKSVVYFAIITCCLLRRTAFCCNGEKS

SEQ ID NO: 16284 - protein, 995 aa, synthetic construct
MALPVTALLLPLALLLHAARPEVQLVESGGGLVQPGGSLRLSCAASGFSFSDFWMSWVRQAPGKGLEWVATISQAGSEKDYVDSVKGRFTISRDNAKKSLYLQMNSLRAEDTAVYYCASGVYSFDYRGQGTLVTVSSGTGGGGSGGGGSGGGGSEFQSPSSLAVSAGEKVTMSCKSSQSLLNSRTRKNYLAWYQQKPGQSPKLLIYWASTRESGVPDRFTGSGSGTDFTLTISSVQAEDLAVYYCKQSNLYTFGGGTKLEIKLEIQNPDPAVYQLRDSKSSDKSVCLFTDFDSQTNVSQSKDSDVYITDKCVLDMRSMDFKSNSAVAWSNKSDFACANAFNNSIIPEDTFFPSPESSDSTDHVKPKETENTKQPSKSCHKPKAIVHTEKVNMMSLTVLGLRMLFAKTVAVNFLLTAKLFFLRAKRSGSGVKQTLNFDLLKLAGDVESNPGPTSMDWIWRILFLVGAATGAHSGPQLQLQESGPGLVKPSETLSLTCTVSGDSISSGDYYWGWIRQPPGKGLEWIGHIYYSGVTYYNPSLKSRVTISVDTSRNQFSLKLSSVTAADTAVYYCTREDSSNWRSRGQGTLVTVSSGSGGGGSGGGGSGGGGSFEQVQLEESGPELVKPGASVKLSCKASGYTFTEYIIHWVKQRSGQGLEWIGWFYPGSGSIKYNEKFKDKATLTADKSSSTVYMELSGLTSEDSAVYFCARHDGYSYFDYWGQGTTLTVSSTREDLKNVFPPEVAVFEPSEAEISHTQKATLVCLATGFYPDHVELSWWVNGKEVHSGVCTDPQPLKEQPALNDSRYCLSSRLRVSATFWQNPRNHFRCQVQFYGLSENDEWTQDRAKPVTQIVSAEAWGRADDVIKIHWQEKKSNTILGSQEGNTMKTNDTYMKFSWLTVPEKSLDKEHRCIVRHENNKNGVDQEIIFPPIKTDVITMDPKDNCSKDANDTLLLQLTNTSAYYMYLLLLLKSVVYFAIITCCLLRRTAFCCNGEKS

SEQ ID NO: 16285 - protein, 998 aa, synthetic construct
MALPVTALLLPLALLLHAARPEVQLVESGGGLVQPGGSLRLSCAASGFSFSDFWMSWVRQAPGKGLEWVATISQAGSEKDYVDSVKGRFTISRDNAKKSLYLQMNSLRAEDTAVYYCASGVYSFDYRGQGTLVTVSSGTGGGGSGGGGSGGGGSEFDIQMTQSPSSLSASLGERVSLTCRATQELSGYLSWLQQKPDGTIKRLIYAASTLDSGVPKRFSGNRSGSDYSLTISSLESEDFADYYCLQYAIYPYTFGGGTKLEIKLEIQNPDPAVYQLRDSKSSDKSVCLFTDFDSQTNVSQSKDSDVYITDKCVLDMRSMDFKSNSAVAWSNKSDFACANAFNNSIIPEDTFFPSPESSDSTDHVKPKETENTKQPSKSCHKPKAIVHTEKVNMMSLTVLGLRMLFAKTVAVNFLLTAKLFFLRAKRSGSGVKQTLNFDLLKLAGDVESNPGPTSMDWIWRILFLVGAATGAHSGPQLQLQESGPGLVKPSETLSLTCTVSGDSISSGDYYWGWIRQPPGKGLEWIGHIYYSGVTYYNPSLKSRVTISVDTSRNQFSLKLSSVTAADTAVYYCTREDSSNWRSRGQGTLVTVSSGSGGGGSGGGGSGGGGSFEEVQLQQSGPELVKPGASVKMSCKASGYTFTSYFIHWVKQKPGQGLEWIGFINPYNDGSKYNEKFKGKATLTSDKSSSTAYMELSSLTSEDSAVYYCTRDDGYYGYAMDYWGQGTSVTVSSTREDLKNVFPPEVAVFEPSEAEISHTQKATLVCLATGFYPDHVELSWWVNGKEVHSGVCTDPQPLKEQPALNDSRYCLSSRLRVSATFWQNPRNHFRCQVQFYGLSENDEWTQDRAKPVTQIVSAEAWGRADDVIKIHWQEKKSNTILGSQEGNTMKTNDTYMKFSWLTVPEKSLDKEHRCIVRHENNKNGVDQEIIFPPIKTDVITMDPKDNCSKDANDTLLLQLTNTSAYYMYLLLLLKSVVYFAIITCCLLRRTAFCCNGEKS

SEQ ID NO: 16286 - protein, 1003 aa, synthetic construct
MALPVTALLLPLALLLHAARPEVQLVESGGGLVQPGGSLRLSCAASGFSFSDFWMSWVRQAPGKGLEWVATISQAGSEKDYVDSVKGRFTISRDNAKKSLYLQMNSLRAEDTAVYYCASGVYSFDYRGQGTLVTVSSGTGGGGSGGGGSGGGGSEFDTIVLTQSPASLAVSLGQRATISCRASESVDSYGNSFMHWYQQKPGQPPKLLIYLASNLESGVPARFSGSGSRTDFTLTIDPVEADDAATYYCQQNNYDPWTFGGGTKLEIKLEIQNPDPAVYQLRDSKSSDKSVCLFTDFDSQTNVSQSKDSDVYITDKCVLDMRSMDFKSNSAVAWSNKSDFACANAFNNSIIPEDTFFPSPESSDSTDHVKPKETENTKQPSKSCHKPKAIVHTEKVNMMSLTVLGLRMLFAKTVAVNFLLTAKLFFLRAKRSGSGVKQTLNFDLLKLAGDVESNPGPTSMDWIWRILFLVGAATGAHSGPQLQLQESGPGLVKPSETLSLTCTVSGDSISSGDYYWGWIRQPPGKGLEWIGHIYYSGVTYYNPSLKSRVTISVDTSRNQFSLKLSSVTAADTAVYYCTREDSSNWRSRGQGTLVTVSSGSGGGGSGGGGSGGGGSFEEVQLQQSGPELVKPGASVKMSCKASGYTFTSYVMHWVKQKPGQGLEWIGYINPYNDGTKYNEKFKGKATLTSDTSSSTAYMELNSLTSEDSAVYFCARPIYFDNDYFDYWGQGTTLKVSSTREDLKNVFPPEVAVFEPSEAEISHTQKATLVCLATGFYPDHVELSWWVNGKEVHSGVCTDPQPLKEQPALNDSRYCLSSRLRVSATFWQNPRNHFRCQVQFYGLSENDEWTQDRAKPVTQIVSAEAWGRADDVIKIHWQEKKSNTILGSQEGNTMKTNDTYMKFSWLTVPEKSLDKEHRCIVRHENNKNGVDQEIIFPPIKTDVITMDPKDNCSKDANDTLLLQLTNTSAYYMYLLLLLKSVVYFAIITCCLLRRTAFCCNGEKS

SEQ ID NO: 16287 - protein, 998 aa, synthetic construct
MALPVTALLLPLALLLHAARPEVQLVESGGGLVQPGGSLRLSCAASGFSFSDFWMSWVRQAPGKGLEWVATISQAGSEKDYVDSVKGRFTISRDNAKKSLYLQMNSLRAEDTAVYYCASGVYSFDYRGQGTLVTVSSGTGGGGSGGGGSGGGGSEFDIQMTQSPSSLSASVGDRVTITCKASQDVGIAVAWYQQKPGKVPKLLIYWASTRHTGVPDRFSGSGSGTDFTLTISSLQPEDVATYYCQQYSSYPYTFGQGTKVEIKRLEIQNPDPAVYQLRDSKSSDKSVCLFTDFDSQTNVSQSKDSDVYITDKCVLDMRSMDFKSNSAVAWSNKSDFACANAFNNSIIPEDTFFPSPESSDSTDHVKPKETENTKQPSKSCHKPKAIVHTEKVNMMSLTVLGLRMLFAKTVAVNFLLTAKLFFLRAKRSGSGVKQTLNFDLLKLAGDVESNPGPTSMDWIWRILFLVGAATGAHSGPQLQLQESGPGLVKPSETLSLTCTVSGDSISSGDYYWGWIRQPPGKGLEWIGHIYYSGVTYYNPSLKSRVTISVDTSRNQFSLKLSSVTAADTAVYYCTREDSSNWRSRGQGTLVTVSSGSGGGGSGGGGSGGGGSFEEVQLVESGGGLVQPGGSLRLSCAASGFDFSRYWMSWVRQAPGKGLEWIGEINPDSSTINYAPSLKDKFIISRDNAKNSLYLQMNSLRAEDTAVYYCARPDGNYWYFDVWGQGTLVTVSSTREDLKNVFPPEVAVFEPSEAEISHTQKATLVCLATGFYPDHVELSWWVNGKEVHSGVCTDPQPLKEQPALNDSRYCLSSRLRVSATFWQNPRNHFRCQVQFYGLSENDEWTQDRAKPVTQIVSAEAWGRADDVIKIHWQEKKSNTILGSQEGNTMKTNDTYMKFSWLTVPEKSLDKEHRCIVRHENNKNGVDQEIIFPPIKTDVITMDPKDNCSKDANDTLLLQLTNTSAYYMYLLLLLKSVVYFAIITCCLLRRTAFCCNGEKS

SEQ ID NO: 16288 - protein, 998 aa, synthetic construct
MALPVTALLLPLALLLHAARPEVQLVESGGGLVQPGGSLRLSCAASGFSFSDFWMSWVRQAPGKGLEWVATISQAGSEKDYVDSVKGRFTISRDNAKKSLYLQMNSLRAEDTAVYYCASGVYSFDYRGQGTLVTVSSGTGGGGSGGGGSGGGGSEFDIVMTQSQKSMSTSVGDRVSITCKASQDVITGVAWYQQKPGQSPKLLIYSASYRYTGVPDRFTGSGSGTDFTFTISNVQAEDLAVYYCQQHYSTPLTFGAGTKLELKLEIQNPDPAVYQLRDSKSSDKSVCLFTDFDSQTNVSQSKDSDVYITDKCVLDMRSMDFKSNSAVAWSNKSDFACANAFNNSIIPEDTFFPSPESSDSTDHVKPKETENTKQPSKSCHKPKAIVHTEKVNMMSLTVLGLRMLFAKTVAVNFLLTAKLFFLRAKRSGSGVKQTLNFDLLKLAGDVESNPGPTSMDWIWRILFLVGAATGAHSGPQLQLQESGPGLVKPSETLSLTCTVSGDSISSGDYYWGWIRQPPGKGLEWIGHIYYSGVTYYNPSLKSRVTISVDTSRNQFSLKLSSVTAADTAVYYCTREDSSNWRSRGQGTLVTVSSGSGGGGSGGGGSGGGGSFEQVQLQQPGAELVRPGASVKLSCKASGYSFTTYWMNWVKQRPGQGLEWIGMIHPSDSETRLNQKFKDKATLTVDKSSSTAYMQLSSPTSEDSAVYYCARSTMIATRAMDYWGQGTSVTVSSTREDLKNVFPPEVAVFEPSEAEISHTQKATLVCLATGFYPDHVELSWWVNGKEVHSGVCTDPQPLKEQPALNDSRYCLSSRLRVSATFWQNPRNHFRCQVQFYGLSENDEWTQDRAKPVTQIVSAEAWGRADDVIKIHWQEKKSNTILGSQEGNTMKTNDTYMKFSWLTVPEKSLDKEHRCIVRHENNKNGVDQEIIFPPIKTDVITMDPKDNCSKDANDTLLLQLTNTSAYYMYLLLLLKSVVYFAIITCCLLRRTAFCCNGEKS

SEQ ID NO: 16289 - protein, 1004 aa, synthetic construct
MALPVTALLLPLALLLHAARPEVQLVESGGGLVQPGGSLRLSCAASGFSFSDFWMSWVRQAPGKGLEWVATISQAGSEKDYVDSVKGRFTISRDNAKKSLYLQMNSLRAEDTAVYYCASGVYSFDYRGQGTLVTVSSGTGGGGSGGGGSGGGGSEFQSVLTQPPSVSGAPGQRVTISCTGSGSNIGAPYDVSWYQQLPGTAPKLLIYHNNKRPSGVPDRFSGSKSGTSASLAITGLQAEDEADYYCATVEAGLSGSVFGGGTKLTVLGALEIQNPDPAVYQLRDSKSSDKSVCLFTDFDSQTNVSQSKDSDVYITDKCVLDMRSMDFKSNSAVAWSNKSDFACANAFNNSIIPEDTFFPSPESSDSTDHVKPKETENTKQPSKSCHKPKAIVHTEKVNMMSLTVLGLRMLFAKTVAVNFLLTAKLFFLRAKRSGSGVKQTLNFDLLKLAGDVESNPGPTSMDWIWRILFLVGAATGAHSGPQLQLQESGPGLVKPSETLSLTCTVSGDSISSGDYYWGWIRQPPGKGLEWIGHIYYSGVTYYNPSLKSRVTISVDTSRNQFSLKLSSVTAADTAVYYCTREDSSNWRSRGQGTLVTVSSGSGGGGSGGGGSGGGGSFEQVQLVQSGAEVKKPGASVKVSCKVSGYTLTELSIHWVRQAPGKGLEWMGGFDPEENEIVYAQRFQGRVTMTEDTSTDTAYMELSSLRSEDTAVYYCAIVGSFSPLTLGLWGQGTMVTVSSTREDLKNVFPPEVAVFEPSEAEISHTQKATLVCLATGFYPDHVELSWWVNGKEVHSGVCTDPQPLKEQPALNDSRYCLSSRLRVSATFWQNPRNHFRCQVQFYGLSENDEWTQDRAKPVTQIVSAEAWGRADDVIKIHWQEKKSNTILGSQEGNTMKTNDTYMKFSWLTVPEKSLDKEHRCIVRHENNKNGVDQEIIFPPIKTDVITMDPKDNCSKDANDTLLLQLTNTSAYYMYLLLLLKSVVYFAIITCCLLRRTAFCCNGEKS

SEQ ID NO: 16290 - protein, 1004 aa, synthetic construct
MALPVTALLLPLALLLHAARPEVQLVESGGGLVQPGGSLRLSCAASGFSFSDFWMSWVRQAPGKGLEWVATISQAGSEKDYVDSVKGRFTISRDNAKKSLYLQMNSLRAEDTAVYYCASGVYSFDYRGQGTLVTVSSGTGGGGSGGGGSGGGGSEFQSVLTQPPSVSGAPGQRVTISCTGSGSNIGAPYDVSWYQQLPGTAPKLLIYHNNKRPSGVPDRFSGSKSGTSASLAITGLQAEDEADYYCQSYDSSSISTIFGGGTKLTVLGALEIQNPDPAVYQLRDSKSSDKSVCLFTDFDSQTNVSQSKDSDVYITDKCVLDMRSMDFKSNSAVAWSNKSDFACANAFNNSIIPEDTFFPSPESSDSTDHVKPKETENTKQPSKSCHKPKAIVHTEKVNMMSLTVLGLRMLFAKTVAVNFLLTAKLFFLRAKRSGSGVKQTLNFDLLKLAGDVESNPGPTSMDWIWRILFLVGAATGAHSGPQLQLQESGPGLVKPSETLSLTCTVSGDSISSGDYYWGWIRQPPGKGLEWIGHIYYSGVTYYNPSLKSRVTISVDTSRNQFSLKLSSVTAADTAVYYCTREDSSNWRSRGQGTLVTVSSGSGGGGSGGGGSGGGGSFEQVQLVQSGAEVKKPGASVKVSCKVSGYTLTELSIHWVRQAPGKGLEWMGGFDPEENEIVYAQRFQGRVTMTEDTSTDTAYMELSSLRSEDTAVYYCAIVGSFSGIAYRPWGQGTMVTVSSTREDLKNVFPPEVAVFEPSEAEISHTQKATLVCLATGFYPDHVELSWWVNGKEVHSGVCTDPQPLKEQPALNDSRYCLSSRLRVSATFWQNPRNHFRCQVQFYGLSENDEWTQDRAKPVTQIVSAEAWGRADDVIKIHWQEKKSNTILGSQEGNTMKTNDTYMKFSWLTVPEKSLDKEHRCIVRHENNKNGVDQEIIFPPIKTDVITMDPKDNCSKDANDTLLLQLTNTSAYYMYLLLLLKSVVYFAIITCCLLRRTAFCCNGEKS

SEQ ID NO: 16291 - protein, 992 aa, synthetic construct
MALPVTALLLPLALLLHAARPEVQLVESGGGLVQPGGSLRLSCAASGFSFSDFWMSWVRQAPGKGLEWVATISQAGSEKDYVDSVKGRFTISRDNAKKSLYLQMNSLRAEDTAVYYCASGVYSFDYRGQGTLVTVSSGTGGGGSGGGGSGGGGSEFDIQMTQSPSSLSASVGDRVTITCRASQGIRNNLAWYQQKPGKAPKRLIYAASNLQSGVPSRFTGSGSGTEFTLIVSSLQPEDFATYYCLQHHSYPLTSGGGTKVELEIQNPDPAVYQLRDSKSSDKSVCLFTDFDSQTNVSQSKDSDVYITDKCVLDMRSMDFKSNSAVAWSNKSDFACANAFNNSIIPEDTFFPSPESSDSTDHVKPKETENTKQPSKSCHKPKAIVHTEKVNMMSLTVLGLRMLFAKTVAVNFLLTAKLFFLRAKRSGSGVKQTLNFDLLKLAGDVESNPGPTSMDWIWRILFLVGAATGAHSGPQLQLQESGPGLVKPSETLSLTCTVSGDSISSGDYYWGWIRQPPGKGLEWIGHIYYSGVTYYNPSLKSRVTISVDTSRNQFSLKLSSVTAADTAVYYCTREDSSNWRSRGQGTLVTVSSGSGGGGSGGGGSGGGGSFEEVQVLESGGGLVQPGGSLRLSCAASGFTFSSYAMSWVRQAPGKGLEWVSAISGSGGSTNYADSVKGRFTISRDNSKNTLYLQMNSLRAEDTAVYYCAGSSGWSEYWGQGTLVTVSSTREDLKNVFPPEVAVFEPSEAEISHTQKATLVCLATGFYPDHVELSWWVNGKEVHSGVCTDPQPLKEQPALNDSRYCLSSRLRVSATFWQNPRNHFRCQVQFYGLSENDEWTQDRAKPVTQIVSAEAWGRADDVIKIHWQEKKSNTILGSQEGNTMKTNDTYMKFSWLTVPEKSLDKEHRCIVRHENNKNGVDQEIIFPPIKTDVITMDPKDNCSKDANDTLLLQLTNTSAYYMYLLLLLKSVVYFAIITCCLLRRTAFCCNGEKS

SEQ ID NO: 16292 - protein, 998 aa, synthetic construct
MALPVTALLLPLALLLHAARPEVQLVESGGGLVQPGGSLRLSCAASGFSFSDFWMSWVRQAPGKGLEWVATISQAGSEKDYVDSVKGRFTISRDNAKKSLYLQMNSLRAEDTAVYYCASGVYSFDYRGQGTLVTVSSGTGGGGSGGGGSGGGGSEFDEIQLVQSGAEVKKPGESLRISCKGSGFNIEDYYIHWVRQMPGKGLEWMGRIDPENDETKYGPIFQGHVTISADTSINTVYLQWSSLKASDTAMYYCAFRGGVYWGQGTTVTVSSLEIQNPDPAVYQLRDSKSSDKSVCLFTDFDSQTNVSQSKDSDVYITDKCVLDMRSMDFKSNSAVAWSNKSDFACANAFNNSIIPEDTFFPSPESSDSTDHVKPKETENTKQPSKSCHKPKAIVHTEKVNMMSLTVLGLRMLFAKTVAVNFLLTAKLFFLRAKRSGSGVKQTLNFDLLKLAGDVESNPGPTSMDWIWRILFLVGAATGAHSGPQLQLQESGPGLVKPSETLSLTCTVSGDSISSGDYYWGWIRQPPGKGLEWIGHIYYSGVTYYNPSLKSRVTISVDTSRNQFSLKLSSVTAADTAVYYCTREDSSNWRSRGQGTLVTVSSGSGGGGSGGGGSGGGGSFEDVVMTQSPDSLAVSLGERATINCKSSQSLLDSDGKTYLNWLQQKPGQPPKRLISLVSKLDSGVPDRFSGSGSGTDFTLTISSLQAEDVAVYYCWQGTHFPGTFGGGTKVEIKTREDLKNVFPPEVAVFEPSEAEISHTQKATLVCLATGFYPDHVELSWWVNGKEVHSGVCTDPQPLKEQPALNDSRYCLSSRLRVSATFWQNPRNHFRCQVQFYGLSENDEWTQDRAKPVTQIVSAEAWGRADDVIKIHWQEKKSNTILGSQEGNTMKTNDTYMKFSWLTVPEKSLDKEHRCIVRHENNKNGVDQEIIFPPIKTDVITMDPKDNCSKDANDTLLLQLTNTSAYYMYLLLLLKSVVYFAIITCCLLRRTAFCCNGEKS

SEQ ID NO: 16293 - protein, 1005 aa, synthetic construct
MALPVTALLLPLALLLHAARPEVQLVESGGGLVQPGGSLRLSCAASGFSFSDFWMSWVRQAPGKGLEWVATISQAGSEKDYVDSVKGRFTISRDNAKKSLYLQMNSLRAEDTAVYYCASGVYSFDYRGQGTLVTVSSGTGGGGSGGGGSGGGGSEFDELVMTQSPSSLTVTAGEKVTMSCKSSQSLLNSGNQKNYLTWYQQKPGQPPKLLIYWASTRESGVPDRFTGSGSGTDFTLTISSVQAEDLAVYYCQNDYSYPLTFGAGTKLEIKLEIQNPDPAVYQLRDSKSSDKSVCLFTDFDSQTNVSQSKDSDVYITDKCVLDMRSMDFKSNSAVAWSNKSDFACANAFNNSIIPEDTFFPSPESSDSTDHVKPKETENTKQPSKSCHKPKAIVHTEKVNMMSLTVLGLRMLFAKTVAVNFLLTAKLFFLRAKRSGSGVKQTLNFDLLKLAGDVESNPGPTSMDWIWRILFLVGAATGAHSGPQLQLQESGPGLVKPSETLSLTCTVSGDSISSGDYYWGWIRQPPGKGLEWIGHIYYSGVTYYNPSLKSRVTISVDTSRNQFSLKLSSVTAADTAVYYCTREDSSNWRSRGQGTLVTVSSGSGGGGSGGGGSGGGGSFEEVQLLEQSGAELVRPGTSVKISCKASGYAFTNYWLGWVKQRPGHGLEWIGDIFPGSGNIHYNEKFKGKATLTADKSSSTAYMQLSSLTFEDSAVYFCARLRNWDEPMDYWGQGTTVTVSSTREDLKNVFPPEVAVFEPSEAEISHTQKATLVCLATGFYPDHVELSWWVNGKEVHSGVCTDPQPLKEQPALNDSRYCLSSRLRVSATFWQNPRNHFRCQVQFYGLSENDEWTQDRAKPVTQIVSAEAWGRADDVIKIHWQEKKSNTILGSQEGNTMKTNDTYMKFSWLTVPEKSLDKEHRCIVRHENNKNGVDQEIIFPPIKTDVITMDPKDNCSKDANDTLLLQLTNTSAYYMYLLLLLKSVVYFAIITCCLLRRTAFCCNGEKS

SEQ ID NO: 16294 - protein, 1006 aa, synthetic construct
MALPVTALLLPLALLLHAARPEVQLVESGGGLVQPGGSLRLSCAASGFSFSDFWMSWVRQAPGKGLEWVATISQAGSEKDYVDSVKGRFTISRDNAKKSLYLQMNSLRAEDTAVYYCASGVYSFDYRGQGTLVTVSSGTGGGGSGGGGSGGGGSEFDELQMTQSPSSLSASVGDRVTITCRASQSISSYLNWYQQKPGQPPKLLIYWASTRESGVPDRFSGSESGTNYTLTISSLQPEDFATYFCQQSDSLPITFGQGTRLDIQLEIQNPDPAVYQLRDSKSSDKSVCLFTDFDSQTNVSQSKDSDVYITDKCVLDMRSMDFKSNSAVAWSNKSDFACANAFNNSIIPEDTFFPSPESSDSTDHVKPKETENTKQPSKSCHKPKAIVHTEKVNMMSLTVLGLRMLFAKTVAVNFLLTAKLFFLRAKRSGSGVKQTLNFDLLKLAGDVESNPGPTSMDWIWRILFLVGAATGAHSGPQLQLQESGPGLVKPSETLSLTCTVSGDSISSGDYYWGWIRQPPGKGLEWIGHIYYSGVTYYNPSLKSRVTISVDTSRNQFSLKLSSVTAADTAVYYCTREDSSNWRSRGQGTLVTVSSGSGGGGSGGGGSGGGGSFEEVQLLESGGGVVQPGRSLRLSCAASGFTFSSYGMHWVRQAPGKGLEWVAVISYDGSNKYYADSVKGRFTISRDNSKNTLYLQMNSLRAEDTAVYYCAKDMGWGSGWRPYYYYGMDVWGQGTTVTVSSTREDLKNVFPPEVAVFEPSEAEISHTQKATLVCLATGFYPDHVELSWWVNGKEVHSGVCTDPQPLKEQPALNDSRYCLSSRLRVSATFWQNPRNHFRCQVQFYGLSENDEWTQDRAKPVTQIVSAEAWGRADDVIKIHWQEKKSNTILGSQEGNTMKTNDTYMKFSWLTVPEKSLDKEHRCIVRHENNKNGVDQEIIFPPIKTDVITMDPKDNCSKDANDTLLLQLTNTSAYYMYLLLLLKSVVYFAIITCCLLRRTAFCCNGEKS

SEQ ID NO: 16295 - protein, 1003 aa, synthetic construct
MALPVTALLLPLALLLHAARPEVQLVESGGGLVQPGGSLRLSCAASGFSFSDFWMSWVRQAPGKGLEWVATISQAGSEKDYVDSVKGRFTISRDNAKKSLYLQMNSLRAEDTAVYYCASGVYSFDYRGQGTLVTVSSGTGGGGSGGGGSGGGGSEFDDIQMTQSPSSLSASVGDRVTITCRASQSISSYLNWYQQKPGKAPKLLIYAASSLQSGVPSRFSGSGSGTDFTLTISSLQPEDLATYYCQQSYSTPFTFGPGTKVDIKLEIQNPDPAVYQLRDSKSSDKSVCLFTDFDSQTNVSQSKDSDVYITDKCVLDMRSMDFKSNSAVAWSNKSDFACANAFNNSIIPEDTFFPSPESSDSTDHVKPKETENTKQPSKSCHKPKAIVHTEKVNMMSLTVLGLRMLFAKTVAVNFLLTAKLFFLRAKRSGSGVKQTLNFDLLKLAGDVESNPGPTSMDWIWRILFLVGAATGAHSGPQLQLQESGPGLVKPSETLSLTCTVSGDSISSGDYYWGWIRQPPGKGLEWIGHIYYSGVTYYNPSLKSRVTISVDTSRNQFSLKLSSVTAADTAVYYCTREDSSNWRSRGQGTLVTVSSGSGGGGSGGGGSGGGGSFEVHEVQLVQSGAEVKKPGSSVKVSCKASGGTFSSYAISWVRQAPGQGLEWMGGIIPIFGTANYAQKFQGRVTITADKSTSTAYMELSSLRSEDTAVYYCATFALFGFREQAFDIWGQGTTVTVSSTREDLKNVFPPEVAVFEPSEAEISHTQKATLVCLATGFYPDHVELSWWVNGKEVHSGVCTDPQPLKEQPALNDSRYCLSSRLRVSATFWQNPRNHFRCQVQFYGLSENDEWTQDRAKPVTQIVSAEAWGRADDVIKIHWQEKKSNTILGSQEGNTMKTNDTYMKFSWLTVPEKSLDKEHRCIVRHENNKNGVDQEIIFPPIKTDVITMDPKDNCSKDANDTLLLQLTNTSAYYMYLLLLLKSVVYFAIITCCLLRRTAFCCNGEKS

SEQ ID NO: 16296 - protein, 1001 aa, synthetic construct
MALPVTALLLPLALLLHAARPEVQLVESGGGLVQPGGSLRLSCAASGFSFSDFWMSWVRQAPGKGLEWVATISQAGSEKDYVDSVKGRFTISRDNAKKSLYLQMNSLRAEDTAVYYCASGVYSFDYRGQGTLVTVSSGTGGGGSGGGGSGGGGSEFDIVLTQSPLSLAVSLGQPAIISCKASQSVSFAGTSLMHWYHQKPGQQPRLLIYRASNLEAGVPDRFSGSGSKTDFTLTISPVEAEDAATYYCQQSREYPYTFGGGTKLEIKRLEIQNPDPAVYQLRDSKSSDKSVCLFTDFDSQTNVSQSKDSDVYITDKCVLDMRSMDFKSNSAVAWSNKSDFACANAFNNSIIPEDTFFPSPESSDSTDHVKPKETENTKQPSKSCHKPKAIVHTEKVNMMSLTVLGLRMLFAKTVAVNFLLTAKLFFLRAKRSGSGVKQTLNFDLLKLAGDVESNPGPTSMDWIWRILFLVGAATGAHSGPQLQLQESGPGLVKPSETLSLTCTVSGDSISSGDYYWGWIRQPPGKGLEWIGHIYYSGVTYYNPSLKSRVTISVDTSRNQFSLKLSSVTAADTAVYYCTREDSSNWRSRGQGTLVTVSSGSGGGGSGGGGSGGGGSFEQVQLVQSGAEVVKPGASVKISCKASGYTFTGYFMNWVKQSPGQSLEWIGRIHPYDGDTFYNQKFQGKATLTVDKSSNTAHMELLSLTSEDFAVYYCTRYDGSRAMDYWGQGTTVTVSSTREDLKNVFPPEVAVFEPSEAEISHTQKATLVCLATGFYPDHVELSWWVNGKEVHSGVCTDPQPLKEQPALNDSRYCLSSRLRVSATFWQNPRNHFRCQVQFYGLSENDEWTQDRAKPVTQIVSAEAWGRADDVIKIHWQEKKSNTILGSQEGNTMKTNDTYMKFSWLTVPEKSLDKEHRCIVRHENNKNGVDQEIIFPPIKTDVITMDPKDNCSKDANDTLLLQLTNTSAYYMYLLLLLKSVVYFAIITCCLLRRTAFCCNGEKS

SEQ ID NO: 16297 - protein, 998 aa, synthetic construct
MALPVTALLLPLALLLHAARPEVQLVESGGGLVQPGGSLRLSCAASGFSFSDFWMSWVRQAPGKGLEWVATISQAGSEKDYVDSVKGRFTISRDNAKKSLYLQMNSLRAEDTAVYYCASGVYSFDYRGQGTLVTVSSGTGGGGSGGGGSGGGGSEFDDVVMTQTPLSLPVTPGEPASISCRSSQSLVHRNGNTYLHWYLQKPGQSPKLLIHKVSNRFSGVPDRFSGSGSGTDFTLKISRVEAEDLGVYFCSQSTHVPPLTFGAGTKLELKLEIQNPDPAVYQLRDSKSSDKSVCLFTDFDSQTNVSQSKDSDVYITDKCVLDMRSMDFKSNSAVAWSNKSDFACANAFNNSIIPEDTFFPSPESSDSTDHVKPKETENTKQPSKSCHKPKAIVHTEKVNMMSLTVLGLRMLFAKTVAVNFLLTAKLFFLRAKRSGSGVKQTLNFDLLKLAGDVESNPGPTSMDWIWRILFLVGAATGAHSGPQLQLQESGPGLVKPSETLSLTCTVSGDSISSGDYYWGWIRQPPGKGLEWIGHIYYSGVTYYNPSLKSRVTISVDTSRNQFSLKLSSVTAADTAVYYCTREDSSNWRSRGQGTLVTVSSGSGGGGSGGGGSGGGGSFEEVQLVQSGAEVEKPGASVKISCKASGSSFTGYNMNWVRQNIGKSLEWIGAIDPYYGGTSYNQKFKGRATLTVDKSTSTAYMHLKSLRSEDTAVYYCVSGMEYWGQGTSVTVSSTREDLKNVFPPEVAVFEPSEAEISHTQKATLVCLATGFYPDHVELSWWVNGKEVHSGVCTDPQPLKEQPALNDSRYCLSSRLRVSATFWQNPRNHFRCQVQFYGLSENDEWTQDRAKPVTQIVSAEAWGRADDVIKIHWQEKKSNTILGSQEGNTMKTNDTYMKFSWLTVPEKSLDKEHRCIVRHENNKNGVDQEIIFPPIKTDVITMDPKDNCSKDANDTLLLQLTNTSAYYMYLLLLLKSVVYFAIITCCLLRRTAFCCNGEKS

SEQ ID NO: 16298 - protein, 996 aa, synthetic construct
MALPVTALLLPLALLLHAARPEVQLVESGGGLVQPGGSLRLSCAASGFSFSDFWMSWVRQAPGKGLEWVATISQAGSEKDYVDSVKGRFTISRDNAKKSLYLQMNSLRAEDTAVYYCASGVYSFDYRGQGTLVTVSSGTGGGGSGGGGSGGGGSEFDEIVMTQTPATLSVSAGERVTITCKASQSVSNDVTWYQQKPGQAPRLLIYSASNRYSGVPARFSGSGYGTEFTFTISSVQSEDFAVYFCQQDYSSFGQGTKLEIKRLEIQNPDPAVYQLRDSKSSDKSVCLFTDFDSQTNVSQSKDSDVYITDKCVLDMRSMDFKSNSAVAWSNKSDFACANAFNNSIIPEDTFFPSPESSDSTDHVKPKETENTKQPSKSCHKPKAIVHTEKVNMMSLTVLGLRMLFAKTVAVNFLLTAKLFFLRAKRSGSGVKQTLNFDLLKLAGDVESNPGPTSMDWIWRILFLVGAATGAHSGPQLQLQESGPGLVKPSETLSLTCTVSGDSISSGDYYWGWIRQPPGKGLEWIGHIYYSGVTYYNPSLKSRVTISVDTSRNQFSLKLSSVTAADTAVYYCTREDSSNWRSRGQGTLVTVSSGSGGGGSGGGGSGGGGSFEQVQLVESGPGVVQPGRSLRISCAVSGFSVTNYGVHWVRQPPGKGLEWLGVIWAGGITNYNSAFMSRLTISKDNSKNTVYLQMNSLRAEDTAMYYCASRGGHYGYALDYWGQGTLVTVSSTREDLKNVFPPEVAVFEPSEAEISHTQKATLVCLATGFYPDHVELSWWVNGKEVHSGVCTDPQPLKEQPALNDSRYCLSSRLRVSATFWQNPRNHFRCQVQFYGLSENDEWTQDRAKPVTQIVSAEAWGRADDVIKIHWQEKKSNTILGSQEGNTMKTNDTYMKFSWLTVPEKSLDKEHRCIVRHENNKNGVDQEIIFPPIKTDVITMDPKDNCSKDANDTLLLQLTNTSAYYMYLLLLLKSVVYFAIITCCLLRRTAFCCNGEKS

SEQ ID NO: 16299 - protein, 998 aa, synthetic construct
MALPVTALLLPLALLLHAARPEVQLVESGGGLVQPGGSLRLSCAASGFSFSDFWMSWVRQAPGKGLEWVATISQAGSEKDYVDSVKGRFTISRDNAKKSLYLQMNSLRAEDTAVYYCASGVYSFDYRGQGTLVTVSSGTGGGGSGGGGSGGGGSEFDIQMTQTASSLPASLGDRVTISCSASQDISNYLNWYQQKPDGTVKLLIFYSSNLHSGVPSRFSGGGSGTDYSLTISNLEPEDIATYFCHQYSKLPWTFGGGTKLEIKRLEIQNPDPAVYQLRDSKSSDKSVCLFTDFDSQTNVSQSKDSDVYITDKCVLDMRSMDFKSNSAVAWSNKSDFACANAFNNSIIPEDTFFPSPESSDSTDHVKPKETENTKQPSKSCHKPKAIVHTEKVNMMSLTVLGLRMLFAKTVAVNFLLTAKLFFLRAKRSGSGVKQTLNFDLLKLAGDVESNPGPTSMDWIWRILFLVGAATGAHSGPQLQLQESGPGLVKPSETLSLTCTVSGDSISSGDYYWGWIRQPPGKGLEWIGHIYYSGVTYYNPSLKSRVTISVDTSRNQFSLKLSSVTAADTAVYYCTREDSSNWRSRGQGTLVTVSSGSGGGGSGGGGSGGGGSFEEVTLVESGGDFVKPGGSLKVSCAASGFAFSHYAMSWVRQTPAKRLEWVAYISSGGSGTYYSDSVKGRFTISRDNAKNTLYLQMRSLRSEDSAMYFCTRVKLGTYYFDSWGQGTTLTVSSTREDLKNVFPPEVAVFEPSEAEISHTQKATLVCLATGFYPDHVELSWWVNGKEVHSGVCTDPQPLKEQPALNDSRYCLSSRLRVSATFWQNPRNHFRCQVQFYGLSENDEWTQDRAKPVTQIVSAEAWGRADDVIKIHWQEKKSNTILGSQEGNTMKTNDTYMKFSWLTVPEKSLDKEHRCIVRHENNKNGVDQEIIFPPIKTDVITMDPKDNCSKDANDTLLLQLTNTSAYYMYLLLLLKSVVYFAIITCCLLRRTAFCCNGEKS

SEQ ID NO: 16300 - protein, 1000 aa, synthetic construct
MALPVTALLLPLALLLHAARPEVQLVESGGGLVQPGGSLRLSCAASGFSFSDFWMSWVRQAPGKGLEWVATISQAGSEKDYVDSVKGRFTISRDNAKKSLYLQMNSLRAEDTAVYYCASGVYSFDYRGQGTLVTVSSGTGGGGSGGGGSGGGGSEFQFVLTQSPSASAALGASAKLTCTLSSAHKTYTIDWYQQQKGKAPRYLIQVKSDGTYTKATGVPDRFSGSSSGADRYLIIPSVQADDEADYYCGTDYTGGYVFGGGTQLTVTLEIQNPDPAVYQLRDSKSSDKSVCLFTDFDSQTNVSQSKDSDVYITDKCVLDMRSMDFKSNSAVAWSNKSDFACANAFNNSIIPEDTFFPSPESSDSTDHVKPKETENTKQPSKSCHKPKAIVHTEKVNMMSLTVLGLRMLFAKTVAVNFLLTAKLFFLRAKRSGSGVKQTLNFDLLKLAGDVESNPGPTSMDWIWRILFLVGAATGAHSGPQLQLQESGPGLVKPSETLSLTCTVSGDSISSGDYYWGWIRQPPGKGLEWIGHIYYSGVTYYNPSLKSRVTISVDTSRNQFSLKLSSVTAADTAVYYCTREDSSNWRSRGQGTLVTVSSGSGGGGSGGGGSGGGGSFEEQLKESGGGLFKPTDTLTLTCTVSGFSLSYYGVNWVRQAPGNGLEWIGTIGGSGDTYYASWAKSRSTIIRNTNENTVTLKMTSLTAADTATYFCVRYANIGYEYFNVWGPGTLVTVSSTREDLKNVFPPEVAVFEPSEAEISHTQKATLVCLATGFYPDHVELSWWVNGKEVHSGVCTDPQPLKEQPALNDSRYCLSSRLRVSATFWQNPRNHFRCQVQFYGLSENDEWTQDRAKPVTQIVSAEAWGRADDVIKIHWQEKKSNTILGSQEGNTMKTNDTYMKFSWLTVPEKSLDKEHRCIVRHENNKNGVDQEIIFPPIKTDVITMDPKDNCSKDANDTLLLQLTNTSAYYMYLLLLLKSVVYFAIITCCLLRRTAFCCNGEKS

SEQ ID NO: 16301 - protein, 1005 aa, synthetic construct
MALPVTALLLPLALLLHAARPEVQLVESGGGLVQPGGSLRLSCAASGFSFSDFWMSWVRQAPGKGLEWVATISQAGSEKDYVDSVKGRFTISRDNAKKSLYLQMNSLRAEDTAVYYCASGVYSFDYRGQGTLVTVSSGTGGGGSGGGGSGGGGSEFQFVLTQSPSVSAALGASAKLTCTLSSAHKTYTIDWYQQQQGEAPRYLMQVKSDGSYTKGTGVPDRFSGSSSGADRYLIIPSVQADDEAGYVCGADDNGGYVFGGGTQLTVTLEIQNPDPAVYQLRDSKSSDKSVCLFTDFDSQTNVSQSKDSDVYITDKCVLDMRSMDFKSNSAVAWSNKSDFACANAFNNSIIPEDTFFPSPESSDSTDHVKPKETENTKQPSKSCHKPKAIVHTEKVNMMSLTVLGLRMLFAKTVAVNFLLTAKLFFLRAKRSGSGVKQTLNFDLLKLAGDVESNPGPTSMDWIWRILFLVGAATGAHSGPQLQLQESGPGLVKPSETLSLTCTVSGDSISSGDYYWGWIRQPPGKGLEWIGHIYYSGVTYYNPSLKSRVTISVDTSRNQFSLKLSSVTAADTAVYYCTREDSSNWRSRGQGTLVTVSSGSGGGGSGGGGSGGGGSFEQSVKESEGGLFKPTDTLTLTCTVSGFSLSRHALTWVRQAPGNGLEWIGAIDNAGTTYYASWAKSRSTITRNTDLHTVTLKMTSLTASDTATYFCARVFYDINSGYYLDGMDLWGPGTLVTVSSTREDLKNVFPPEVAVFEPSEAEISHTQKATLVCLATGFYPDHVELSWWVNGKEVHSGVCTDPQPLKEQPALNDSRYCLSSRLRVSATFWQNPRNHFRCQVQFYGLSENDEWTQDRAKPVTQIVSAEAWGRADDVIKIHWQEKKSNTILGSQEGNTMKTNDTYMKFSWLTVPEKSLDKEHRCIVRHENNKNGVDQEIIFPPIKTDVITMDPKDNCSKDANDTLLLQLTNTSAYYMYLLLLLKSVVYFAIITCCLLRRTAFCCNGEKS

SEQ ID NO: 16302 - protein, 999 aa, synthetic construct
MALPVTALLLPLALLLHAARPEVQLVESGGGLVQPGGSLRLSCAASGFSFSDFWMSWVRQAPGKGLEWVATISQAGSEKDYVDSVKGRFTISRDNAKKSLYLQMNSLRAEDTAVYYCASGVYSFDYRGQGTLVTVSSGTGGGGSGGGGSGGGGSEFDIQMTQSPSSLSASVGDRVTITCRASQGISSWLAWYQQKPEKAPKSLIYAASSLQSGVPSRFSGSGSGTDFTLTISSLQPEDFATYYCQQYNSYPPTFGGGTKVEIKLEIQNPDPAVYQLRDSKSSDKSVCLFTDFDSQTNVSQSKDSDVYITDKCVLDMRSMDFKSNSAVAWSNKSDFACANAFNNSIIPEDTFFPSPESSDSTDHVKPKETENTKQPSKSCHKPKAIVHTEKVNMMSLTVLGLRMLFAKTVAVNFLLTAKLFFLRAKRSGSGVKQTLNFDLLKLAGDVESNPGPTSMDWIWRILFLVGAATGAHSGPQLQLQESGPGLVKPSETLSLTCTVSGDSISSGDYYWGWIRQPPGKGLEWIGHIYYSGVTYYNPSLKSRVTISVDTSRNQFSLKLSSVTAADTAVYYCTREDSSNWRSRGQGTLVTVSSGSGGGGSGGGGSGGGGSFEEVQLVESGGGLVQPGESLRLSCVASGFTFSRYKMNWVRQAPGKGLEWVSYISRSGRDIYYADSVKGRFTISRDNAKNSLYLQMNSLRDEDTAVYYCAGTVTTYYYFGMDVWGHGTTVTVSSTREDLKNVFPPEVAVFEPSEAEISHTQKATLVCLATGFYPDHVELSWWVNGKEVHSGVCTDPQPLKEQPALNDSRYCLSSRLRVSATFWQNPRNHFRCQVQFYGLSENDEWTQDRAKPVTQIVSAEAWGRADDVIKIHWQEKKSNTILGSQEGNTMKTNDTYMKFSWLTVPEKSLDKEHRCIVRHENNKNGVDQEIIFPPIKTDVITMDPKDNCSKDANDTLLLQLTNTSAYYMYLLLLLKSVVYFAIITCCLLRRTAFCCNGEKS

SEQ ID NO: 16303 - protein, 1000 aa, synthetic construct
MALPVTALLLPLALLLHAARPEVQLVESGGGLVQPGGSLRLSCAASGFSFSDFWMSWVRQAPGKGLEWVATISQAGSEKDYVDSVKGRFTISRDNAKKSLYLQMNSLRAEDTAVYYCASGVYSFDYRGQGTLVTVSSGTGGGGSGGGGSGGGGSEFDIQMTQSPSSLSASVGDRVTITCRASQGISSWLAWYQQKPEKAPKSLIYAASSLQSGVPSRFSGSGSGTDFTLTISSLQPEDFATYYCQQYNSYPPTFGGGTKVEIKLEIQNPDPAVYQLRDSKSSDKSVCLFTDFDSQTNVSQSKDSDVYITDKCVLDMRSMDFKSNSAVAWSNKSDFACANAFNNSIIPEDTFFPSPESSDSTDHVKPKETENTKQPSKSCHKPKAIVHTEKVNMMSLTVLGLRMLFAKTVAVNFLLTAKLFFLRAKRSGSGVKQTLNFDLLKLAGDVESNPGPTSMDWIWRILFLVGAATGAHSGPQLQLQESGPGLVKPSETLSLTCTVSGDSISSGDYYWGWIRQPPGKGLEWIGHIYYSGVTYYNPSLKSRVTISVDTSRNQFSLKLSSVTAADTAVYYCTREDSSNWRSRGQGTLVTVSSGSGGGGSGGGGSGGGGSFEEVQLVESGGGSVQPGESLRLSCVASGFTFSRYKMNWVRQAPGKGLEWVSYISRSGRDIYYADSVKGRFTISRDNAKNSLYLQMNSLRDEDTAVYYCAGTVTTYYYDFGMDVWGQGTTVTVSSTREDLKNVFPPEVAVFEPSEAEISHTQKATLVCLATGFYPDHVELSWWVNGKEVHSGVCTDPQPLKEQPALNDSRYCLSSRLRVSATFWQNPRNHFRCQVQFYGLSENDEWTQDRAKPVTQIVSAEAWGRADDVIKIHWQEKKSNTILGSQEGNTMKTNDTYMKFSWLTVPEKSLDKEHRCIVRHENNKNGVDQEIIFPPIKTDVITMDPKDNCSKDANDTLLLQLTNTSAYYMYLLLLLKSVVYFAIITCCLLRRTAFCCNGEKS

SEQ ID NO: 16304 - protein, 998 aa, synthetic construct
MALPVTALLLPLALLLHAARPEVQLVESGGGLVQPGGSLRLSCAASGFSFSDFWMSWVRQAPGKGLEWVATISQAGSEKDYVDSVKGRFTISRDNAKKSLYLQMNSLRAEDTAVYYCASGVYSFDYRGQGTLVTVSSGTGGGGSGGGGSGGGGSEFQSVLTQPPSASGTPGQRVTISCSGSRSNVGGNYVFWYQQVPGATPKLLIYRSNQRPSGVPDRFAGSKSGSSASLAISGLRSEDEADYYCATWDDSLSGFVFGTGTKVTVLGLEIQNPDPAVYQLRDSKSSDKSVCLFTDFDSQTNVSQSKDSDVYITDKCVLDMRSMDFKSNSAVAWSNKSDFACANAFNNSIIPEDTFFPSPESSDSTDHVKPKETENTKQPSKSCHKPKAIVHTEKVNMMSLTVLGLRMLFAKTVAVNFLLTAKLFFLRAKRSGSGVKQTLNFDLLKLAGDVESNPGPTSMDWIWRILFLVGAATGAHSGPQLQLQESGPGLVKPSETLSLTCTVSGDSISSGDYYWGWIRQPPGKGLEWIGHIYYSGVTYYNPSLKSRVTISVDTSRNQFSLKLSSVTAADTAVYYCTREDSSNWRSRGQGTLVTVSSGSGGGGSGGGGSGGGGSFEVQLVESGGGLVKPGGSLRLSCAASGFTFSDYYMSWIRQAPGKGLEWVSYISSSGSTIYYADSVKGRFTISRDNAKNSLYLQMNSLRAEDTAVYYCARGYGKAYDQWGQGTLVTVSSTREDLKNVFPPEVAVFEPSEAEISHTQKATLVCLATGFYPDHVELSWWVNGKEVHSGVCTDPQPLKEQPALNDSRYCLSSRLRVSATFWQNPRNHFRCQVQFYGLSENDEWTQDRAKPVTQIVSAEAWGRADDVIKIHWQEKKSNTILGSQEGNTMKTNDTYMKFSWLTVPEKSLDKEHRCIVRHENNKNGVDQEIIFPPIKTDVITMDPKDNCSKDANDTLLLQLTNTSAYYMYLLLLLKSVVYFAIITCCLLRRTAFCCNGEKS

SEQ ID NO: 16305 - protein, 997 aa, synthetic construct
MALPVTALLLPLALLLHAARPEVQLVESGGGLVQPGGSLRLSCAASGFSFSDFWMSWVRQAPGKGLEWVATISQAGSEKDYVDSVKGRFTISRDNAKKSLYLQMNSLRAEDTAVYYCASGVYSFDYRGQGTLVTVSSGTGGGGSGGGGSGGGGSEFQSVVTQPPSMSAAPGQQVTISCSGGNSNIERNYVSWYLQLPGTAPKLVIFDNDRRPSGIPDRFSGSKSGTSATLGITGLQTGDEADYYCGTWDSSLRGWVFGGGTKLTVLGLEIQNPDPAVYQLRDSKSSDKSVCLFTDFDSQTNVSQSKDSDVYITDKCVLDMRSMDFKSNSAVAWSNKSDFACANAFNNSIIPEDTFFPSPESSDSTDHVKPKETENTKQPSKSCHKPKAIVHTEKVNMMSLTVLGLRMLFAKTVAVNFLLTAKLFFLRAKRSGSGVKQTLNFDLLKLAGDVESNPGPTSMDWIWRILFLVGAATGAHSGPQLQLQESGPGLVKPSETLSLTCTVSGDSISSGDYYWGWIRQPPGKGLEWIGHIYYSGVTYYNPSLKSRVTISVDTSRNQFSLKLSSVTAADTAVYYCTREDSSNWRSRGQGTLVTVSSGSGGGGSGGGGSGGGGSFEVQLVESGGGLIQPGGSLRLSCAASGFTFSNYAMNWVRQAPGKGLEWVSTINGRGSSTIYADSVKGRFTISRDNSKNTLYLQMNSLRAEDTATYYCARYISRGLGDSWGQGTLVTVTREDLKNVFPPEVAVFEPSEAEISHTQKATLVCLATGFYPDHVELSWWVNGKEVHSGVCTDPQPLKEQPALNDSRYCLSSRLRVSATFWQNPRNHFRCQVQFYGLSENDEWTQDRAKPVTQIVSAEAWGRADDVIKIHWQEKKSNTILGSQEGNTMKTNDTYMKFSWLTVPEKSLDKEHRCIVRHENNKNGVDQEIIFPPIKTDVITMDPKDNCSKDANDTLLLQLTNTSAYYMYLLLLLKSVVYFAIITCCLLRRTAFCCNGEKS

SEQ ID NO: 16306 - protein, 998 aa, synthetic construct
MALPVTALLLPLALLLHAARPEVQLVESGGGLVQPGGSLRLSCAASGFSFSDFWMSWVRQAPGKGLEWVATISQAGSEKDYVDSVKGRFTISRDNAKKSLYLQMNSLRAEDTAVYYCASGVYSFDYRGQGTLVTVSSGTGGGGSGGGGSGGGGSEFDVVMTQTPLSLPVSLGDQASISCRSSQSLVHSNGNTYLHWYLQKPGQSPKLLIYKVSNRFSGVPDRFSGSGSGTDFTLKISRVEAEDLGVYFCSQNTPVPPKFGSGTKLEIKLEIQNPDPAVYQLRDSKSSDKSVCLFTDFDSQTNVSQSKDSDVYITDKCVLDMRSMDFKSNSAVAWSNKSDFACANAFNNSIIPEDTFFPSPESSDSTDHVKPKETENTKQPSKSCHKPKAIVHTEKVNMMSLTVLGLRMLFAKTVAVNFLLTAKLFFLRAKRSGSGVKQTLNFDLLKLAGDVESNPGPTSMDWIWRILFLVGAATGAHSGPQLQLQESGPGLVKPSETLSLTCTVSGDSISSGDYYWGWIRQPPGKGLEWIGHIYYSGVTYYNPSLKSRVTISVDTSRNQFSLKLSSVTAADTAVYYCTREDSSNWRSRGQGTLVTVSSGSGGGGSGGGGSGGGGSFEQVQLQQSGAELVRPGASVKLSCKASGYTFNDYEMHWVKQTPVHGLKWIGALEPKTGDTAYSQKFKGKATLTADKSSSTAYMELRSLTSEDSAVYYCTSCYYYTYSGQGTLVTVSATREDLKNVFPPEVAVFEPSEAEISHTQKATLVCLATGFYPDHVELSWWVNGKEVHSGVCTDPQPLKEQPALNDSRYCLSSRLRVSATFWQNPRNHFRCQVQFYGLSENDEWTQDRAKPVTQIVSAEAWGRADDVIKIHWQEKKSNTILGSQEGNTMKTNDTYMKFSWLTVPEKSLDKEHRCIVRHENNKNGVDQEIIFPPIKTDVITMDPKDNCSKDANDTLLLQLTNTSAYYMYLLLLLKSVVYFAIITCCLLRRTAFCCNGEKS

SEQ ID NO: 16307 - protein, 997 aa, synthetic construct
MALPVTALLLPLALLLHAARPEVQLVESGGGLVQPGGSLRLSCAASGFSFSDFWMSWVRQAPGKGLEWVATISQAGSEKDYVDSVKGRFTISRDNAKKSLYLQMNSLRAEDTAVYYCASGVYSFDYRGQGTLVTVSSGTGGGGSGGGGSGGGGSEFDIQLTQSPSSLSASVGDRVTITCRASQGIRNDLGWYQQKPGKAPKRLIYAASSLQNGVPSRFSGSGSGTEFTLTISSLQPEDFATYYCLQHNTYPAFGQGTKVEIKRLEIQNPDPAVYQLRDSKSSDKSVCLFTDFDSQTNVSQSKDSDVYITDKCVLDMRSMDFKSNSAVAWSNKSDFACANAFNNSIIPEDTFFPSPESSDSTDHVKPKETENTKQPSKSCHKPKAIVHTEKVNMMSLTVLGLRMLFAKTVAVNFLLTAKLFFLRAKRSGSGVKQTLNFDLLKLAGDVESNPGPTSMDWIWRILFLVGAATGAHSGPQLQLQESGPGLVKPSETLSLTCTVSGDSISSGDYYWGWIRQPPGKGLEWIGHIYYSGVTYYNPSLKSRVTISVDTSRNQFSLKLSSVTAADTAVYYCTREDSSNWRSRGQGTLVTVSSGSGGGGSGGGGSGGGGSFEQVQLQESGPGLVKPSQTLSLTCTVSGGSISSFNYYWSWIRHHPGKGLEWIGYIYYSGSTYSNPSLKSRVTISVDTSKNQFSLTLSSVTAADTAVYYCARGYNWNYFDYWGQGTLVTVSSTREDLKNVFPPEVAVFEPSEAEISHTQKATLVCLATGFYPDHVELSWWVNGKEVHSGVCTDPQPLKEQPALNDSRYCLSSRLRVSATFWQNPRNHFRCQVQFYGLSENDEWTQDRAKPVTQIVSAEAWGRADDVIKIHWQEKKSNTILGSQEGNTMKTNDTYMKFSWLTVPEKSLDKEHRCIVRHENNKNGVDQEIIFPPIKTDVITMDPKDNCSKDANDTLLLQLTNTSAYYMYLLLLLKSVVYFAIITCCLLRRTAFCCNGEKS

SEQ ID NO: 16308 - protein, 999 aa, synthetic construct
MALPVTALLLPLALLLHAARPEVQLVESGGGLVQPGGSLRLSCAASGFSFSDFWMSWVRQAPGKGLEWVATISQAGSEKDYVDSVKGRFTISRDNAKKSLYLQMNSLRAEDTAVYYCASGVYSFDYRGQGTLVTVSSGTGGGGSGGGGSGGGGSEFDDIVLTQSPASLAVSLGQSVTISCRASESVEYYGTSLMQWYQQKPGQPPKLLIYATSNVESGVPARFSGSGSGTDFSLNIHPVEEDDIAMYFCQQSRKLPSTFGGGTKLEIKLEIQNPDPAVYQLRDSKSSDKSVCLFTDFDSQTNVSQSKDSDVYITDKCVLDMRSMDFKSNSAVAWSNKSDFACANAFNNSIIPEDTFFPSPESSDSTDHVKPKETENTKQPSKSCHKPKAIVHTEKVNMMSLTVLGLRMLFAKTVAVNFLLTAKLFFLRAKRSGSGVKQTLNFDLLKLAGDVESNPGPTSMDWIWRILFLVGAATGAHSGPQLQLQESGPGLVKPSETLSLTCTVSGDSISSGDYYWGWIRQPPGKGLEWIGHIYYSGVTYYNPSLKSRVTISVDTSRNQFSLKLSSVTAADTAVYYCTREDSSNWRSRGQGTLVTVSSGSGGGGSGGGGSGGGGSFEDVRLQESGPGQVKPSQTVSLTCSVTGYSITNGNHWWNWIRQVSGSKLEWIGYISSSGSTDSNPSLKSRISITRDTSKNQLFLQLNSVTTEDIATYYCARGYYFDYWGQGTTLTVSSTREDLKNVFPPEVAVFEPSEAEISHTQKATLVCLATGFYPDHVELSWWVNGKEVHSGVCTDPQPLKEQPALNDSRYCLSSRLRVSATFWQNPRNHFRCQVQFYGLSENDEWTQDRAKPVTQIVSAEAWGRADDVIKIHWQEKKSNTILGSQEGNTMKTNDTYMKFSWLTVPEKSLDKEHRCIVRHENNKNGVDQEIIFPPIKTDVITMDPKDNCSKDANDTLLLQLTNTSAYYMYLLLLLKSVVYFAIITCCLLRRTAFCCNGEKS

SEQ ID NO: 16309 - protein, 998 aa, synthetic construct
MALPVTALLLPLALLLHAARPEVQLVESGGGLVQPGGSLRLSCAASGFSFSDFWMSWVRQAPGKGLEWVATISQAGSEKDYVDSVKGRFTISRDNAKKSLYLQMNSLRAEDTAVYYCASGVYSFDYRGQGTLVTVSSGTGGGGSGGGGSGGGGSEFDIQMTQSPSSLSASVGDRVTITCRASQDVNTAVAWYQQKPGKAPKLLIYSASFLESGVPSRFSGSRSGTDFTLTISSLQPEDFATYYCQQHYTTPPTFGQTKVEIKRLEIQNPDPAVYQLRDSKSSDKSVCLFTDFDSQTNVSQSKDSDVYITDKCVLDMRSMDFKSNSAVAWSNKSDFACANAFNNSIIPEDTFFPSPESSDSTDHVKPKETENTKQPSKSCHKPKAIVHTEKVNMMSLTVLGLRMLFAKTVAVNFLLTAKLFFLRAKRSGSGVKQTLNFDLLKLAGDVESNPGPTSMDWIWRILFLVGAATGAHSGPQLQLQESGPGLVKPSETLSLTCTVSGDSISSGDYYWGWIRQPPGKGLEWIGHIYYSGVTYYNPSLKSRVTISVDTSRNQFSLKLSSVTAADTAVYYCTREDSSNWRSRGQGTLVTVSSGSGGGGSGGGGSGGGGSFEEVQLVESGGGLVQPGGSLRLSCAASGFNIKDTYIHWVRQAPGKGLEWVARIYPTNGYTRYADSVKGRFTISADTSKNTAYLQMNSLRAEDTAVYYCSRWGGDGFYAMDVWGQGTLVTVSSTREDLKNVFPPEVAVFEPSEAEISHTQKATLVCLATGFYPDHVELSWWVNGKEVHSGVCTDPQPLKEQPALNDSRYCLSSRLRVSATFWQNPRNHFRCQVQFYGLSENDEWTQDRAKPVTQIVSAEAWGRADDVIKIHWQEKKSNTILGSQEGNTMKTNDTYMKFSWLTVPEKSLDKEHRCIVRHENNKNGVDQEIIFPPIKTDVITMDPKDNCSKDANDTLLLQLTNTSAYYMYLLLLLKSVVYFAIITCCLLRRTAFCCNGEKS

SEQ ID NO: 16310 - protein, 997 aa, synthetic construct
MALPVTALLLPLALLLHAARPEVQLVESGGGLVQPGGSLRLSCAASGFSFSDFWMSWVRQAPGKGLEWVATISQAGSEKDYVDSVKGRFTISRDNAKKSLYLQMNSLRAEDTAVYYCASGVYSFDYRGQGTLVTVSSGTGGGGSGGGGSGGGGSEFDQSVLTQPPSVSVAPGKTARIPCEGNYIGSSNVHWYQQKPGQAPVLVIHFDSDRPSGIPDRFSGSNSGNMATLTISRVEAGDEADYYCQVWENHGWVFGGGTKLTVLSLEIQNPDPAVYQLRDSKSSDKSVCLFTDFDSQTNVSQSKDSDVYITDKCVLDMRSMDFKSNSAVAWSNKSDFACANAFNNSIIPEDTFFPSPESSDSTDHVKPKETENTKQPSKSCHKPKAIVHTEKVNMMSLTVLGLRMLFAKTVAVNFLLTAKLFFLRAKRSGSGVKQTLNFDLLKLAGDVESNPGPTSMDWIWRILFLVGAATGAHSGPQLQLQESGPGLVKPSETLSLTCTVSGDSISSGDYYWGWIRQPPGKGLEWIGHIYYSGVTYYNPSLKSRVTISVDTSRNQFSLKLSSVTAADTAVYYCTREDSSNWRSRGQGTLVTVSSGSGGGGSGGGGSGGGGSFEEVQLVETGGGLVQPGESLRLSCAASGFTFSDYEMNWVRQAPGKGLEWVSYISSSGSTIYYADSVKGRFTIYRDNAKNSLYLQMNSLRAEDTALYYCARAWGVGPPDYWGQGTLVTVSSTREDLKNVFPPEVAVFEPSEAEISHTQKATLVCLATGFYPDHVELSWWVNGKEVHSGVCTDPQPLKEQPALNDSRYCLSSRLRVSATFWQNPRNHFRCQVQFYGLSENDEWTQDRAKPVTQIVSAEAWGRADDVIKIHWQEKKSNTILGSQEGNTMKTNDTYMKFSWLTVPEKSLDKEHRCIVRHENNKNGVDQEIIFPPIKTDVITMDPKDNCSKDANDTLLLQLTNTSAYYMYLLLLLKSVVYFAIITCCLLRRTAFCCNGEKS

SEQ ID NO: 16311 - protein, 1005 aa, synthetic construct
MALPVTALLLPLALLLHAARPEVQLVESGGGLVQPGGSLRLSCAASGFSFSDFWMSWVRQAPGKGLEWVATISQAGSEKDYVDSVKGRFTISRDNAKKSLYLQMNSLRAEDTAVYYCASGVYSFDYRGQGTLVTVSSGTGGGGSGGGGSGGGGSEFDIQMTQSPSSLSASVGDTVTITCQANGYLNWYQQRRGKAPKLLIYDGSKLERGVPSRFSGRRWGQEYNLTINNLQPEDIATYFCQVYEFVVPGTRLDLKRTVAAPLEIQNPDPAVYQLRDSKSSDKSVCLFTDFDSQTNVSQSKDSDVYITDKCVLDMRSMDFKSNSAVAWSNKSDFACANAFNNSIIPEDTFFPSPESSDSTDHVKPKETENTKQPSKSCHKPKAIVHTEKVNMMSLTVLGLRMLFAKTVAVNFLLTAKLFFLRAKRSGSGVKQTLNFDLLKLAGDVESNPGPTSMDWIWRILFLVGAATGAHSGPQLQLQESGPGLVKPSETLSLTCTVSGDSISSGDYYWGWIRQPPGKGLEWIGHIYYSGVTYYNPSLKSRVTISVDTSRNQFSLKLSSVTAADTAVYYCTREDSSNWRSRGQGTLVTVSSGSGGGGSGGGGSGGGGSFEQVQLLQSGAAVTKPGASVRVSCEASGYNIRDYFIHWWRQAPGQGLQWVGWINPKTGQPNNPRQFQGRVSLTRHASWDFDTFSFYMDLKALRSDDTAVYFCARQRSDYWDFDVWGSGTQVTVSSASTKGPTREDLKNVFPPEVAVFEPSEAEISHTQKATLVCLATGFYPDHVELSWWVNGKEVHSGVCTDPQPLKEQPALNDSRYCLSSRLRVSATFWQNPRNHFRCQVQFYGLSENDEWTQDRAKPVTQIVSAEAWGRADDVIKIHWQEKKSNTILGSQEGNTMKTNDTYMKFSWLTVPEKSLDKEHRCIVRHENNKNGVDQEIIFPPIKTDVITMDPKDNCSKDANDTLLLQLTNTSAYYMYLLLLLKSVVYFAIITCCLLRRTAFCCNGEKS

SEQ ID NO: 16312 - protein, 1011 aa, synthetic construct
MALPVTALLLPLALLLHAARPEVQLVESGGGLVQPGGSLRLSCAASGFSFSDFWMSWVRQAPGKGLEWVATISQAGSEKDYVDSVKGRFTISRDNAKKSLYLQMNSLRAEDTAVYYCASGVYSFDYRGQGTLVTVSSGTGGGGSGGGGSGGGGSEFQSALTQPPSASGSPGQSITISCTGTSNNFVSWYQQHAGKAPKLVIYDVNKRPSGVPDRFSGSKSGNTASLTVSGLQTDDEAVYYCGSLVGNWDVIFGGGTKLTVLLEIQNPDPAVYQLRDSKSSDKSVCLFTDFDSQTNVSQSKDSDVYITDKCVLDMRSMDFKSNSAVAWSNKSDFACANAFNNSIIPEDTFFPSPESSDSTDHVKPKETENTKQPSKSCHKPKAIVHTEKVNMMSLTVLGLRMLFAKTVAVNFLLTAKLFFLRAKRSGSGVKQTLNFDLLKLAGDVESNPGPTSMDWIWRILFLVGAATGAHSGPQLQLQESGPGLVKPSETLSLTCTVSGDSISSGDYYWGWIRQPPGKGLEWIGHIYYSGVTYYNPSLKSRVTISVDTSRNQFSLKLSSVTAADTAVYYCTREDSSNWRSRGQGTLVTVSSGSGGGGSGGGGSGGGGSFEQPQLQESGPTLVEASETLSLTCAVSGDSTAACNSFWGWVRQPPGKGLEWVGSLSHCASYWNRGWTYHNPSLKSRLTLALDTPKNLVFLKLNSVTAADTATYYCARFGGEVLRYTDWPKPAWVDLWGRGTLVTVSSTREDLKNVFPPEVAVFEPSEAEISHTQKATLVCLATGFYPDHVELSWWVNGKEVHSGVCTDPQPLKEQPALNDSRYCLSSRLRVSATFWQNPRNHFRCQVQFYGLSENDEWTQDRAKPVTQIVSAEAWGRADDVIKIHWQEKKSNTILGSQEGNTMKTNDTYMKFSWLTVPEKSLDKEHRCIVRHENNKNGVDQEIIFPPIKTDVITMDPKDNCSKDANDTLLLQLTNTSAYYMYLLLLLKSVVYFAIITCCLLRRTAFCCNGEKS

SEQ ID NO: 16313 - protein, 996 aa, synthetic construct
MALPVTALLLPLALLLHAARPEVQLVESGGGLVQPGGSLRLSCAASGFSFSDFWMSWVRQAPGKGLEWVATISQAGSEKDYVDSVKGRFTISRDNAKKSLYLQMNSLRAEDTAVYYCASGVYSFDYRGQGTLVTVSSGTGGGGSGGGGSGGGGSEFEIVLTQSPGTLSLSPGETAIISCRTSQYGSLAWYQQRPGQAPRLVIYSGSTRAAGIPDRFSGSRWGPDYNLTISNLESGDFGVYYCQQYEFFGQGTKVQVDIKRLEIQNPDPAVYQLRDSKSSDKSVCLFTDFDSQTNVSQSKDSDVYITDKCVLDMRSMDFKSNSAVAWSNKSDFACANAFNNSIIPEDTFFPSPESSDSTDHVKPKETENTKQPSKSCHKPKAIVHTEKVNMMSLTVLGLRMLFAKTVAVNFLLTAKLFFLRAKRSGSGVKQTLNFDLLKLAGDVESNPGPTSMDWIWRILFLVGAATGAHSGPQLQLQESGPGLVKPSETLSLTCTVSGDSISSGDYYWGWIRQPPGKGLEWIGHIYYSGVTYYNPSLKSRVTISVDTSRNQFSLKLSSVTAADTAVYYCTREDSSNWRSRGQGTLVTVSSGSGGGGSGGGGSGGGGSFEQVQLVQSGGQMKKPGESMRISCRASGYEFIDCTLNWIRLAPGKRPEWMGWLKPRGGAVNYARPLQGRVTMTRDVYSDTAFLELRSLTVDDTAVYFCTRGKNCDYNWDFEHWGRGTPVIVSSTREDLKNVFPPEVAVFEPSEAEISHTQKATLVCLATGFYPDHVELSWWVNGKEVHSGVCTDPQPLKEQPALNDSRYCLSSRLRVSATFWQNPRNHFRCQVQFYGLSENDEWTQDRAKPVTQIVSAEAWGRADDVIKIHWQEKKSNTILGSQEGNTMKTNDTYMKFSWLTVPEKSLDKEHRCIVRHENNKNGVDQEIIFPPIKTDVITMDPKDNCSKDANDTLLLQLTNTSAYYMYLLLLLKSVVYFAIITCCLLRRTAFCCNGEKS

SEQ ID NO: 16314 - protein, 1006 aa, synthetic construct
MALPVTALLLPLALLLHAARPEVQLVESGGGLVQPGGSLRLSCAASGFSFSDFWMSWVRQAPGKGLEWVATISQAGSEKDYVDSVKGRFTISRDNAKKSLYLQMNSLRAEDTAVYYCASGVYSFDYRGQGTLVTVSSGTGGGGSGGGGSGGGGSEFELVLTQSPGTLSLSAGERATLSCRASQSVSSGSLAWYQQKPGQAPRLLIYGASTRATGIPDRFSGSGSGTDFTLTIGRLEPEDLAVYYCQQYGTSPYTFGQGTKLEILEIQNPDPAVYQLRDSKSSDKSVCLFTDFDSQTNVSQSKDSDVYITDKCVLDMRSMDFKSNSAVAWSNKSDFACANAFNNSIIPEDTFFPSPESSDSTDHVKPKETENTKQPSKSCHKPKAIVHTEKVNMMSLTVLGLRMLFAKTVAVNFLLTAKLFFLRAKRSGSGVKQTLNFDLLKLAGDVESNPGPTSMDWIWRILFLVGAATGAHSGPQLQLQESGPGLVKPSETLSLTCTVSGDSISSGDYYWGWIRQPPGKGLEWIGHIYYSGVTYYNPSLKSRVTISVDTSRNQFSLKLSSVTAADTAVYYCTREDSSNWRSRGQGTLVTVSSGSGGGGSGGGGSGGGGSFELEQSGAEVKKPGSSVQVSCKASGGTFSMYGFNWVRQAPGHGLEWMGGIIPIFGTSNYAQKFRGRVTFTADQATSTAYMELTNLRSDDTAVYYCARDFGPDWEDGDSYDGSGRGFFDFWGQGTLVTVSSTREDLKNVFPPEVAVFEPSEAEISHTQKATLVCLATGFYPDHVELSWWVNGKEVHSGVCTDPQPLKEQPALNDSRYCLSSRLRVSATFWQNPRNHFRCQVQFYGLSENDEWTQDRAKPVTQIVSAEAWGRADDVIKIHWQEKKSNTILGSQEGNTMKTNDTYMKFSWLTVPEKSLDKEHRCIVRHENNKNGVDQEIIFPPIKTDVITMDPKDNCSKDANDTLLLQLTNTSAYYMYLLLLLKSVVYFAIITCCLLRRTAFCCNGEKS

SEQ ID NO: 16315 - protein, 986 aa, synthetic construct
MALPVTALLLPLALLLHAARPEVQLVESGGGLVQPGGSLRLSCAASGFSFSDFWMSWVRQAPGKGLEWVATISQAGSEKDYVDSVKGRFTISRDNAKKSLYLQMNSLRAEDTAVYYCASGVYSFDYRGQGTLVTVSSGTGGGGSGGGGSGGGGSEFDIQMTQSPSSLSASVGDRVTITCQASQDINNYLNWYQQKPGKAPKLLIYDASNLQTGVPSRFSGSGSGTDFTFTIEDIATYYCQQYTFGPGTKVDIKLEIQNPDPAVYQLRDSKSSDKSVCLFTDFDSQTNVSQSKDSDVYITDKCVLDMRSMDFKSNSAVAWSNKSDFACANAFNNSIIPEDTFFPSPESSDSTDHVKPKETENTKQPSKSCHKPKAIVHTEKVNMMSLTVLGLRMLFAKTVAVNFLLTAKLFFLRAKRSGSGVKQTLNFDLLKLAGDVESNPGPTSMDWIWRILFLVGAATGAHSGPQLQLQESGPGLVKPSETLSLTCTVSGDSISSGDYYWGWIRQPPGKGLEWIGHIYYSGVTYYNPSLKSRVTISVDTSRNQFSLKLSSVTAADTAVYYCTREDSSNWRSRGQGTLVTVSSGSGGGGSGGGGSGGGGSFEEVQLLESGGGLVQPGGSLRLSCAASGFTFSWYSMTWVRQAPGKGLEWVSSIVPWGDFTQYADSVKGRFTISRDNSKNTLYLQMNSLRAEDTAVYYCAKGPGWGSFDLWGRGTLVTVSSTREDLKNVFPPEVAVFEPSEAEISHTQKATLVCLATGFYPDHVELSWWVNGKEVHSGVCTDPQPLKEQPALNDSRYCLSSRLRVSATFWQNPRNHFRCQVQFYGLSENDEWTQDRAKPVTQIVSAEAWGRADDVIKIHWQEKKSNTILGSQEGNTMKTNDTYMKFSWLTVPEKSLDKEHRCIVRHENNKNGVDQEIIFPPIKTDVITMDPKDNCSKDANDTLLLQLTNTSAYYMYLLLLLKSVVYFAIITCCLLRRTAFCCNGEKS

SEQ ID NO: 16316 - protein, 996 aa, synthetic construct
MALPVTALLLPLALLLHAARPEVQLVESGGGLVQPGGSLRLSCAASGFSFSDFWMSWVRQAPGKGLEWVATISQAGSEKDYVDSVKGRFTISRDNAKKSLYLQMNSLRAEDTAVYYCASGVYSFDYRGQGTLVTVSSGTGGGGSGGGGSGGGGSEFDIQMTQSPSSLSASVGDRVTITCTASLSVSSTYLHWYQQKPGSSPKLWIYSTSNLASGVPSRFSGSGSGTSYTLTISSLQPEDFATYYCHQYHRSPLTFGGGTKVEIKRLEIQNPDPAVYQLRDSKSSDKSVCLFTDFDSQTNVSQSKDSDVYITDKCVLDMRSMDFKSNSAVAWSNKSDFACANAFNNSIIPEDTFFPSPESSDSTDHVKPKETENTKQPSKSCHKPKAIVHTEKVNMMSLTVLGLRMLFAKTVAVNFLLTAKLFFLRAKRSGSGVKQTLNFDLLKLAGDVESNPGPTSMDWIWRILFLVGAATGAHSGPQLQLQESGPGLVKPSETLSLTCTVSGDSISSGDYYWGWIRQPPGKGLEWIGHIYYSGVTYYNPSLKSRVTISVDTSRNQFSLKLSSVTAADTAVYYCTREDSSNWRSRGQGTLVTVSSGSGGGGSGGGGSGGGGSFEEVQLVESGGGLVQPGGSLRLSCAASGFSLTKYGVHWVRQAPGKGLEWVGVKWAGGSTDYNSALMSRFTISKDNAKNSLYLQMNSLRAEDTAVYYCARDHRDAMDYWGQGTLVTVSSTREDLKNVFPPEVAVFEPSEAEISHTQKATLVCLATGFYPDHVELSWWVNGKEVHSGVCTDPQPLKEQPALNDSRYCLSSRLRVSATFWQNPRNHFRCQVQFYGLSENDEWTQDRAKPVTQIVSAEAWGRADDVIKIHWQEKKSNTILGSQEGNTMKTNDTYMKFSWLTVPEKSLDKEHRCIVRHENNKNGVDQEIIFPPIKTDVITMDPKDNCSKDANDTLLLQLTNTSAYYMYLLLLLKSVVYFAIITCCLLRRTAFCCNGEKS

SEQ ID NO: 16317 - protein, 1000 aa, synthetic construct
MALPVTALLLPLALLLHAARPEVQLVESGGGLVQPGGSLRLSCAASGFSFSDFWMSWVRQAPGKGLEWVATISQAGSEKDYVDSVKGRFTISRDNAKKSLYLQMNSLRAEDTAVYYCASGVYSFDYRGQGTLVTVSSGTGGGGSGGGGSGGGGSEFDIQMTQSPSSLSASVGDRVTITCKASQDVGTAVAWYQQKPGKAPKLLIYSASYRSTGVPSRFSGSGSGTDFTLTISSLQPEDFATYYCQHHYSAPWTFGGGTKVEIKLEIQNPDPAVYQLRDSKSSDKSVCLFTDFDSQTNVSQSKDSDVYITDKCVLDMRSMDFKSNSAVAWSNKSDFACANAFNNSIIPEDTFFPSPESSDSTDHVKPKETENTKQPSKSCHKPKAIVHTEKVNMMSLTVLGLRMLFAKTVAVNFLLTAKLFFLRAKRSGSGVKQTLNFDLLKLAGDVESNPGPTSMDWIWRILFLVGAATGAHSGPQLQLQESGPGLVKPSETLSLTCTVSGDSISSGDYYWGWIRQPPGKGLEWIGHIYYSGVTYYNPSLKSRVTISVDTSRNQFSLKLSSVTAADTAVYYCTREDSSNWRSRGQGTLVTVSSGSGGGGSGGGGSGGGGSFEEVQLVESGGGLVQPGGSLRLSCAASGFTFSRNGMSWVRQAPGKGLEWVATVSSGGSYIYYADSVKGRFTISRDNAKNSLYLQMNSLRAEDTAVYYCARQGTTALATRFFDVWGQGTLVTVSSTREDLKNVFPPEVAVFEPSEAEISHTQKATLVCLATGFYPDHVELSWWVNGKEVHSGVCTDPQPLKEQPALNDSRYCLSSRLRVSATFWQNPRNHFRCQVQFYGLSENDEWTQDRAKPVTQIVSAEAWGRADDVIKIHWQEKKSNTILGSQEGNTMKTNDTYMKFSWLTVPEKSLDKEHRCIVRHENNKNGVDQEIIFPPIKTDVITMDPKDNCSKDANDTLLLQLTNTSAYYMYLLLLLKSVVYFAIITCCLLRRTAFCCNGEKS

SEQ ID NO: 16318 - protein, 996 aa, synthetic construct
MALPVTALLLPLALLLHAARPEVQLVESGGGLVQPGGSLRLSCAASGFSFSDFWMSWVRQAPGKGLEWVATISQAGSEKDYVDSVKGRFTISRDNAKKSLYLQMNSLRAEDTAVYYCASGVYSFDYRGQGTLVTVSSGTGGGGSGGGGSGGGGSEFDIQMTQSPPSLSASVGGKVTITCKASQDIDRYMAWYQDKPGKGPKLLIHDTSTLQPGIPSRFSGSGSGRDYSFSISNLEPEDIATYYCLQYDNLWTFGGGTKLEIKRLEIQNPDPAVYQLRDSKSSDKSVCLFTDFDSQTNVSQSKDSDVYITDKCVLDMRSMDFKSNSAVAWSNKSDFACANAFNNSIIPEDTFFPSPESSDSTDHVKPKETENTKQPSKSCHKPKAIVHTEKVNMMSLTVLGLRMLFAKTVAVNFLLTAKLFFLRAKRSGSGVKQTLNFDLLKLAGDVESNPGPTSMDWIWRILFLVGAATGAHSGPQLQLQESGPGLVKPSETLSLTCTVSGDSISSGDYYWGWIRQPPGKGLEWIGHIYYSGVTYYNPSLKSRVTISVDTSRNQFSLKLSSVTAADTAVYYCTREDSSNWRSRGQGTLVTVSSGSGGGGSGGGGSGGGGSFEQVQLVQSGAELVKPGASVKMSCKASGYIFTNYNIHWVKKSPGQGLEWIGAIYPGNGDAPYSQKFQDRATLTADTSSSTTYMELSSLTSEDSAVYYCVRANWDVAFAYWGQGTLVSVSSTREDLKNVFPPEVAVFEPSEAEISHTQKATLVCLATGFYPDHVELSWWVNGKEVHSGVCTDPQPLKEQPALNDSRYCLSSRLRVSATFWQNPRNHFRCQVQFYGLSENDEWTQDRAKPVTQIVSAEAWGRADDVIKIHWQEKKSNTILGSQEGNTMKTNDTYMKFSWLTVPEKSLDKEHRCIVRHENNKNGVDQEIIFPPIKTDVITMDPKDNCSKDANDTLLLQLTNTSAYYMYLLLLLKSVVYFAIITCCLLRRTAFCCNGEKS

SEQ ID NO: 16319 - protein, 997 aa, synthetic construct
MALPVTALLLPLALLLHAARPEVQLVESGGGLVQPGGSLRLSCAASGFSFSDFWMSWVRQAPGKGLEWVATISQAGSEKDYVDSVKGRFTISRDNAKKSLYLQMNSLRAEDTAVYYCASGVYSFDYRGQGTLVTVSSGTGGGGSGGGGSGGGGSEFDIQMTQSPASLSASVGETVTITCRVSGNIHNYLAWYQQKQGKSPQLLVYNAKTLADGVPSRFSGSGSGTQYSLKINSLQPEDFGSYYCQHFWSNPYTFGGGTKLEIKLEIQNPDPAVYQLRDSKSSDKSVCLFTDFDSQTNVSQSKDSDVYITDKCVLDMRSMDFKSNSAVAWSNKSDFACANAFNNSIIPEDTFFPSPESSDSTDHVKPKETENTKQPSKSCHKPKAIVHTEKVNMMSLTVLGLRMLFAKTVAVNFLLTAKLFFLRAKRSGSGVKQTLNFDLLKLAGDVESNPGPTSMDWIWRILFLVGAATGAHSGPQLQLQESGPGLVKPSETLSLTCTVSGDSISSGDYYWGWIRQPPGKGLEWIGHIYYSGVTYYNPSLKSRVTISVDTSRNQFSLKLSSVTAADTAVYYCTREDSSNWRSRGQGTLVTVSSGSGGGGSGGGGSGGGGSFEQVQLQQSGASVKVSCKASELVRPGTGYAFTNYLIEWVKQRPGQGLEWIGVINPGSGGTNYNEKFKGKATLTADKSSSTAYMQLSSLTSDDSAVYFCARYRSYDWYFDVWGAGTTVTVSSTREDLKNVFPPEVAVFEPSEAEISHTQKATLVCLATGFYPDHVELSWWVNGKEVHSGVCTDPQPLKEQPALNDSRYCLSSRLRVSATFWQNPRNHFRCQVQFYGLSENDEWTQDRAKPVTQIVSAEAWGRADDVIKIHWQEKKSNTILGSQEGNTMKTNDTYMKFSWLTVPEKSLDKEHRCIVRHENNKNGVDQEIIFPPIKTDVITMDPKDNCSKDANDTLLLQLTNTSAYYMYLLLLLKSVVYFAIITCCLLRRTAFCCNGEKS

SEQ ID NO: 16320 - protein, 996 aa, synthetic construct
MALPVTALLLPLALLLHAARPEVQLVESGGGLVQPGGSLRLSCAASGFSFSDFWMSWVRQAPGKGLEWVATISQAGSEKDYVDSVKGRFTISRDNAKKSLYLQMNSLRAEDTAVYYCASGVYSFDYRGQGTLVTVSSGTGGGGSGGGGSGGGGSEFDIQMTQSFSSLSASVGDRVTITCRASQDISNYLNWYQQKPGKAPKLLIYYTSRLHSGVPSRFSGSGSGTDYTLTISSLQPEDFATYFCQQGNTLPWTFGGGTKLEIKRLEIQNPDPAVYQLRDSKSSDKSVCLFTDFDSQTNVSQSKDSDVYITDKCVLDMRSMDFKSNSAVAWSNKSDFACANAFNNSIIPEDTFFPSPESSDSTDHVKPKETENTKQPSKSCHKPKAIVHTEKVNMMSLTVLGLRMLFAKTVAVNFLLTAKLFFLRAKRSGSGVKQTLNFDLLKLAGDVESNPGPTSMDWIWRILFLVGAATGAHSGPQLQLQESGPGLVKPSETLSLTCTVSGDSISSGDYYWGWIRQPPGKGLEWIGHIYYSGVTYYNPSLKSRVTISVDTSRNQFSLKLSSVTAADTAVYYCTREDSSNWRSRGQGTLVTVSSGSGGGGSGGGGSGGGGSFEEVQLVQSGGGLVQSGGSLRLSCRASGYTFTRYWMLWVRQRPGKGLEWVAEINPRNDRTNYNEKFKTRFTISVDRSKNTLYLQMDSLRAEDTAVYFCALGGGYAMDYWGQGTLVTVSSTREDLKNVFPPEVAVFEPSEAEISHTQKATLVCLATGFYPDHVELSWWVNGKEVHSGVCTDPQPLKEQPALNDSRYCLSSRLRVSATFWQNPRNHFRCQVQFYGLSENDEWTQDRAKPVTQIVSAEAWGRADDVIKIHWQEKKSNTILGSQEGNTMKTNDTYMKFSWLTVPEKSLDKEHRCIVRHENNKNGVDQEIIFPPIKTDVITMDPKDNCSKDANDTLLLQLTNTSAYYMYLLLLLKSVVYFAIITCCLLRRTAFCCNGEKS

SEQ ID NO: 16321 - protein, 997 aa, synthetic construct
MALPVTALLLPLALLLHAARPEVQLVESGGGLVQPGGSLRLSCAASGFSFSDFWMSWVRQAPGKGLEWVATISQAGSEKDYVDSVKGRFTISRDNAKKSLYLQMNSLRAEDTAVYYCASGVYSFDYRGQGTLVTVSSGTGGGGSGGGGSGGGGSEFDIQMTQSPASLSASVGETVTIICRASVNIYSYLAWYQQKQGKSPQLLVYNAKILAEGVPSRFSGSGSGTQFSLKINSLQPEDFGSYYCQHHYGTFTFGSGTKLEIKRLEIQNPDPAVYQLRDSKSSDKSVCLFTDFDSQTNVSQSKDSDVYITDKCVLDMRSMDFKSNSAVAWSNKSDFACANAFNNSIIPEDTFFPSPESSDSTDHVKPKETENTKQPSKSCHKPKAIVHTEKVNMMSLTVLGLRMLFAKTVAVNFLLTAKLFFLRAKRSGSGVKQTLNFDLLKLAGDVESNPGPTSMDWIWRILFLVGAATGAHSGPQLQLQESGPGLVKPSETLSLTCTVSGDSISSGDYYWGWIRQPPGKGLEWIGHIYYSGVTYYNPSLKSRVTISVDTSRNQFSLKLSSVTAADTAVYYCTREDSSNWRSRGQGTLVTVSSGSGGGGSGGGGSGGGGSFEQVQLKESGPGLVAPSQSLSITCTISGFSLTSYGVHWVRQPPGKGLEWLVVIWSDGSTTYNSALKSRLSISKDNSKSQVFLKMNSLQTDDTAIYYCASHYGSTLAFASWGHGTLVTVSAATREDLKNVFPPEVAVFEPSEAEISHTQKATLVCLATGFYPDHVELSWWVNGKEVHSGVCTDPQPLKEQPALNDSRYCLSSRLRVSATFWQNPRNHFRCQVQFYGLSENDEWTQDRAKPVTQIVSAEAWGRADDVIKIHWQEKKSNTILGSQEGNTMKTNDTYMKFSWLTVPEKSLDKEHRCIVRHENNKNGVDQEIIFPPIKTDVITMDPKDNCSKDANDTLLLQLTNTSAYYMYLLLLLKSVVYFAIITCCLLRRTAFCCNGEKS

SEQ ID NO: 16322 - protein, 1005 aa, synthetic construct
MALPVTALLLPLALLLHAARPEVQLVESGGGLVQPGGSLRLSCAASGFSFSDFWMSWVRQAPGKGLEWVATISQAGSEKDYVDSVKGRFTISRDNAKKSLYLQMNSLRAEDTAVYYCASGVYSFDYRGQGTLVTVSSGTGGGGSGGGGSGGGGSEFDIVMTQSHKFMSTSVGDRVSVTCKASQNVGNNVAWYQQKPGQSPKVLIYSASYRYSGVPDRFTGSGSGTDFTLTISNVQSEDLAEYFCQQYNTYPFTFGSGTKLEIKLEIQNPDPAVYQLRDSKSSDKSVCLFTDFDSQTNVSQSKDSDVYITDKCVLDMRSMDFKSNSAVAWSNKSDFACANAFNNSIIPEDTFFPSPESSDSTDHVKPKETENTKQPSKSCHKPKAIVHTEKVNMMSLTVLGLRMLFAKTVAVNFLLTAKLFFLRAKRSGSGVKQTLNFDLLKLAGDVESNPGPTSMDWIWRILFLVGAATGAHSGPQLQLQESGPGLVKPSETLSLTCTVSGDSISSGDYYWGWIRQPPGKGLEWIGHIYYSGVTYYNPSLKSRVTISVDTSRNQFSLKLSSVTAADTAVYYCTREDSSNWRSRGQGTLVTVSSGSGGGGSGGGGSGGGGSFEEVQLEESGGGLVQPGGSMKLSCVASGFTFSNYWMNWVRQSPEKGLEWVAEIRFKSHNYATHFAESVKGRFTISRDDSKSSVYLQMNNLRAEDTGIYYCTRRIGNSDYDWWYFDVWGAGTSVTVSSASTREDLKNVFPPEVAVFEPSEAEISHTQKATLVCLATGFYPDHVELSWWVNGKEVHSGVCTDPQPLKEQPALNDSRYCLSSRLRVSATFWQNPRNHFRCQVQFYGLSENDEWTQDRAKPVTQIVSAEAWGRADDVIKIHWQEKKSNTILGSQEGNTMKTNDTYMKFSWLTVPEKSLDKEHRCIVRHENNKNGVDQEIIFPPIKTDVITMDPKDNCSKDANDTLLLQLTNTSAYYMYLLLLLKSVVYFAIITCCLLRRTAFCCNGEKS

SEQ ID NO: 16323 - protein, 998 aa, synthetic construct
MALPVTALLLPLALLLHAARPEVQLVESGGGLVQPGGSLRLSCAASGFSFSDFWMSWVRQAPGKGLEWVATISQAGSEKDYVDSVKGRFTISRDNAKKSLYLQMNSLRAEDTAVYYCASGVYSFDYRGQGTLVTVSSGTGGGGSGGGGSGGGGSEFDQIVLTQSPAIMSASPGEKVTISCSASSSVSYMYWYQQKPGSSPKPWIYRTSNLASGVPARFSGSGSGTSYSLTISNMEAEDAAAYYCQQYHSYPTTFGGGTKLEVKLEIQNPDPAVYQLRDSKSSDKSVCLFTDFDSQTNVSQSKDSDVYITDKCVLDMRSMDFKSNSAVAWSNKSDFACANAFNNSIIPEDTFFPSPESSDSTDHVKPKETENTKQPSKSCHKPKAIVHTEKVNMMSLTVLGLRMLFAKTVAVNFLLTAKLFFLRAKRSGSGVKQTLNFDLLKLAGDVESNPGPTSMDWIWRILFLVGAATGAHSGPQLQLQESGPGLVKPSETLSLTCTVSGDSISSGDYYWGWIRQPPGKGLEWIGHIYYSGVTYYNPSLKSRVTISVDTSRNQFSLKLSSVTAADTAVYYCTREDSSNWRSRGQGTLVTVSSGSGGGGSGGGGSGGGGSFEEVQLVESGGGLVQPKGSLKLSCAASGFSFNTYAMNWVRQAPGKGLEWIAHIRSKSNNFATYYADSVKDRFSISRDASENILFLQMNNLKTEDTAMYYCVRQGGDFPMDYWGQGTSVTVSSTREDLKNVFPPEVAVFEPSEAEISHTQKATLVCLATGFYPDHVELSWWVNGKEVHSGVCTDPQPLKEQPALNDSRYCLSSRLRVSATFWQNPRNHFRCQVQFYGLSENDEWTQDRAKPVTQIVSAEAWGRADDVIKIHWQEKKSNTILGSQEGNTMKTNDTYMKFSWLTVPEKSLDKEHRCIVRHENNKNGVDQEIIFPPIKTDVITMDPKDNCSKDANDTLLLQLTNTSAYYMYLLLLLKSVVYFAIITCCLLRRTAFCCNGEKS

SEQ ID NO: 16324 - protein, 997 aa, synthetic construct
MALPVTALLLPLALLLHAARPEVQLVESGGGLVQPGGSLRLSCAASGFSFSDFWMSWVRQAPGKGLEWVATISQAGSEKDYVDSVKGRFTISRDNAKKSLYLQMNSLRAEDTAVYYCASGVYSFDYRGQGTLVTVSSGTGGGGSGGGGSGGGGSEFDDIQMTQSSSSFSVSLGDRVTITCMASEDIYIRLAWYQQKPGNAPRLLISAATSLETGVPSRFSGSGSGKDYTLSITSLQTEDVGTYYCQQYWSSPWTFGGGTKLEINLEIQNPDPAVYQLRDSKSSDKSVCLFTDFDSQTNVSQSKDSDVYITDKCVLDMRSMDFKSNSAVAWSNKSDFACANAFNNSIIPEDTFFPSPESSDSTDHVKPKETENTKQPSKSCHKPKAIVHTEKVNMMSLTVLGLRMLFAKTVAVNFLLTAKLFFLRAKRSGSGVKQTLNFDLLKLAGDVESNPGPTSMDWIWRILFLVGAATGAHSGPQLQLQESGPGLVKPSETLSLTCTVSGDSISSGDYYWGWIRQPPGKGLEWIGHIYYSGVTYYNPSLKSRVTISVDTSRNQFSLKLSSVTAADTAVYYCTREDSSNWRSRGQGTLVTVSSGSGGGGSGGGGSGGGGSFEDVQLQESGPGLVKPSQSLSLTCTVTGYSITSDYTWNWIRQFPGNKLEWMGYITYSGSTSYNPSLKSRNSITRDTSKNQFFLQLNSVTTEDTATYYCARLGRRYTMDYWGQGTSVTVSSTREDLKNVFPPEVAVFEPSEAEISHTQKATLVCLATGFYPDHVELSWWVNGKEVHSGVCTDPQPLKEQPALNDSRYCLSSRLRVSATFWQNPRNHFRCQVQFYGLSENDEWTQDRAKPVTQIVSAEAWGRADDVIKIHWQEKKSNTILGSQEGNTMKTNDTYMKFSWLTVPEKSLDKEHRCIVRHENNKNGVDQEIIFPPIKTDVITMDPKDNCSKDANDTLLLQLTNTSAYYMYLLLLLKSVVYFAIITCCLLRRTAFCCNGEKS

SEQ ID NO: 16325 - protein, 1000 aa, synthetic construct
MALPVTALLLPLALLLHAARPEVQLVESGGGLVQPGGSLRLSCAASGFSFSDFWMSWVRQAPGKGLEWVATISQAGSEKDYVDSVKGRFTISRDNAKKSLYLQMNSLRAEDTAVYYCASGVYSFDYRGQGTLVTVSSGTGGGGSGGGGSGGGGSEFDDIQMTQSPSSLSASVGDRVTITCRASQSISSYLNWYQQKPGKAPKLLIYDASNLETGVPSRFSGSGSGTDFTFTISSLQPEDIATYYCQQYDNLPLTFGGGTKVDIKRLEIQNPDPAVYQLRDSKSSDKSVCLFTDFDSQTNVSQSKDSDVYITDKCVLDMRSMDFKSNSAVAWSNKSDFACANAFNNSIIPEDTFFPSPESSDSTDHVKPKETENTKQPSKSCHKPKAIVHTEKVNMMSLTVLGLRMLFAKTVAVNFLLTAKLFFLRAKRSGSGVKQTLNFDLLKLAGDVESNPGPTSMDWIWRILFLVGAATGAHSGPQLQLQESGPGLVKPSETLSLTCTVSGDSISSGDYYWGWIRQPPGKGLEWIGHIYYSGVTYYNPSLKSRVTISVDTSRNQFSLKLSSVTAADTAVYYCTREDSSNWRSRGQGTLVTVSSGSGGGGSGGGGSGGGGSFEQVQLVESGGGVVQPGRSLRLSCAASGFTFSSYAMHWVRQAPGKGLEWVAVISYDGSNKYYADSVKGRFTISRDNSKNTLYLQMNSLRAEDTAVYYCARAHNSSSWSFDYWGQGTLVTVSSTREDLKNVFPPEVAVFEPSEAEISHTQKATLVCLATGFYPDHVELSWWVNGKEVHSGVCTDPQPLKEQPALNDSRYCLSSRLRVSATFWQNPRNHFRCQVQFYGLSENDEWTQDRAKPVTQIVSAEAWGRADDVIKIHWQEKKSNTILGSQEGNTMKTNDTYMKFSWLTVPEKSLDKEHRCIVRHENNKNGVDQEIIFPPIKTDVITMDPKDNCSKDANDTLLLQLTNTSAYYMYLLLLLKSVVYFAIITCCLLRRTAFCCNGEKS

SEQ ID NO: 16326 - protein, 1009 aa, synthetic construct
MALPVTALLLPLALLLHAARPEVQLVESGGGLVQPGGSLRLSCAASGFSFSDFWMSWVRQAPGKGLEWVATISQAGSEKDYVDSVKGRFTISRDNAKKSLYLQMNSLRAEDTAVYYCASGVYSFDYRGQGTLVTVSSGTGGGGSGGGGSGGGGSEFDDVVMTQSPLSLPVSLGDQASISCRSSQRLVHSNGNTYLHWYLQKPGQSPKLLIYRVSNRFPGVPDRFSGSGSGTDFTLKISRVEAEDLGIYFCSQSTHVPYTFGGGTKLEIKRLEIQNPDPAVYQLRDSKSSDKSVCLFTDFDSQTNVSQSKDSDVYITDKCVLDMRSMDFKSNSAVAWSNKSDFACANAFNNSIIPEDTFFPSPESSDSTDHVKPKETENTKQPSKSCHKPKAIVHTEKVNMMSLTVLGLRMLFAKTVAVNFLLTAKLFFLRAKRSGSGVKQTLNFDLLKLAGDVESNPGPTSMDWIWRILFLVGAATGAHSGPQLQLQESGPGLVKPSETLSLTCTVSGDSISSGDYYWGWIRQPPGKGLEWIGHIYYSGVTYYNPSLKSRVTISVDTSRNQFSLKLSSVTAADTAVYYCTREDSSNWRSRGQGTLVTVSSGSGGGGSGGGGSGGGGSFEEVRLQQSGPDLIKPGASVKMSCKASGYTFTGYVMHWVKQRPGQGLEWIGFINPYNDDIQSNERFRGKATLTSDKSSTTAYMELSSLTSEDSAVYYCARGAGYNFDGAYRFFDFWGQGTTLTVSSTREDLKNVFPPEVAVFEPSEAEISHTQKATLVCLATGFYPDHVELSWWVNGKEVHSGVCTDPQPLKEQPALNDSRYCLSSRLRVSATFWQNPRNHFRCQVQFYGLSENDEWTQDRAKPVTQIVSAEAWGRADDVIKIHWQEKKSNTILGSQEGNTMKTNDTYMKFSWLTVPEKSLDKEHRCIVRHENNKNGVDQEIIFPPIKTDVITMDPKDNCSKDANDTLLLQLTNTSAYYMYLLLLLKSVVYFAIITCCLLRRTAFCCNGEKS

SEQ ID NO: 16327 - protein, 1000 aa, synthetic construct
MALPVTALLLPLALLLHAARPEVQLVESGGGLVQPGGSLRLSCAASGFSFSDFWMSWVRQAPGKGLEWVATISQAGSEKDYVDSVKGRFTISRDNAKKSLYLQMNSLRAEDTAVYYCASGVYSFDYRGQGTLVTVSSGTGGGGSGGGGSGGGGSEFDSYELTQPPSVSVSPGQTATISCSGDQLGGKYGHWYQKKPGQSPVLVLYQDRKRPAGIPERFSGSSSGNTITLTISGTQAVDEADYYCQAWDTNLGGVFGGGTKVTVLGQLEIQNPDPAVYQLRDSKSSDKSVCLFTDFDSQTNVSQSKDSDVYITDKCVLDMRSMDFKSNSAVAWSNKSDFACANAFNNSIIPEDTFFPSPESSDSTDHVKPKETENTKQPSKSCHKPKAIVHTEKVNMMSLTVLGLRMLFAKTVAVNFLLTAKLFFLRAKRSGSGVKQTLNFDLLKLAGDVESNPGPTSMDWIWRILFLVGAATGAHSGPQLQLQESGPGLVKPSETLSLTCTVSGDSISSGDYYWGWIRQPPGKGLEWIGHIYYSGVTYYNPSLKSRVTISVDTSRNQFSLKLSSVTAADTAVYYCTREDSSNWRSRGQGTLVTVSSGSGGGGSGGGGSGGGGSFEQVQLVESGAEVKKPGASVKVSCKASGYTFTGYYMHWVRQAPGQGLEWMGRINPNSGGTNYAQKFQGRVTMTRDTSISTAYMELSRLRSDDTAVYYCASPRGRGSAFDIWGQGTLVTVSSTREDLKNVFPPEVAVFEPSEAEISHTQKATLVCLATGFYPDHVELSWWVNGKEVHSGVCTDPQPLKEQPALNDSRYCLSSRLRVSATFWQNPRNHFRCQVQFYGLSENDEWTQDRAKPVTQIVSAEAWGRADDVIKIHWQEKKSNTILGSQEGNTMKTNDTYMKFSWLTVPEKSLDKEHRCIVRHENNKNGVDQEIIFPPIKTDVITMDPKDNCSKDANDTLLLQLTNTSAYYMYLLLLLKSVVYFAIITCCLLRRTAFCCNGEKS

SEQ ID NO: 16328 - protein, 1003 aa, synthetic construct
MALPVTALLLPLALLLHAARPEVQLVESGGGLVQPGGSLRLSCAASGFSFSDFWMSWVRQAPGKGLEWVATISQAGSEKDYVDSVKGRFTISRDNAKKSLYLQMNSLRAEDTAVYYCASGVYSFDYRGQGTLVTVSSGTGGGGSGGGGSGGGGSEFDNFMLTQPHSVSESPGKTVTISCTRSSGSIASKYVQWYQQRPGSSPTTVIYEDNQRPSGVPDRFSGSIDTSSNSASLTISGLRTEDEADYYCHSYDSNNHSVFGGGTKVTVLGQLEIQNPDPAVYQLRDSKSSDKSVCLFTDFDSQTNVSQSKDSDVYITDKCVLDMRSMDFKSNSAVAWSNKSDFACANAFNNSIIPEDTFFPSPESSDSTDHVKPKETENTKQPSKSCHKPKAIVHTEKVNMMSLTVLGLRMLFAKTVAVNFLLTAKLFFLRAKRSGSGVKQTLNFDLLKLAGDVESNPGPTSMDWIWRILFLVGAATGAHSGPQLQLQESGPGLVKPSETLSLTCTVSGDSISSGDYYWGWIRQPPGKGLEWIGHIYYSGVTYYNPSLKSRVTISVDTSRNQFSLKLSSVTAADTAVYYCTREDSSNWRSRGQGTLVTVSSGSGGGGSGGGGSGGGGSFEEVQLVESGGGVVQPGGSLRLSCAASGFTFSSYAMSWVRQAPGKGLEWVSAISGSGGSTYYADSVKGRFSISRDNSKNTLYLQMNSLRAEDTAVYYCARTRSSGAFDIWGQGTLVTVSSTREDLKNVFPPEVAVFEPSEAEISHTQKATLVCLATGFYPDHVELSWWVNGKEVHSGVCTDPQPLKEQPALNDSRYCLSSRLRVSATFWQNPRNHFRCQVQFYGLSENDEWTQDRAKPVTQIVSAEAWGRADDVIKIHWQEKKSNTILGSQEGNTMKTNDTYMKFSWLTVPEKSLDKEHRCIVRHENNKNGVDQEIIFPPIKTDVITMDPKDNCSKDANDTLLLQLTNTSAYYMYLLLLLKSVVYFAIITCCLLRRTAFCCNGEKS

SEQ ID NO: 16329 - protein, 998 aa, synthetic construct
MALPVTALLLPLALLLHAARPEVQLVESGGGLVQPGGSLRLSCAASGFSFSDFWMSWVRQAPGKGLEWVATISQAGSEKDYVDSVKGRFTISRDNAKKSLYLQMNSLRAEDTAVYYCASGVYSFDYRGQGTLVTVSSGTGGGGSGGGGSGGGGSEFDIQMNQSPSSLSASLGDTITITCHASQNINVWLSWYQQKPGNIPKLLIYKASNLHTGVPSRFSGSGSGTGFTITISSLQPEDIATYYCQQGQSYPWTFGGGTKLEIKRLEIQNPDPAVYQLRDSKSSDKSVCLFTDFDSQTNVSQSKDSDVYITDKCVLDMRSMDFKSNSAVAWSNKSDFACANAFNNSIIPEDTFFPSPESSDSTDHVKPKETENTKQPSKSCHKPKAIVHTEKVNMMSLTVLGLRMLFAKTVAVNFLLTAKLFFLRAKRSGSGVKQTLNFDLLKLAGDVESNPGPTSMDWIWRILFLVGAATGAHSGPQLQLQESGPGLVKPSETLSLTCTVSGDSISSGDYYWGWIRQPPGKGLEWIGHIYYSGVTYYNPSLKSRVTISVDTSRNQFSLKLSSVTAADTAVYYCTREDSSNWRSRGQGTLVTVSSGSGGGGSGGGGSGGGGSFEEVQLQQSGPELVKPGASVKISCKASGYSFTGYFMNWVKQSHGKSLEYIGRFNPYNGETLYNQKFKGKATLTVDKSSSTVHMELLSVTSEDSAVYYCGRSGNDDAMDYWGQGTSVTVSSATREDLKNVFPPEVAVFEPSEAEISHTQKATLVCLATGFYPDHVELSWWVNGKEVHSGVCTDPQPLKEQPALNDSRYCLSSRLRVSATFWQNPRNHFRCQVQFYGLSENDEWTQDRAKPVTQIVSAEAWGRADDVIKIHWQEKKSNTILGSQEGNTMKTNDTYMKFSWLTVPEKSLDKEHRCIVRHENNKNGVDQEIIFPPIKTDVITMDPKDNCSKDANDTLLLQLTNTSAYYMYLLLLLKSVVYFAIITCCLLRRTAFCCNGEKS

SEQ ID NO: 16330 - protein, 999 aa, synthetic construct
MALPVTALLLPLALLLHAARPEVQLVESGGGLVQPGGSLRLSCAASGFSFSDFWMSWVRQAPGKGLEWVATISQAGSEKDYVDSVKGRFTISRDNAKKSLYLQMNSLRAEDTAVYYCASGVYSFDYRGQGTLVTVSSGTGGGGSGGGGSGGGGSEFEIVLTQSPATLSLSPGERATLSCRASQSVRSYLAWYQQKPGQAPRLLIYDASNRATGIPARFSGSGSGTDFTLTISSLEPEDFAVYYCQQRSNWPPTFGQGTKVEIKLEIQNPDPAVYQLRDSKSSDKSVCLFTDFDSQTNVSQSKDSDVYITDKCVLDMRSMDFKSNSAVAWSNKSDFACANAFNNSIIPEDTFFPSPESSDSTDHVKPKETENTKQPSKSCHKPKAIVHTEKVNMMSLTVLGLRMLFAKTVAVNFLLTAKLFFLRAKRSGSGVKQTLNFDLLKLAGDVESNPGPTSMDWIWRILFLVGAATGAHSGPQLQLQESGPGLVKPSETLSLTCTVSGDSISSGDYYWGWIRQPPGKGLEWIGHIYYSGVTYYNPSLKSRVTISVDTSRNQFSLKLSSVTAADTAVYYCTREDSSNWRSRGQGTLVTVSSGSGGGGSGGGGSGGGGSFEQLQVQESGPGLVKPSETLSLTCTVSGGSISNSYFSWGWIRQPPGKGLEWIGSFYYGEKTYYNPSLKSRATISIDTSKSQFSLKLSSVTAADTAVYYCPRGPTMIRGVIDSWGQGTLVTVSSTREDLKNVFPPEVAVFEPSEAEISHTQKATLVCLATGFYPDHVELSWWVNGKEVHSGVCTDPQPLKEQPALNDSRYCLSSRLRVSATFWQNPRNHFRCQVQFYGLSENDEWTQDRAKPVTQIVSAEAWGRADDVIKIHWQEKKSNTILGSQEGNTMKTNDTYMKFSWLTVPEKSLDKEHRCIVRHENNKNGVDQEIIFPPIKTDVITMDPKDNCSKDANDTLLLQLTNTSAYYMYLLLLLKSVVYFAIITCCLLRRTAFCCNGEKS

SEQ ID NO: 16331 - protein, 1008 aa, synthetic construct
MALPVTALLLPLALLLHAARPEVQLVESGGGLVQPGGSLRLSCAASGFSFSDFWMSWVRQAPGKGLEWVATISQAGSEKDYVDSVKGRFTISRDNAKKSLYLQMNSLRAEDTAVYYCASGVYSFDYRGQGTLVTVSSGTGGGGSGGGGSGGGGSEFDIVMTQTPLSLPVTPGEPASISCRSSRSLLDSDDGNTYLDWYLQKPGQSPQLLIYTLSYRASGVPDRFSGSGSGTDFTLKISRVEAEDVGVYYCMQRVEFPITFGQGTRLEIKRLEIQNPDPAVYQLRDSKSSDKSVCLFTDFDSQTNVSQSKDSDVYITDKCVLDMRSMDFKSNSAVAWSNKSDFACANAFNNSIIPEDTFFPSPESSDSTDHVKPKETENTKQPSKSCHKPKAIVHTEKVNMMSLTVLGLRMLFAKTVAVNFLLTAKLFFLRAKRSGSGVKQTLNFDLLKLAGDVESNPGPTSMDWIWRILFLVGAATGAHSGPQLQLQESGPGLVKPSETLSLTCTVSGDSISSGDYYWGWIRQPPGKGLEWIGHIYYSGVTYYNPSLKSRVTISVDTSRNQFSLKLSSVTAADTAVYYCTREDSSNWRSRGQGTLVTVSSGSGGGGSGGGGSGGGGSFEQVQLVESGGGVVQPGRSLRLSCAASGFIFSRYGMHWVRQAPGKGLKWVAVIWYDGSNKLYADSVKGRFTISRDNSKNTLYLQMNSLRAEDTAVYYCARDYYDNSRHHWGFDYWGQGTLVTVSSTREDLKNVFPPEVAVFEPSEAEISHTQKATLVCLATGFYPDHVELSWWVNGKEVHSGVCTDPQPLKEQPALNDSRYCLSSRLRVSATFWQNPRNHFRCQVQFYGLSENDEWTQDRAKPVTQIVSAEAWGRADDVIKIHWQEKKSNTILGSQEGNTMKTNDTYMKFSWLTVPEKSLDKEHRCIVRHENNKNGVDQEIIFPPIKTDVITMDPKDNCSKDANDTLLLQLTNTSAYYMYLLLLLKSVVYFAIITCCLLRRTAFCCNGEKS

SEQ ID NO: 16332 - protein, 998 aa, synthetic construct
MALPVTALLLPLALLLHAARPEVQLVESGGGLVQPGGSLRLSCAASGFSFSDFWMSWVRQAPGKGLEWVATISQAGSEKDYVDSVKGRFTISRDNAKKSLYLQMNSLRAEDTAVYYCASGVYSFDYRGQGTLVTVSSGTGGGGSGGGGSGGGGSEFEIQMTQSPSSMSASLGDTITITCQATQDIFKNLNWYQQKPGKPPSLLIYYATELAEGVPSRFSGSGSGSDYSLTISNLESEDFAAYYCLQFFEFPFTFGSGTKLEMKLEIQNPDPAVYQLRDSKSSDKSVCLFTDFDSQTNVSQSKDSDVYITDKCVLDMRSMDFKSNSAVAWSNKSDFACANAFNNSIIPEDTFFPSPESSDSTDHVKPKETENTKQPSKSCHKPKAIVHTEKVNMMSLTVLGLRMLFAKTVAVNFLLTAKLFFLRAKRSGSGVKQTLNFDLLKLAGDVESNPGPTSMDWIWRILFLVGAATGAHSGPQLQLQESGPGLVKPSETLSLTCTVSGDSISSGDYYWGWIRQPPGKGLEWIGHIYYSGVTYYNPSLKSRVTISVDTSRNQFSLKLSSVTAADTAVYYCTREDSSNWRSRGQGTLVTVSSGSGGGGSGGGGSGGGGSFEQVQLQQSGAELVRPGTSVKVSCKASGYVFTNYWIEWIKQRPGQGLEWIGVMNPGSGETTYNEKFKGKATLTADKSSSTAYMQLSSLTSVDSAVYFCARDHDRDYYAMDYWGQGTSVTVSSTREDLKNVFPPEVAVFEPSEAEISHTQKATLVCLATGFYPDHVELSWWVNGKEVHSGVCTDPQPLKEQPALNDSRYCLSSRLRVSATFWQNPRNHFRCQVQFYGLSENDEWTQDRAKPVTQIVSAEAWGRADDVIKIHWQEKKSNTILGSQEGNTMKTNDTYMKFSWLTVPEKSLDKEHRCIVRHENNKNGVDQEIIFPPIKTDVITMDPKDNCSKDANDTLLLQLTNTSAYYMYLLLLLKSVVYFAIITCCLLRRTAFCCNGEKS

SEQ ID NO: 16333 - protein, 995 aa, synthetic construct
MALPVTALLLPLALLLHAARPEVQLVESGGGLVQPGGSLRLSCAASGFSFSDFWMSWVRQAPGKGLEWVATISQAGSEKDYVDSVKGRFTISRDNAKKSLYLQMNSLRAEDTAVYYCASGVYSFDYRGQGTLVTVSSGTGGGGSGGGGSGGGGSEFDILLTQSPAILSVSPGERVSFSCRASQNIGTSIHWYQQRTNGSPRLLIKYASESVSGIPSRFSGSGSGTDFTLSINSVESEDIADYYCQHTNSWPTTFGGGTKLEIKRLEIQNPDPAVYQLRDSKSSDKSVCLFTDFDSQTNVSQSKDSDVYITDKCVLDMRSMDFKSNSAVAWSNKSDFACANAFNNSIIPEDTFFPSPESSDSTDHVKPKETENTKQPSKSCHKPKAIVHTEKVNMMSLTVLGLRMLFAKTVAVNFLLTAKLFFLRAKRSGSGVKQTLNFDLLKLAGDVESNPGPTSMDWIWRILFLVGAATGAHSGPQLQLQESGPGLVKPSETLSLTCTVSGDSISSGDYYWGWIRQPPGKGLEWIGHIYYSGVTYYNPSLKSRVTISVDTSRNQFSLKLSSVTAADTAVYYCTREDSSNWRSRGQGTLVTVSSGSGGGGSGGGGSGGGGSFEQVQLQQSDAELVKPGASVKISCKASGYTFTDHAIHWVKQKPEQGLEWIGYFSPGNGDIKYNEKFKGKATLTADKSSSTAYMQLNSLTSEDSAVYFCKRSYGNYDYWGQGTTLTVSSTREDLKNVFPPEVAVFEPSEAEISHTQKATLVCLATGFYPDHVELSWWVNGKEVHSGVCTDPQPLKEQPALNDSRYCLSSRLRVSATFWQNPRNHFRCQVQFYGLSENDEWTQDRAKPVTQIVSAEAWGRADDVIKIHWQEKKSNTILGSQEGNTMKTNDTYMKFSWLTVPEKSLDKEHRCIVRHENNKNGVDQEIIFPPIKTDVITMDPKDNCSKDANDTLLLQLTNTSAYYMYLLLLLKSVVYFAIITCCLLRRTAFCCNGEKS

SEQ ID NO: 16334 - protein, 1000 aa, synthetic construct
MALPVTALLLPLALLLHAARPEVQLVESGGGLVQPGGSLRLSCAASGFSFSDFWMSWVRQAPGKGLEWVATISQAGSEKDYVDSVKGRFTISRDNAKKSLYLQMNSLRAEDTAVYYCASGVYSFDYRGQGTLVTVSSGTGGGGSGGGGSGGGGSEFDIVMTQSPDSLAVSLGERATINCKSSQSLLNSGDQKNYLTWYQQKPGQPPKLLIYWASTRESGVPDRFSGSGSGTDFTLTISSLQAEDVAVYYCQNDYSYPLTFGQGTKVEIKLEIQNPDPAVYQLRDSKSSDKSVCLFTDFDSQTNVSQSKDSDVYITDKCVLDMRSMDFKSNSAVAWSNKSDFACANAFNNSIIPEDTFFPSPESSDSTDHVKPKETENTKQPSKSCHKPKAIVHTEKVNMMSLTVLGLRMLFAKTVAVNFLLTAKLFFLRAKRSGSGVKQTLNFDLLKLAGDVESNPGPTSMDWIWRILFLVGAATGAHSGPQLQLQESGPGLVKPSETLSLTCTVSGDSISSGDYYWGWIRQPPGKGLEWIGHIYYSGVTYYNPSLKSRVTISVDTSRNQFSLKLSSVTAADTAVYYCTREDSSNWRSRGQGTLVTVSSGSGGGGSGGGGSGGGGSFEQVQLVQSGAEVKKTGSSVKVSCKASGYTFTDHAIHVWRQAPGQALEWMGHFSPGNTDIKYNDKFKGRVTLTVDRSMSTAYMELSSLRSEDTAMYYCKTSTFFFDYWGQGTMVTVSSTREDLKNVFPPEVAVFEPSEAEISHTQKATLVCLATGFYPDHVELSWWVNGKEVHSGVCTDPQPLKEQPALNDSRYCLSSRLRVSATFWQNPRNHFRCQVQFYGLSENDEWTQDRAKPVTQIVSAEAWGRADDVIKIHWQEKKSNTILGSQEGNTMKTNDTYMKFSWLTVPEKSLDKEHRCIVRHENNKNGVDQEIIFPPIKTDVITMDPKDNCSKDANDTLLLQLTNTSAYYMYLLLLLKSVVYFAIITCCLLRRTAFCCNGEKS

SEQ ID NO: 16335 - protein, 999 aa, synthetic construct
MALPVTALLLPLALLLHAARPEVQLVESGGGLVQPGGSLRLSCAASGFSFSDFWMSWVRQAPGKGLEWVATISQAGSEKDYVDSVKGRFTISRDNAKKSLYLQMNSLRAEDTAVYYCASGVYSFDYRGQGTLVTVSSGTGGGGSGGGGSGGGGSEFDIQMTQSPSSLSASVGDRVTITCKASQDVSIAVAWYQQKPGKAPKVLIYSASYRYTGVPDRFSGSGSGTDFTFTISSLQPEDIAVYYCQQHYITPLTFGGGTKVEIKLEIQNPDPAVYQLRDSKSSDKSVCLFTDFDSQTNVSQSKDSDVYITDKCVLDMRSMDFKSNSAVAWSNKSDFACANAFNNSIIPEDTFFPSPESSDSTDHVKPKETENTKQPSKSCHKPKAIVHTEKVNMMSLTVLGLRMLFAKTVAVNFLLTAKLFFLRAKRSGSGVKQTLNFDLLKLAGDVESNPGPTSMDWIWRILFLVGAATGAHSGPQLQLQESGPGLVKPSETLSLTCTVSGDSISSGDYYWGWIRQPPGKGLEWIGHIYYSGVTYYNPSLKSRVTISVDTSRNQFSLKLSSVTAADTAVYYCTREDSSNWRSRGQGTLVTVSSGSGGGGSGGGGSGGGGSFEQIQLVQSGHEVKKPGASVKVSCKASGYTFTNYGMNWVRQAPGQGLEWMGWINTKTGEPTYAEEFKGRFVFSLETSASTAYLQISSLKAEDTAMYFCGRGGYGSSYWYFDVWGQGTTVTVSSTREDLKNVFPPEVAVFEPSEAEISHTQKATLVCLATGFYPDHVELSWWVNGKEVHSGVCTDPQPLKEQPALNDSRYCLSSRLRVSATFWQNPRNHFRCQVQFYGLSENDEWTQDRAKPVTQIVSAEAWGRADDVIKIHWQEKKSNTILGSQEGNTMKTNDTYMKFSWLTVPEKSLDKEHRCIVRHENNKNGVDQEIIFPPIKTDVITMDPKDNCSKDANDTLLLQLTNTSAYYMYLLLLLKSVVYFAIITCCLLRRTAFCCNGEKS

SEQ ID NO: 16336 - protein, 1001 aa, synthetic construct
MALPVTALLLPLALLLHAARPEVQLVESGGGLVQPGGSLRLSCAASGFSFSDFWMSWVRQAPGKGLEWVATISQAGSEKDYVDSVKGRFTISRDNAKKSLYLQMNSLRAEDTAVYYCASGVYSFDYRGQGTLVTVSSGTGGGGSGGGGSGGGGSEFDIVMTQSPDSLAVSLGERATINCRASKSVSTSGYSYMHWYQQKPGQPPKLLIYLASNLESGVPDRFSGSGSGTDFTLTISSLQAEDVAVYYCQHSRELPYTFGQGTKLEIKLEIQNPDPAVYQLRDSKSSDKSVCLFTDFDSQTNVSQSKDSDVYITDKCVLDMRSMDFKSNSAVAWSNKSDFACANAFNNSIIPEDTFFPSPESSDSTDHVKPKETENTKQPSKSCHKPKAIVHTEKVNMMSLTVLGLRMLFAKTVAVNFLLTAKLFFLRAKRSGSGVKQTLNFDLLKLAGDVESNPGPTSMDWIWRILFLVGAATGAHSGPQLQLQESGPGLVKPSETLSLTCTVSGDSISSGDYYWGWIRQPPGKGLEWIGHIYYSGVTYYNPSLKSRVTISVDTSRNQFSLKLSSVTAADTAVYYCTREDSSNWRSRGQGTLVTVSSGSGGGGSGGGGSGGGGSFEQVQLQESGPGLVKPSETLSLTCTVSGGSISSYGVHWIRQPPGKGLEWIGVIWTSGVTDYNSALMGRVTISVDTSKNQFSLKLSSVTAADTAVYYCARDGDYDRYTMDYWGQGTLVTVSSTREDLKNVFPPEVAVFEPSEAEISHTQKATLVCLATGFYPDHVELSWWVNGKEVHSGVCTDPQPLKEQPALNDSRYCLSSRLRVSATFWQNPRNHFRCQVQFYGLSENDEWTQDRAKPVTQIVSAEAWGRADDVIKIHWQEKKSNTILGSQEGNTMKTNDTYMKFSWLTVPEKSLDKEHRCIVRHENNKNGVDQEIIFPPIKTDVITMDPKDNCSKDANDTLLLQLTNTSAYYMYLLLLLKSVVYFAIITCCLLRRTAFCCNGEKS

SEQ ID NO: 16337 - protein, 1001 aa, synthetic construct
MALPVTALLLPLALLLHAARPEVQLVESGGGLVQPGGSLRLSCAASGFSFSDFWMSWVRQAPGKGLEWVATISQAGSEKDYVDSVKGRFTISRDNAKKSLYLQMNSLRAEDTAVYYCASGVYSFDYRGQGTLVTVSSGTGGGGSGGGGSGGGGSEFDIQMTQSPSSLSASVGDRVTITCRASQSIGTSLHWYQQKPGKAPKLLIKFASRLQSGVPSRFSGSGSGTDFTLTISSLQPEDFATYYCQQSPGFPPTFGQGTKLEIKRLEIQNPDPAVYQLRDSKSSDKSVCLFTDFDSQTNVSQSKDSDVYITDKCVLDMRSMDFKSNSAVAWSNKSDFACANAFNNSIIPEDTFFPSPESSDSTDHVKPKETENTKQPSKSCHKPKAIVHTEKVNMMSLTVLGLRMLFAKTVAVNFLLTAKLFFLRAKRSGSGVKQTLNFDLLKLAGDVESNPGPTSMDWIWRILFLVGAATGAHSGPQLQLQESGPGLVKPSETLSLTCTVSGDSISSGDYYWGWIRQPPGKGLEWIGHIYYSGVTYYNPSLKSRVTISVDTSRNQFSLKLSSVTAADTAVYYCTREDSSNWRSRGQGTLVTVSSGSGGGGSGGGGSGGGGSFEQVQLVESGGGLVKPGGSLRLSCAASGFSITTSGYYWTWIRQFPGKGLEWMGYIGYNSKTYYNPALKSRITISRDNAKNSLYLQMNSLRAEDTAVYYCARSLYGGYKDAFDSWGQGTLVTVSSTREDLKNVFPPEVAVFEPSEAEISHTQKATLVCLATGFYPDHVELSWWVNGKEVHSGVCTDPQPLKEQPALNDSRYCLSSRLRVSATFWQNPRNHFRCQVQFYGLSENDEWTQDRAKPVTQIVSAEAWGRADDVIKIHWQEKKSNTILGSQEGNTMKTNDTYMKFSWLTVPEKSLDKEHRCIVRHENNKNGVDQEIIFPPIKTDVITMDPKDNCSKDANDTLLLQLTNTSAYYMYLLLLLKSVVYFAIITCCLLRRTAFCCNGEKS

SEQ ID NO: 16338 - protein, 1006 aa, synthetic construct
MALPVTALLLPLALLLHAARPEVQLVESGGGLVQPGGSLRLSCAASGFSFSDFWMSWVRQAPGKGLEWVATISQAGSEKDYVDSVKGRFTISRDNAKKSLYLQMNSLRAEDTAVYYCASGVYSFDYRGQGTLVTVSSGTGGGGSGGGGSGGGGSEFDEIVLTQSPLSLPVTPGEPASISCRSSQSLLHSIGYNYLDWYLQKPGQSPQLLIYLGSNRASGVPDRFSGSGSGTDFTLKISRVEAEDVGVYYCMQALQTPLTFGGGTKVEIKRLEIQNPDPAVYQLRDSKSSDKSVCLFTDFDSQTNVSQSKDSDVYITDKCVLDMRSMDFKSNSAVAWSNKSDFACANAFNNSIIPEDTFFPSPESSDSTDHVKPKETENTKQPSKSCHKPKAIVHTEKVNMMSLTVLGLRMLFAKTVAVNFLLTAKLFFLRAKRSGSGVKQTLNFDLLKLAGDVESNPGPTSMDWIWRILFLVGAATGAHSGPQLQLQESGPGLVKPSETLSLTCTVSGDSISSGDYYWGWIRQPPGKGLEWIGHIYYSGVTYYNPSLKSRVTISVDTSRNQFSLKLSSVTAADTAVYYCTREDSSNWRSRGQGTLVTVSSGSGGGGSGGGGSGGGGSFEEVQLVESGGGVVQPGRSLRLSCAASGFTFRSYGMHWVRQAPGKGLEWVAVISYDGSNKYYTDSVNGRFTISRDNSKNTLYLQMNSLRAEDTAVYYCARGGGYYETSGPDYWGQGTLVTVSSTREDLKNVFPPEVAVFEPSEAEISHTQKATLVCLATGFYPDHVELSWWVNGKEVHSGVCTDPQPLKEQPALNDSRYCLSSRLRVSATFWQNPRNHFRCQVQFYGLSENDEWTQDRAKPVTQIVSAEAWGRADDVIKIHWQEKKSNTILGSQEGNTMKTNDTYMKFSWLTVPEKSLDKEHRCIVRHENNKNGVDQEIIFPPIKTDVITMDPKDNCSKDANDTLLLQLTNTSAYYMYLLLLLKSVVYFAIITCCLLRRTAFCCNGEKS

SEQ ID NO: 16339 - protein, 1004 aa, synthetic construct
MALPVTALLLPLALLLHAARPEVQLVESGGGLVQPGGSLRLSCAASGFSFSDFWMSWVRQAPGKGLEWVATISQAGSEKDYVDSVKGRFTISRDNAKKSLYLQMNSLRAEDTAVYYCASGVYSFDYRGQGTLVTVSSGTGGGGSGGGGSGGGGSEFDDVVMTQSPLSLPVTPGEPASISCRSSQSLLHSIGYNYLHWFLQKPGQSPQLLIYLGSNRASGVPDRFSGSGSGTDFTLKISRVEAEDVGVYYCMQALQTPPTFGQGTRLEIKRLEIQNPDPAVYQLRDSKSSDKSVCLFTDFDSQTNVSQSKDSDVYITDKCVLDMRSMDFKSNSAVAWSNKSDFACANAFNNSIIPEDTFFPSPESSDSTDHVKPKETENTKQPSKSCHKPKAIVHTEKVNMMSLTVLGLRMLFAKTVAVNFLLTAKLFFLRAKRSGSGVKQTLNFDLLKLAGDVESNPGPTSMDWIWRILFLVGAATGAHSGPQLQLQESGPGLVKPSETLSLTCTVSGDSISSGDYYWGWIRQPPGKGLEWIGHIYYSGVTYYNPSLKSRVTISVDTSRNQFSLKLSSVTAADTAVYYCTREDSSNWRSRGQGTLVTVSSGSGGGGSGGGGSGGGGSFEQLQLQESGPGLVKPSGTLSLTCAVSGGSISSSNWWSWVRQPPGKGLEWIGEIYHSGSTNYNPSLKSRVTISVDKSKNQFSLKLSSVTAADTAVYYCVGSPYGDYVLDYWGQGTLVTVSSTREDLKNVFPPEVAVFEPSEAEISHTQKATLVCLATGFYPDHVELSWWVNGKEVHSGVCTDPQPLKEQPALNDSRYCLSSRLRVSATFWQNPRNHFRCQVQFYGLSENDEWTQDRAKPVTQIVSAEAWGRADDVIKIHWQEKKSNTILGSQEGNTMKTNDTYMKFSWLTVPEKSLDKEHRCIVRHENNKNGVDQEIIFPPIKTDVITMDPKDNCSKDANDTLLLQLTNTSAYYMYLLLLLKSVVYFAIITCCLLRRTAFCCNGEKS

SEQ ID NO: 16340 - protein, 1002 aa, synthetic construct
MALPVTALLLPLALLLHAARPEVQLVESGGGLVQPGGSLRLSCAASGFSFSDFWMSWVRQAPGKGLEWVATISQAGSEKDYVDSVKGRFTISRDNAKKSLYLQMNSLRAEDTAVYYCASGVYSFDYRGQGTLVTVSSGTGGGGSGGGGSGGGGSEFDEIVLTQSPGTLSLSLGERATLSCRASQSISSSFLAWYQQKPGQAPKLLIYAASTRATGIPDRFSGSGSGTDFTLTISRLEPEDFAVYYCQQYGRSLSFGGGTKVEVKLEIQNPDPAVYQLRDSKSSDKSVCLFTDFDSQTNVSQSKDSDVYITDKCVLDMRSMDFKSNSAVAWSNKSDFACANAFNNSIIPEDTFFPSPESSDSTDHVKPKETENTKQPSKSCHKPKAIVHTEKVNMMSLTVLGLRMLFAKTVAVNFLLTAKLFFLRAKRSGSGVKQTLNFDLLKLAGDVESNPGPTSMDWIWRILFLVGAATGAHSGPQLQLQESGPGLVKPSETLSLTCTVSGDSISSGDYYWGWIRQPPGKGLEWIGHIYYSGVTYYNPSLKSRVTISVDTSRNQFSLKLSSVTAADTAVYYCTREDSSNWRSRGQGTLVTVSSGSGGGGSGGGGSGGGGSFEQVQLQQSGPGLVKPSQTLSLTCAISGDSVSGNSATWNWIRQSPSRGLEWLGRTYYRSKWNHDYAESVKSRITINPDTSKNQFSLQLNSVTPEDTAVYYCARGDSSSWYAFDYWGQGTLVTVSSTREDLKNVFPPEVAVFEPSEAEISHTQKATLVCLATGFYPDHVELSWWVNGKEVHSGVCTDPQPLKEQPALNDSRYCLSSRLRVSATFWQNPRNHFRCQVQFYGLSENDEWTQDRAKPVTQIVSAEAWGRADDVIKIHWQEKKSNTILGSQEGNTMKTNDTYMKFSWLTVPEKSLDKEHRCIVRHENNKNGVDQEIIFPPIKTDVITMDPKDNCSKDANDTLLLQLTNTSAYYMYLLLLLKSVVYFAIITCCLLRRTAFCCNGEKS

SEQ ID NO: 16341 - protein, 1001 aa, synthetic construct
MALPVTALLLPLALLLHAARPEVQLVESGGGLVQPGGSLRLSCAASGFSFSDFWMSWVRQAPGKGLEWVATISQAGSEKDYVDSVKGRFTISRDNAKKSLYLQMNSLRAEDTAVYYCASGVYSFDYRGQGTLVTVSSGTGGGGSGGGGSGGGGSEFDQSVVTQPPSVSVAPGKTARITCGRNNIGSKSVHWYQQKPGQAPVLVVYDDSDRPSGIPERFSGSNSGNTATLTISRVEAGDEADYYCQVWDSSSDHVVFGGGTKLTVLGLEIQNPDPAVYQLRDSKSSDKSVCLFTDFDSQTNVSQSKDSDVYITDKCVLDMRSMDFKSNSAVAWSNKSDFACANAFNNSIIPEDTFFPSPESSDSTDHVKPKETENTKQPSKSCHKPKAIVHTEKVNMMSLTVLGLRMLFAKTVAVNFLLTAKLFFLRAKRSGSGVKQTLNFDLLKLAGDVESNPGPTSMDWIWRILFLVGAATGAHSGPQLQLQESGPGLVKPSETLSLTCTVSGDSISSGDYYWGWIRQPPGKGLEWIGHIYYSGVTYYNPSLKSRVTISVDTSRNQFSLKLSSVTAADTAVYYCTREDSSNWRSRGQGTLVTVSSGSGGGGSGGGGSGGGGSFEVQLVQSGGGVMRPGGSLRLSCAASGFTFDDYGMSWVRQAPGKGLEWVSGINWNGGSTGYADSVRGRFTISRDNAKNSLYLQMNSLRAEDTALYYCARERGYGYHDPHDYWGQGTLVTVSSTREDLKNVFPPEVAVFEPSEAEISHTQKATLVCLATGFYPDHVELSWWVNGKEVHSGVCTDPQPLKEQPALNDSRYCLSSRLRVSATFWQNPRNHFRCQVQFYGLSENDEWTQDRAKPVTQIVSAEAWGRADDVIKIHWQEKKSNTILGSQEGNTMKTNDTYMKFSWLTVPEKSLDKEHRCIVRHENNKNGVDQEIIFPPIKTDVITMDPKDNCSKDANDTLLLQLTNTSAYYMYLLLLLKSVVYFAIITCCLLRRTAFCCNGEKS

SEQ ID NO: 16342 - protein, 1014 aa, synthetic construct
MALPVTALLLPLALLLHAARPEVQLVESGGGLVQPGGSLRLSCAASGFSFSDFWMSWVRQAPGKGLEWVATISQAGSEKDYVDSVKGRFTISRDNAKKSLYLQMNSLRAEDTAVYYCASGVYSFDYRGQGTLVTVSSGTGGGGSGGGGSGGGGSEFEQKLISEEDLEFQAVVTQPPSASGTPGQRVTISCSGSSSNIGSNTVNWYQQVPGTAPKLLIYSNNQRPSGVPDRFSGSKSGTSASLAISGLQSEDEADYYCAAWDDSLNGWVFGGGTKLTVLLEIQNPDPAVYQLRDSKSSDKSVCLFTDFDSQTNVSQSKDSDVYITDKCVLDMRSMDFKSNSAVAWSNKSDFACANAFNNSIIPEDTFFPSPESSDSTDHVKPKETENTKQPSKSCHKPKAIVHTEKVNMMSLTVLGLRMLFAKTVAVNFLLTAKLFFLRAKRSGSGVKQTLNFDLLKLAGDVESNPGPTSMDWIWRILFLVGAATGAHSGPQLQLQESGPGLVKPSETLSLTCTVSGDSISSGDYYWGWIRQPPGKGLEWIGHIYYSGVTYYNPSLKSRVTISVDTSRNQFSLKLSSVTAADTAVYYCTREDSSNWRSRGQGTLVTVSSGSGGGGSGGGGSGGGGSFEQMQLVQSGAEVKEPGESLRISCKGSGYSFTNFWISWVRQMPGKGLEWMGRVDPGYSYSTYSPSFQGHVTISADKSTSTAYLQWNSLKASDTAMYYCARVQYSGYYDWFDPWGQGTLVTVSSTREDLKNVFPPEVAVFEPSEAEISHTQKATLVCLATGFYPDHVELSWWVNGKEVHSGVCTDPQPLKEQPALNDSRYCLSSRLRVSATFWQNPRNHFRCQVQFYGLSENDEWTQDRAKPVTQIVSAEAWGRADDVIKIHWQEKKSNTILGSQEGNTMKTNDTYMKFSWLTVPEKSLDKEHRCIVRHENNKNGVDQEIIFPPIKTDVITMDPKDNCSKDANDTLLLQLTNTSAYYMYLLLLLKSVVYFAIITCCLLRRTAFCCNGEKS

SEQ ID NO: 16343 - protein, 1008 aa, synthetic construct
MALPVTALLLPLALLLHAARPEVQLVESGGGLVQPGGSLRLSCAASGFSFSDFWMSWVRQAPGKGLEWVATISQAGSEKDYVDSVKGRFTISRDNAKKSLYLQMNSLRAEDTAVYYCASGVYSFDYRGQGTLVTVSSGTGGGGSGGGGSGGGGSEFEQKLISEEDLEFDIQMTQSPSTLSASVGDRVTITCRASQNINKWLAWYQQRPGKAPQLLIYKASSLESGVPSRFSGSGSGTEYTLTISSLQPDDFATYYCQQYNSYATFGQGTKVEIKRLEIQNPDPAVYQLRDSKSSDKSVCLFTDFDSQTNVSQSKDSDVYITDKCVLDMRSMDFKSNSAVAWSNKSDFACANAFNNSIIPEDTFFPSPESSDSTDHVKPKETENTKQPSKSCHKPKAIVHTEKVNMMSLTVLGLRMLFAKTVAVNFLLTAKLFFLRAKRSGSGVKQTLNFDLLKLAGDVESNPGPTSMDWIWRILFLVGAATGAHSGPQLQLQESGPGLVKPSETLSLTCTVSGDSISSGDYYWGWIRQPPGKGLEWIGHIYYSGVTYYNPSLKSRVTISVDTSRNQFSLKLSSVTAADTAVYYCTREDSSNWRSRGQGTLVTVSSGSGGGGSGGGGSGGGGSFEQVQLVQSGAEVKKPGESLKISCKGSGYNFSNKWIGWVRQLPGRGLEWIAIIYPGYSDITYSPSFQGRVTISADTSINTAYLHWHSLKASDTAMYYCVRHTALAGFDYWGLGTLVTVSSTREDLKNVFPPEVAVFEPSEAEISHTQKATLVCLATGFYPDHVELSWWVNGKEVHSGVCTDPQPLKEQPALNDSRYCLSSRLRVSATFWQNPRNHFRCQVQFYGLSENDEWTQDRAKPVTQIVSAEAWGRADDVIKIHWQEKKSNTILGSQEGNTMKTNDTYMKFSWLTVPEKSLDKEHRCIVRHENNKNGVDQEIIFPPIKTDVITMDPKDNCSKDANDTLLLQLTNTSAYYMYLLLLLKSVVYFAIITCCLLRRTAFCCNGEKS

SEQ ID NO: 16344 - protein, 1000 aa, synthetic construct
MALPVTALLLPLALLLHAARPEVQLVESGGGLVQPGGSLRLSCAASGFSFSDFWMSWVRQAPGKGLEWVATISQAGSEKDYVDSVKGRFTISRDNAKKSLYLQMNSLRAEDTAVYYCASGVYSFDYRGQGTLVTVSSGTGGGGSGGGGSGGGGSEFDIVLTQSPASLAVSLGQRATISCRASESVDNYGNTFMHWYQQKPGQPPKLLIYRASNLESGIPARFSGSGSRTDFTLTINPVEADDVATYYCQQSNEDPPTFGAGTKLELKLEIQNPDPAVYQLRDSKSSDKSVCLFTDFDSQTNVSQSKDSDVYITDKCVLDMRSMDFKSNSAVAWSNKSDFACANAFNNSIIPEDTFFPSPESSDSTDHVKPKETENTKQPSKSCHKPKAIVHTEKVNMMSLTVLGLRMLFAKTVAVNFLLTAKLFFLRAKRSGSGVKQTLNFDLLKLAGDVESNPGPTSMDWIWRILFLVGAATGAHSGPQLQLQESGPGLVKPSETLSLTCTVSGDSISSGDYYWGWIRQPPGKGLEWIGHIYYSGVTYYNPSLKSRVTISVDTSRNQFSLKLSSVTAADTAVYYCTREDSSNWRSRGQGTLVTVSSGSGGGGSGGGGSGGGGSFEQIQLVQSGPELKKPGETVKISCKASGYIFTNYGMNWVKQAPGKSFKWMGWINTYTGESTYSADFKGRFAFSLETSASTAYLHINDLKNEDTATYFCARSGGYDPMDYWGQGTSVTVSSTREDLKNVFPPEVAVFEPSEAEISHTQKATLVCLATGFYPDHVELSWWVNGKEVHSGVCTDPQPLKEQPALNDSRYCLSSRLRVSATFWQNPRNHFRCQVQFYGLSENDEWTQDRAKPVTQIVSAEAWGRADDVIKIHWQEKKSNTILGSQEGNTMKTNDTYMKFSWLTVPEKSLDKEHRCIVRHENNKNGVDQEIIFPPIKTDVITMDPKDNCSKDANDTLLLQLTNTSAYYMYLLLLLKSVVYFAIITCCLLRRTAFCCNGEKS

SEQ ID NO: 16345 - protein, 999 aa, synthetic construct
MALPVTALLLPLALLLHAARPEVQLVESGGGLVQPGGSLRLSCAASGFSFSDFWMSWVRQAPGKGLEWVATISQAGSEKDYVDSVKGRFTISRDNAKKSLYLQMNSLRAEDTAVYYCASGVYSFDYRGQGTLVTVSSGTGGGGSGGGGSGGGGSEFDEIVLTQSPGTLSLSPGERATLSCRASQSVSNTYLAWYHQRPGQAPRLLIYGASSRATGIPDRFSGSGSGTDFALTISSLEPEDFAVYYCQQYSNSWTFGQGTKVEIKRLEIQNPDPAVYQLRDSKSSDKSVCLFTDFDSQTNVSQSKDSDVYITDKCVLDMRSMDFKSNSAVAWSNKSDFACANAFNNSIIPEDTFFPSPESSDSTDHVKPKETENTKQPSKSCHKPKAIVHTEKVNMMSLTVLGLRMLFAKTVAVNFLLTAKLFFLRAKRSGSGVKQTLNFDLLKLAGDVESNPGPTSMDWIWRILFLVGAATGAHSGPQLQLQESGPGLVKPSETLSLTCTVSGDSISSGDYYWGWIRQPPGKGLEWIGHIYYSGVTYYNPSLKSRVTISVDTSRNQFSLKLSSVTAADTAVYYCTREDSSNWRSRGQGTLVTVSSGSGGGGSGGGGSGGGGSFEQVQLVESGGGVVQPGRSLRLSCAASGFTFSSYDMHWVRQAPGKGLEWVAVISYDGTNEYYADSVKGRFTISRDTSKNTLYLQMNSLRAEDTAVYYCARERYFDWSFDYWGQGTLVSVSSTREDLKNVFPPEVAVFEPSEAEISHTQKATLVCLATGFYPDHVELSWWVNGKEVHSGVCTDPQPLKEQPALNDSRYCLSSRLRVSATFWQNPRNHFRCQVQFYGLSENDEWTQDRAKPVTQIVSAEAWGRADDVIKIHWQEKKSNTILGSQEGNTMKTNDTYMKFSWLTVPEKSLDKEHRCIVRHENNKNGVDQEIIFPPIKTDVITMDPKDNCSKDANDTLLLQLTNTSAYYMYLLLLLKSVVYFAIITCCLLRRTAFCCNGEKS

SEQ ID NO: 16346 - protein, 998 aa, synthetic construct
MALPVTALLLPLALLLHAARPEVQLVESGGGLVQPGGSLRLSCAASGFSFSDFWMSWVRQAPGKGLEWVATISQAGSEKDYVDSVKGRFTISRDNAKKSLYLQMNSLRAEDTAVYYCASGVYSFDYRGQGTLVTVSSGTGGGGSGGGGSGGGGSEFDELTQDPAVSVALGQTVRITCQGDSLRSNYANWYQQKPGQAPVLVIYGQNNRPSGIPDRFSGSSSGNTASLTITGAQAADEADYYCDSRVSTGNHVVFGGGTKLTVLGQLEIQNPDPAVYQLRDSKSSDKSVCLFTDFDSQTNVSQSKDSDVYITDKCVLDMRSMDFKSNSAVAWSNKSDFACANAFNNSIIPEDTFFPSPESSDSTDHVKPKETENTKQPSKSCHKPKAIVHTEKVNMMSLTVLGLRMLFAKTVAVNFLLTAKLFFLRAKRSGSGVKQTLNFDLLKLAGDVESNPGPTSMDWIWRILFLVGAATGAHSGPQLQLQESGPGLVKPSETLSLTCTVSGDSISSGDYYWGWIRQPPGKGLEWIGHIYYSGVTYYNPSLKSRVTISVDTSRNQFSLKLSSVTAADTAVYYCTREDSSNWRSRGQGTLVTVSSGSGGGGSGGGGSGGGGSFEEVQLVQSGAEVKKPGASVKVSCKASGYTFTSYAMHWVRQAPGQRLEWMGWINAGNGNTKYSQKFQGRVTITRDTSASTAYMELSSLRSEDTAVYYCARDISYGSFDYWGQGTLVTVSSTREDLKNVFPPEVAVFEPSEAEISHTQKATLVCLATGFYPDHVELSWWVNGKEVHSGVCTDPQPLKEQPALNDSRYCLSSRLRVSATFWQNPRNHFRCQVQFYGLSENDEWTQDRAKPVTQIVSAEAWGRADDVIKIHWQEKKSNTILGSQEGNTMKTNDTYMKFSWLTVPEKSLDKEHRCIVRHENNKNGVDQEIIFPPIKTDVITMDPKDNCSKDANDTLLLQLTNTSAYYMYLLLLLKSVVYFAIITCCLLRRTAFCCNGEKS

SEQ ID NO: 16347 - protein, 1000 aa, synthetic construct
MALPVTALLLPLALLLHAARPEVQLVESGGGLVQPGGSLRLSCAASGFSFSDFWMSWVRQAPGKGLEWVATISQAGSEKDYVDSVKGRFTISRDNAKKSLYLQMNSLRAEDTAVYYCASGVYSFDYRGQGTLVTVSSGTGGGGSGGGGSGGGGSEFDDIVLTQTPATLSVTPGDSVSLSCRASQSISNNLHWYQQKSHESPRLLIKNASQSISGIPSKFSGSGSGTDFTLRINSVETEDFGMYFCQQSNSWPYTFGSGTKLEIKLEIQNPDPAVYQLRDSKSSDKSVCLFTDFDSQTNVSQSKDSDVYITDKCVLDMRSMDFKSNSAVAWSNKSDFACANAFNNSIIPEDTFFPSPESSDSTDHVKPKETENTKQPSKSCHKPKAIVHTEKVNMMSLTVLGLRMLFAKTVAVNFLLTAKLFFLRAKRSGSGVKQTLNFDLLKLAGDVESNPGPTSMDWIWRILFLVGAATGAHSGPQLQLQESGPGLVKPSETLSLTCTVSGDSISSGDYYWGWIRQPPGKGLEWIGHIYYSGVTYYNPSLKSRVTISVDTSRNQFSLKLSSVTAADTAVYYCTREDSSNWRSRGQGTLVTVSSGSGGGGSGGGGSGGGGSFEQVKLQQSGPELVKPGASVKISCKASGYSFTGYYMHWVKQSHGNILDWIGYIYPYNGVSSYNQKFKGKATLTVDKSSSTAYMELRSLTSEDSAVYYCARERGLYQLRAMDYWGQGTSVTVSSTREDLKNVFPPEVAVFEPSEAEISHTQKATLVCLATGFYPDHVELSWWVNGKEVHSGVCTDPQPLKEQPALNDSRYCLSSRLRVSATFWQNPRNHFRCQVQFYGLSENDEWTQDRAKPVTQIVSAEAWGRADDVIKIHWQEKKSNTILGSQEGNTMKTNDTYMKFSWLTVPEKSLDKEHRCIVRHENNKNGVDQEIIFPPIKTDVITMDPKDNCSKDANDTLLLQLTNTSAYYMYLLLLLKSVVYFAIITCCLLRRTAFCCNGEKS

SEQ ID NO: 16348 - protein, 991 aa, synthetic construct
MALPVTALLLPLALLLHAARPEVQLVESGGGLVQPGGSLRLSCAASGFSFSDFWMSWVRQAPGKGLEWVATISQAGSEKDYVDSVKGRFTISRDNAKKSLYLQMNSLRAEDTAVYYCASGVYSFDYRGQGTLVTVSSGTGGGGSGGGGSGGGGSEFDDIVMTQTPAIMSASPGQKVTITCSASSSVNYMHWYQQKLGSSPKLWIYDTSKLAPGVPARFSGSGSGTSYSLTISSMEAEDAASYFCHQWSSYPYTFGSGTKLEIKLEIQNPDPAVYQLRDSKSSDKSVCLFTDFDSQTNVSQSKDSDVYITDKCVLDMRSMDFKSNSAVAWSNKSDFACANAFNNSIIPEDTFFPSPESSDSTDHVKPKETENTKQPSKSCHKPKAIVHTEKVNMMSLTVLGLRMLFAKTVAVNFLLTAKLFFLRAKRSGSGVKQTLNFDLLKLAGDVESNPGPTSMDWIWRILFLVGAATGAHSGPQLQLQESGPGLVKPSETLSLTCTVSGDSISSGDYYWGWIRQPPGKGLEWIGHIYYSGVTYYNPSLKSRVTISVDTSRNQFSLKLSSVTAADTAVYYCTREDSSNWRSRGQGTLVTVSSGSGGGGSGGGGSGGGGSFEEVQLQESGPDLVKPSQSLSLTCTVTGYSITSGYGWHWIRQFPGNKLEWMGYIHYSGSTTYNPSLKSRISISRDTSKNQFFLQLNSVTTEDTATYYCARSLRYWGQGTTLTVSSTREDLKNVFPPEVAVFEPSEAEISHTQKATLVCLATGFYPDHVELSWWVNGKEVHSGVCTDPQPLKEQPALNDSRYCLSSRLRVSATFWQNPRNHFRCQVQFYGLSENDEWTQDRAKPVTQIVSAEAWGRADDVIKIHWQEKKSNTILGSQEGNTMKTNDTYMKFSWLTVPEKSLDKEHRCIVRHENNKNGVDQEIIFPPIKTDVITMDPKDNCSKDANDTLLLQLTNTSAYYMYLLLLLKSVVYFAIITCCLLRRTAFCCNGEKS

SEQ ID NO: 16349 - protein, 994 aa, synthetic construct
MALPVTALLLPLALLLHAARPEVQLVESGGGLVQPGGSLRLSCAASGFSFSDFWMSWVRQAPGKGLEWVATISQAGSEKDYVDSVKGRFTISRDNAKKSLYLQMNSLRAEDTAVYYCASGVYSFDYRGQGTLVTVSSGTGGGGSGGGGSGGGGSEFDDIQMTQSPSSLSASVGDRVTITCSATSSISYMHWYQQKPGKAPKGWIYDTSKLAHGVPSRFSGSGSGTDFTLTISSLQPEDFATYYCHQRRSYPFTFGQGTKVEIKLEIQNPDPAVYQLRDSKSSDKSVCLFTDFDSQTNVSQSKDSDVYITDKCVLDMRSMDFKSNSAVAWSNKSDFACANAFNNSIIPEDTFFPSPESSDSTDHVKPKETENTKQPSKSCHKPKAIVHTEKVNMMSLTVLGLRMLFAKTVAVNFLLTAKLFFLRAKRSGSGVKQTLNFDLLKLAGDVESNPGPTSMDWIWRILFLVGAATGAHSGPQLQLQESGPGLVKPSETLSLTCTVSGDSISSGDYYWGWIRQPPGKGLEWIGHIYYSGVTYYNPSLKSRVTISVDTSRNQFSLKLSSVTAADTAVYYCTREDSSNWRSRGQGTLVTVSSGSGGGGSGGGGSGGGGSFEEVQLVQSGAEVKKPGASVKVSCKASGYTFTNFWIHWVRQAPGQGLEWIGEIDPSDSYTNYNQKFKGRVTITRDTSTSTAYLELSSLRSEDTAVYYCAREITTVDYWGQGTLVTVSSTREDLKNVFPPEVAVFEPSEAEISHTQKATLVCLATGFYPDHVELSWWVNGKEVHSGVCTDPQPLKEQPALNDSRYCLSSRLRVSATFWQNPRNHFRCQVQFYGLSENDEWTQDRAKPVTQIVSAEAWGRADDVIKIHWQEKKSNTILGSQEGNTMKTNDTYMKFSWLTVPEKSLDKEHRCIVRHENNKNGVDQEIIFPPIKTDVITMDPKDNCSKDANDTLLLQLTNTSAYYMYLLLLLKSVVYFAIITCCLLRRTAFCCNGEKS

SEQ ID NO: 16350 - protein, 1001 aa, synthetic construct
MALPVTALLLPLALLLHAARPEVQLVESGGGLVQPGGSLRLSCAASGFSFSDFWMSWVRQAPGKGLEWVATISQAGSEKDYVDSVKGRFTISRDNAKKSLYLQMNSLRAEDTAVYYCASGVYSFDYRGQGTLVTVSSGTGGGGSGGGGSGGGGSEFDDIQMTQSPSSLSASVGDRVTITCKASQGFNKYVAWYQQKPGKAPKLLIYYTSTLQPGVPSRFSGSGSGRDYTLTISSLQPEDFATYYCLQYGNLLYAFGQGTKVEIKRLEIQNPDPAVYQLRDSKSSDKSVCLFTDFDSQTNVSQSKDSDVYITDKCVLDMRSMDFKSNSAVAWSNKSDFACANAFNNSIIPEDTFFPSPESSDSTDHVKPKETENTKQPSKSCHKPKAIVHTEKVNMMSLTVLGLRMLFAKTVAVNFLLTAKLFFLRAKRSGSGVKQTLNFDLLKLAGDVESNPGPTSMDWIWRILFLVGAATGAHSGPQLQLQESGPGLVKPSETLSLTCTVSGDSISSGDYYWGWIRQPPGKGLEWIGHIYYSGVTYYNPSLKSRVTISVDTSRNQFSLKLSSVTAADTAVYYCTREDSSNWRSRGQGTLVTVSSGSGGGGSGGGGSGGGGSFEEVQLVQSGAEVKKPGASVKVSCKASGYTFTSYWIGWVRQAPGQGLEWIGDIYPGGGYTNYNEKFKGRVTITRDTSTSTAYLELSSLRSEDTAVYYCARLDGSSYRGAMDSWGQGTLVTVSSTREDLKNVFPPEVAVFEPSEAEISHTQKATLVCLATGFYPDHVELSWWVNGKEVHSGVCTDPQPLKEQPALNDSRYCLSSRLRVSATFWQNPRNHFRCQVQFYGLSENDEWTQDRAKPVTQIVSAEAWGRADDVIKIHWQEKKSNTILGSQEGNTMKTNDTYMKFSWLTVPEKSLDKEHRCIVRHENNKNGVDQEIIFPPIKTDVITMDPKDNCSKDANDTLLLQLTNTSAYYMYLLLLLKSVVYFAIITCCLLRRTAFCCNGEKS

SEQ ID NO: 16351 - protein, 997 aa, synthetic construct
MALPVTALLLPLALLLHAARPEVQLVESGGGLVQPGGSLRLSCAASGFSFSDFWMSWVRQAPGKGLEWVATISQAGSEKDYVDSVKGRFTISRDNAKKSLYLQMNSLRAEDTAVYYCASGVYSFDYRGQGTLVTVSSGTGGGGSGGGGSGGGGSEFDDIQMTQSPSSLSASVGDRVTITCRASQDIRYYLNWYQQKPGKAPKLLIYVASSLQSGVPSRFSGSGSGTEFTLTVSSLQPEDFATYYCLQVYSTPRTFGQGTKVEIKLEIQNPDPAVYQLRDSKSSDKSVCLFTDFDSQTNVSQSKDSDVYITDKCVLDMRSMDFKSNSAVAWSNKSDFACANAFNNSIIPEDTFFPSPESSDSTDHVKPKETENTKQPSKSCHKPKAIVHTEKVNMMSLTVLGLRMLFAKTVAVNFLLTAKLFFLRAKRSGSGVKQTLNFDLLKLAGDVESNPGPTSMDWIWRILFLVGAATGAHSGPQLQLQESGPGLVKPSETLSLTCTVSGDSISSGDYYWGWIRQPPGKGLEWIGHIYYSGVTYYNPSLKSRVTISVDTSRNQFSLKLSSVTAADTAVYYCTREDSSNWRSRGQGTLVTVSSGSGGGGSGGGGSGGGGSFEEVQLVESGGGLAKPGGSLRLSCAASGFRFTFNNYYMDWVRQAPGQGLEWVSRISSSGDPTWYADSVKGRFTISRENAKNTLFLQMNSLRAEDTAVYYCASLTTGSDSWGQGVLVTVSSTREDLKNVFPPEVAVFEPSEAEISHTQKATLVCLATGFYPDHVELSWWVNGKEVHSGVCTDPQPLKEQPALNDSRYCLSSRLRVSATFWQNPRNHFRCQVQFYGLSENDEWTQDRAKPVTQIVSAEAWGRADDVIKIHWQEKKSNTILGSQEGNTMKTNDTYMKFSWLTVPEKSLDKEHRCIVRHENNKNGVDQEIIFPPIKTDVITMDPKDNCSKDANDTLLLQLTNTSAYYMYLLLLLKSVVYFAIITCCLLRRTAFCCNGEKS

SEQ ID NO: 16352 - protein, 997 aa, synthetic construct
MALPVTALLLPLALLLHAARPEVQLVESGGGLVQPGGSLRLSCAASGFSFSDFWMSWVRQAPGKGLEWVATISQAGSEKDYVDSVKGRFTISRDNAKKSLYLQMNSLRAEDTAVYYCASGVYSFDYRGQGTLVTVSSGTGGGGSGGGGSGGGGSEFEIVMTQSPATLSVSPGERATLSCRASQSVSRNLAWYQQKPGQAPRLLIYGASTRATGIPARFSGSGSGTEFTLTIGSLQSEDFAVYYCQQYKTWPRTFGQGTNVEIKLEIQNPDPAVYQLRDSKSSDKSVCLFTDFDSQTNVSQSKDSDVYITDKCVLDMRSMDFKSNSAVAWSNKSDFACANAFNNSIIPEDTFFPSPESSDSTDHVKPKETENTKQPSKSCHKPKAIVHTEKVNMMSLTVLGLRMLFAKTVAVNFLLTAKLFFLRAKRSGSGVKQTLNFDLLKLAGDVESNPGPTSMDWIWRILFLVGAATGAHSGPQLQLQESGPGLVKPSETLSLTCTVSGDSISSGDYYWGWIRQPPGKGLEWIGHIYYSGVTYYNPSLKSRVTISVDTSRNQFSLKLSSVTAADTAVYYCTREDSSNWRSRGQGTLVTVSSGSGGGGSGGGGSGGGGSFEQVQLQQWGAGLLKPSETLSLTCAVFGGSFSGYYWSWIRQPPGKGLEWIGEINHRGNTNDNPSLKSRVTISVDTSKNQFALKLSSVTAADTAVYYCARERGYTYGNFDHWGQGTLVTVSSTREDLKNVFPPEVAVFEPSEAEISHTQKATLVCLATGFYPDHVELSWWVNGKEVHSGVCTDPQPLKEQPALNDSRYCLSSRLRVSATFWQNPRNHFRCQVQFYGLSENDEWTQDRAKPVTQIVSAEAWGRADDVIKIHWQEKKSNTILGSQEGNTMKTNDTYMKFSWLTVPEKSLDKEHRCIVRHENNKNGVDQEIIFPPIKTDVITMDPKDNCSKDANDTLLLQLTNTSAYYMYLLLLLKSVVYFAIITCCLLRRTAFCCNGEKS

SEQ ID NO: 16353 - protein, 998 aa, synthetic construct
MALPVTALLLPLALLLHAARPEVQLVESGGGLVQPGGSLRLSCAASGFSFSDFWMSWVRQAPGKGLEWVATISQAGSEKDYVDSVKGRFTISRDNAKKSLYLQMNSLRAEDTAVYYCASGVYSFDYRGQGTLVTVSSGTGGGGSGGGGSGGGGSEFEIVMTPSSATLSVSPGERATLSCRASQSVSRNLAWYQQKPGQAPRLLIYGASTRATGIPARFSGSGSGTEFTLTISSLQSEDFAVYYCHQYSNWMCSFGQGTKLEIKLEIQNPDPAVYQLRDSKSSDKSVCLFTDFDSQTNVSQSKDSDVYITDKCVLDMRSMDFKSNSAVAWSNKSDFACANAFNNSIIPEDTFFPSPESSDSTDHVKPKETENTKQPSKSCHKPKAIVHTEKVNMMSLTVLGLRMLFAKTVAVNFLLTAKLFFLRAKRSGSGVKQTLNFDLLKLAGDVESNPGPTSMDWIWRILFLVGAATGAHSGPQLQLQESGPGLVKPSETLSLTCTVSGDSISSGDYYWGWIRQPPGKGLEWIGHIYYSGVTYYNPSLKSRVTISVDTSRNQFSLKLSSVTAADTAVYYCTREDSSNWRSRGQGTLVTVSSGSGGGGSGGGGSGGGGSFEEVQLLESGGGLVQPGGSLRLSCAASGFTFSRYAMNWVRQAPGKGLEWVSGISGSGGRTYYADSVKGRFTISRDNSKNTLYLQMNSLRAEDTAVYYCAKDRDFWSGPFDYWGQGTLVTVSSTREDLKNVFPPEVAVFEPSEAEISHTQKATLVCLATGFYPDHVELSWWVNGKEVHSGVCTDPQPLKEQPALNDSRYCLSSRLRVSATFWQNPRNHFRCQVQFYGLSENDEWTQDRAKPVTQIVSAEAWGRADDVIKIHWQEKKSNTILGSQEGNTMKTNDTYMKFSWLTVPEKSLDKEHRCIVRHENNKNGVDQEIIFPPIKTDVITMDPKDNCSKDANDTLLLQLTNTSAYYMYLLLLLKSVVYFAIITCCLLRRTAFCCNGEKS

SEQ ID NO: 16354 - protein, 1003 aa, synthetic construct
MALPVTALLLPLALLLHAARPEVQLVESGGGLVQPGGSLRLSCAASGFSFSDFWMSWVRQAPGKGLEWVATISQAGSEKDYVDSVKGRFTISRDNAKKSLYLQMNSLRAEDTAVYYCASGVYSFDYRGQGTLVTVSSGTGGGGSGGGGSGGGGSEFDIQMTQSPSSLSASVGDRVTITCKASKNIRSYLAWYQQKPGKAPKLLIYSGSTLHSGVPSRFSGSGSGTDFTLTISSLQPEDFATYYCQQHHEYPLTFGQGTKVEIKRLEIQNPDPAVYQLRDSKSSDKSVCLFTDFDSQTNVSQSKDSDVYITDKCVLDMRSMDFKSNSAVAWSNKSDFACANAFNNSIIPEDTFFPSPESSDSTDHVKPKETENTKQPSKSCHKPKAIVHTEKVNMMSLTVLGLRMLFAKTVAVNFLLTAKLFFLRAKRSGSGVKQTLNFDLLKLAGDVESNPGPTSMDWIWRILFLVGAATGAHSGPQLQLQESGPGLVKPSETLSLTCTVSGDSISSGDYYWGWIRQPPGKGLEWIGHIYYSGVTYYNPSLKSRVTISVDTSRNQFSLKLSSVTAADTAVYYCTREDSSNWRSRGQGTLVTVSSGSGGGGSGGGGSGGGGSFEQVQLQESGPGLVKPSETLSLTCTVSGYTITSGYDWSWIRQPPGKGLEWIGYINYGGSTNYKPSLGSRVTISVDTSKNQFSLKLSSVTAADTAVYYCARYNEYKSYIYDWYFDFWGQGTLVTVSSTREDLKNVFPPEVAVFEPSEAEISHTQKATLVCLATGFYPDHVELSWWVNGKEVHSGVCTDPQPLKEQPALNDSRYCLSSRLRVSATFWQNPRNHFRCQVQFYGLSENDEWTQDRAKPVTQIVSAEAWGRADDVIKIHWQEKKSNTILGSQEGNTMKTNDTYMKFSWLTVPEKSLDKEHRCIVRHENNKNGVDQEIIFPPIKTDVITMDPKDNCSKDANDTLLLQLTNTSAYYMYLLLLLKSVVYFAIITCCLLRRTAFCCNGEKS

SEQ ID NO: 16355 - protein, 1005 aa, synthetic construct
MALPVTALLLPLALLLHAARPEVQLVESGGGLVQPGGSLRLSCAASGFSFSDFWMSWVRQAPGKGLEWVATISQAGSEKDYVDSVKGRFTISRDNAKKSLYLQMNSLRAEDTAVYYCASGVYSFDYRGQGTLVTVSSGTGGGGSGGGGSGGGGSEFQSVVTQPPSVSAAPGQKVTISCSGSSSNIGNNYVSWYQQLPGTAPKLLIYDNNKRPSGIPDRFSGSKSGTSATLGITGLQTGDEADYYCGTWDGSLYTMLFGGGTKLTVLLEIQNPDPAVYQLRDSKSSDKSVCLFTDFDSQTNVSQSKDSDVYITDKCVLDMRSMDFKSNSAVAWSNKSDFACANAFNNSIIPEDTFFPSPESSDSTDHVKPKETENTKQPSKSCHKPKAIVHTEKVNMMSLTVLGLRMLFAKTVAVNFLLTAKLFFLRAKRSGSGVKQTLNFDLLKLAGDVESNPGPTSMDWIWRILFLVGAATGAHSGPQLQLQESGPGLVKPSETLSLTCTVSGDSISSGDYYWGWIRQPPGKGLEWIGHIYYSGVTYYNPSLKSRVTISVDTSRNQFSLKLSSVTAADTAVYYCTREDSSNWRSRGQGTLVTVSSGSGGGGSGGGGSGGGGSFEEVQLVESGGGLVKPGGSLRLSCAASGFTFSNAWMSWVRQAPGKGLEWVGFIRSKAYGGTTEYAASVKGRFTISRDDSKSIAYLQMNNLKTEDTAVYYCARDGLYSSSWYDSDYWGQGTLVTVSSTREDLKNVFPPEVAVFEPSEAEISHTQKATLVCLATGFYPDHVELSWWVNGKEVHSGVCTDPQPLKEQPALNDSRYCLSSRLRVSATFWQNPRNHFRCQVQFYGLSENDEWTQDRAKPVTQIVSAEAWGRADDVIKIHWQEKKSNTILGSQEGNTMKTNDTYMKFSWLTVPEKSLDKEHRCIVRHENNKNGVDQEIIFPPIKTDVITMDPKDNCSKDANDTLLLQLTNTSAYYMYLLLLLKSVVYFAIITCCLLRRTAFCCNGEKS

SEQ ID NO: 16356 - protein, 1010 aa, synthetic construct
MALPVTALLLPLALLLHAARPEVQLVESGGGLVQPGGSLRLSCAASGFSFSDFWMSWVRQAPGKGLEWVATISQAGSEKDYVDSVKGRFTISRDNAKKSLYLQMNSLRAEDTAVYYCASGVYSFDYRGQGTLVTVSSGTGGGGSGGGGSGGGGSEFQSVLTQPPSVSGAPGQRVTISCTGSSSNIGAGYDVHWYQQLPGTAPKLLIFGNSNRPSGVPDRFSGFKSGTSASLAITGLQAEDEADYFCQSYDSSLSGSGVFGTGTKVTVLGLEIQNPDPAVYQLRDSKSSDKSVCLFTDFDSQTNVSQSKDSDVYITDKCVLDMRSMDFKSNSAVAWSNKSDFACANAFNNSIIPEDTFFPSPESSDSTDHVKPKETENTKQPSKSCHKPKAIVHTEKVNMMSLTVLGLRMLFAKTVAVNFLLTAKLFFLRAKRSGSGVKQTLNFDLLKLAGDVESNPGPTSMDWIWRILFLVGAATGAHSGPQLQLQESGPGLVKPSETLSLTCTVSGDSISSGDYYWGWIRQPPGKGLEWIGHIYYSGVTYYNPSLKSRVTISVDTSRNQFSLKLSSVTAADTAVYYCTREDSSNWRSRGQGTLVTVSSGSGGGGSGGGGSGGGGSFEQMQLVQSGGGLVQPGRSLRLSCAASGFTFDDYAMHWVRQAPGKGLEWVSGISWNSGSIGYADSVKGRFTISRDNAKNSLYLQMNSLRAEDTALYYCAKDIHSGSYYGLLYYAMDVWGQGTTVTVSSTREDLKNVFPPEVAVFEPSEAEISHTQKATLVCLATGFYPDHVELSWWVNGKEVHSGVCTDPQPLKEQPALNDSRYCLSSRLRVSATFWQNPRNHFRCQVQFYGLSENDEWTQDRAKPVTQIVSAEAWGRADDVIKIHWQEKKSNTILGSQEGNTMKTNDTYMKFSWLTVPEKSLDKEHRCIVRHENNKNGVDQEIIFPPIKTDVITMDPKDNCSKDANDTLLLQLTNTSAYYMYLLLLLKSVVYFAIITCCLLRRTAFCCNGEKS

SEQ ID NO: 16357 - protein, 1010 aa, synthetic construct
MALPVTALLLPLALLLHAARPEVQLVESGGGLVQPGGSLRLSCAASGFSFSDFWMSWVRQAPGKGLEWVATISQAGSEKDYVDSVKGRFTISRDNAKKSLYLQMNSLRAEDTAVYYCASGVYSFDYRGQGTLVTVSSGTGGGGSGGGGSGGGGSEFLPVLTQPPSASGTPGQRVTISCSGRSSNIGSNSVNWYRQLPGAAPKLLIYSNNQRPPGVPVRFSGSKSGTSASLAISGLQSEDEATYYCATWDDNLNVHYVFGTGTKVTVLGSRLEIQNPDPAVYQLRDSKSSDKSVCLFTDFDSQTNVSQSKDSDVYITDKCVLDMRSMDFKSNSAVAWSNKSDFACANAFNNSIIPEDTFFPSPESSDSTDHVKPKETENTKQPSKSCHKPKAIVHTEKVNMMSLTVLGLRMLFAKTVAVNFLLTAKLFFLRAKRSGSGVKQTLNFDLLKLAGDVESNPGPTSMDWIWRILFLVGAATGAHSGPQLQLQESGPGLVKPSETLSLTCTVSGDSISSGDYYWGWIRQPPGKGLEWIGHIYYSGVTYYNPSLKSRVTISVDTSRNQFSLKLSSVTAADTAVYYCTREDSSNWRSRGQGTLVTVSSGSGGGGSGGGGSGGGGSFELEMAQVQLVQSGAEVKKPGSSVKVSCKASGGTFSSYAISWVRQAPGQGLEWMGRIIPILGIANYAQKFQGRVTITADKSTSTAYMELSSLRSEDTAVYYCARGGYYSHDMWSEDWGQGTLVTVSSTREDLKNVFPPEVAVFEPSEAEISHTQKATLVCLATGFYPDHVELSWWVNGKEVHSGVCTDPQPLKEQPALNDSRYCLSSRLRVSATFWQNPRNHFRCQVQFYGLSENDEWTQDRAKPVTQIVSAEAWGRADDVIKIHWQEKKSNTILGSQEGNTMKTNDTYMKFSWLTVPEKSLDKEHRCIVRHENNKNGVDQEIIFPPIKTDVITMDPKDNCSKDANDTLLLQLTNTSAYYMYLLLLLKSVVYFAIITCCLLRRTAFCCNGEKS

SEQ ID NO: 16358 - protein, 1004 aa, synthetic construct
MALPVTALLLPLALLLHAARPEVQLVESGGGLVQPGGSLRLSCAASGFSFSDFWMSWVRQAPGKGLEWVATISQAGSEKDYVDSVKGRFTISRDNAKKSLYLQMNSLRAEDTAVYYCASGVYSFDYRGQGTLVTVSSGTGGGGSGGGGSGGGGSEFDFVMTQSPDSLAVSLGERVTMSCKSSQSLLNSGNQKNYLTWYQQKPGQPPKLLIYWASTRESGVPDRFSGSGSGTDFTLTISSLQAEDVAVYYCQNDYSYPYTFGQGTKLEIKLEIQNPDPAVYQLRDSKSSDKSVCLFTDFDSQTNVSQSKDSDVYITDKCVLDMRSMDFKSNSAVAWSNKSDFACANAFNNSIIPEDTFFPSPESSDSTDHVKPKETENTKQPSKSCHKPKAIVHTEKVNMMSLTVLGLRMLFAKTVAVNFLLTAKLFFLRAKRSGSGVKQTLNFDLLKLAGDVESNPGPTSMDWIWRILFLVGAATGAHSGPQLQLQESGPGLVKPSETLSLTCTVSGDSISSGDYYWGWIRQPPGKGLEWIGHIYYSGVTYYNPSLKSRVTISVDTSRNQFSLKLSSVTAADTAVYYCTREDSSNWRSRGQGTLVTVSSGSGGGGSGGGGSGGGGSFEEVQLVQSGAELKKPGASVKVSCKASGYTFTDYYMKWVRQAPGQGLEWIGDIIPSNGATFYNQKFKGRVTITVDKSTSTAYMELSSLRSEDTAVYYCARSHLLRASWFAYWGQGTLVTVSSTREDLKNVFPPEVAVFEPSEAEISHTQKATLVCLATGFYPDHVELSWWVNGKEVHSGVCTDPQPLKEQPALNDSRYCLSSRLRVSATFWQNPRNHFRCQVQFYGLSENDEWTQDRAKPVTQIVSAEAWGRADDVIKIHWQEKKSNTILGSQEGNTMKTNDTYMKFSWLTVPEKSLDKEHRCIVRHENNKNGVDQEIIFPPIKTDVITMDPKDNCSKDANDTLLLQLTNTSAYYMYLLLLLKSVVYFAIITCCLLRRTAFCCNGEKS

SEQ ID NO: 16359 - protein, 1004 aa, synthetic construct
MALPVTALLLPLALLLHAARPEVQLVESGGGLVQPGGSLRLSCAASGFSFSDFWMSWVRQAPGKGLEWVATISQAGSEKDYVDSVKGRFTISRDNAKKSLYLQMNSLRAEDTAVYYCASGVYSFDYRGQGTLVTVSSGTGGGGSGGGGSGGGGSEFDFVMTQSPDSLAVSLGERVTMSCKSSQSLLNSGNQKNYLTWYQQKPGQPPKLLIYWASTRESGVPDRFSGSGSGTDFTLTISSLQAEDVAVYYCQNDYSYPYTFGQGTKLEIKLEIQNPDPAVYQLRDSKSSDKSVCLFTDFDSQTNVSQSKDSDVYITDKCVLDMRSMDFKSNSAVAWSNKSDFACANAFNNSIIPEDTFFPSPESSDSTDHVKPKETENTKQPSKSCHKPKAIVHTEKVNMMSLTVLGLRMLFAKTVAVNFLLTAKLFFLRAKRSGSGVKQTLNFDLLKLAGDVESNPGPTSMDWIWRILFLVGAATGAHSGPQLQLQESGPGLVKPSETLSLTCTVSGDSISSGDYYWGWIRQPPGKGLEWIGHIYYSGVTYYNPSLKSRVTISVDTSRNQFSLKLSSVTAADTAVYYCTREDSSNWRSRGQGTLVTVSSGSGGGGSGGGGSGGGGSFEQVQLVQSGAELKKPGASVKVSCKASGYTFTDYYMKWVRQAPGQGLEWIGDIIPSNGATFYNQKFKGRVTITVDKSTSTAYMELSSLRSEDTAVYYCARSHLLRASWFAYWGQGTLVTVSSTREDLKNVFPPEVAVFEPSEAEISHTQKATLVCLATGFYPDHVELSWWVNGKEVHSGVCTDPQPLKEQPALNDSRYCLSSRLRVSATFWQNPRNHFRCQVQFYGLSENDEWTQDRAKPVTQIVSAEAWGRADDVIKIHWQEKKSNTILGSQEGNTMKTNDTYMKFSWLTVPEKSLDKEHRCIVRHENNKNGVDQEIIFPPIKTDVITMDPKDNCSKDANDTLLLQLTNTSAYYMYLLLLLKSVVYFAIITCCLLRRTAFCCNGEKS

SEQ ID NO: 16360 - protein, 994 aa, synthetic construct
MALPVTALLLPLALLLHAARPEVQLVESGGGLVQPGGSLRLSCAASGFSFSDFWMSWVRQAPGKGLEWVATISQAGSEKDYVDSVKGRFTISRDNAKKSLYLQMNSLRAEDTAVYYCASGVYSFDYRGQGTLVTVSSGTGGGGSGGGGSGGGGSEFDVQITQSPSYLAASPGETITINCRASKSISKDLAWYQEKPGKTNKLLIYSGSTLQSGIPSRFSGSGSGTDFTLTISSLEPEDFAMYYCQQHNKYPYTFGGGTKLEIKRLEIQNPDPAVYQLRDSKSSDKSVCLFTDFDSQTNVSQSKDSDVYITDKCVLDMRSMDFKSNSAVAWSNKSDFACANAFNNSIIPEDTFFPSPESSDSTDHVKPKETENTKQPSKSCHKPKAIVHTEKVNMMSLTVLGLRMLFAKTVAVNFLLTAKLFFLRAKRSGSGVKQTLNFDLLKLAGDVESNPGPTSMDWIWRILFLVGAATGAHSGPQLQLQESGPGLVKPSETLSLTCTVSGDSISSGDYYWGWIRQPPGKGLEWIGHIYYSGVTYYNPSLKSRVTISVDTSRNQFSLKLSSVTAADTAVYYCTREDSSNWRSRGQGTLVTVSSGSGGGGSGGGGSGGGGSFEQVQLQQPGAELVRPGASVKLSCKASGYTFTSYWMNWVKQRPDQGLEWIGRIDPYDSETHYNQKFKDKAILTVDKSSSTAYMQLSSLTSEDSAVYYCARGNWDDYWGQGTTLTVSSTREDLKNVFPPEVAVFEPSEAEISHTQKATLVCLATGFYPDHVELSWWVNGKEVHSGVCTDPQPLKEQPALNDSRYCLSSRLRVSATFWQNPRNHFRCQVQFYGLSENDEWTQDRAKPVTQIVSAEAWGRADDVIKIHWQEKKSNTILGSQEGNTMKTNDTYMKFSWLTVPEKSLDKEHRCIVRHENNKNGVDQEIIFPPIKTDVITMDPKDNCSKDANDTLLLQLTNTSAYYMYLLLLLKSVVYFAIITCCLLRRTAFCCNGEKS

SEQ ID NO: 16361 - protein, 996 aa, synthetic construct
MALPVTALLLPLALLLHAARPEVQLVESGGGLVQPGGSLRLSCAASGFSFSDFWMSWVRQAPGKGLEWVATISQAGSEKDYVDSVKGRFTISRDNAKKSLYLQMNSLRAEDTAVYYCASGVYSFDYRGQGTLVTVSSGTGGGGSGGGGSGGGGSEFEIVLTQSPTSMTASPGEQVTITCRASSSINYMHWYQQKPGASPRPWIYETSKLASGVPDRFSGSASGTSYSLTINNMEAEDAATYYCQQWNYPSWTFGGGTKLELKLEIQNPDPAVYQLRDSKSSDKSVCLFTDFDSQTNVSQSKDSDVYITDKCVLDMRSMDFKSNSAVAWSNKSDFACANAFNNSIIPEDTFFPSPESSDSTDHVKPKETENTKQPSKSCHKPKAIVHTEKVNMMSLTVLGLRMLFAKTVAVNFLLTAKLFFLRAKRSGSGVKQTLNFDLLKLAGDVESNPGPTSMDWIWRILFLVGAATGAHSGPQLQLQESGPGLVKPSETLSLTCTVSGDSISSGDYYWGWIRQPPGKGLEWIGHIYYSGVTYYNPSLKSRVTISVDTSRNQFSLKLSSVTAADTAVYYCTREDSSNWRSRGQGTLVTVSSGSGGGGSGGGGSGGGGSFEEVQLVESGGGLVQPGRSLKLSCAASGFTFSDYNMAWVRQAPKKGLEWVATILYDGGRTYYRGSVKGRFTISRDNAKSTLYLRMDSLRSEDTATYYCATHSRGTDYFDYWGQGVMVTVSSTREDLKNVFPPEVAVFEPSEAEISHTQKATLVCLATGFYPDHVELSWWVNGKEVHSGVCTDPQPLKEQPALNDSRYCLSSRLRVSATFWQNPRNHFRCQVQFYGLSENDEWTQDRAKPVTQIVSAEAWGRADDVIKIHWQEKKSNTILGSQEGNTMKTNDTYMKFSWLTVPEKSLDKEHRCIVRHENNKNGVDQEIIFPPIKTDVITMDPKDNCSKDANDTLLLQLTNTSAYYMYLLLLLKSVVYFAIITCCLLRRTAFCCNGEKS

SEQ ID NO: 16362 - protein, 1005 aa, synthetic construct
MALPVTALLLPLALLLHAARPEVQLVESGGGLVQPGGSLRLSCAASGFSFSDFWMSWVRQAPGKGLEWVATISQAGSEKDYVDSVKGRFTISRDNAKKSLYLQMNSLRAEDTAVYYCASGVYSFDYRGQGTLVTVSSGTGGGGSGGGGSGGGGSEFDIVMTQSPSSLAVSEGETVTINCKSSQSFLSSGDGKNYVAWYQYKPGQSPKLLIYWASTRQSGVPDRFIGSGSGTDFTLTISTVQAEDLAIYYCQQYYDTPLTFGSGTKLEIKLEIQNPDPAVYQLRDSKSSDKSVCLFTDFDSQTNVSQSKDSDVYITDKCVLDMRSMDFKSNSAVAWSNKSDFACANAFNNSIIPEDTFFPSPESSDSTDHVKPKETENTKQPSKSCHKPKAIVHTEKVNMMSLTVLGLRMLFAKTVAVNFLLTAKLFFLRAKRSGSGVKQTLNFDLLKLAGDVESNPGPTSMDWIWRILFLVGAATGAHSGPQLQLQESGPGLVKPSETLSLTCTVSGDSISSGDYYWGWIRQPPGKGLEWIGHIYYSGVTYYNPSLKSRVTISVDTSRNQFSLKLSSVTAADTAVYYCTREDSSNWRSRGQGTLVTVSSGSGGGGSGGGGSGGGGSFEEVKLQESGPSLVQSSQTLSLTCTVSGFSLTSYHIHWVRQTPGKGLEWMGVMWSDGDTSYNSALKSRLSISRDTSQSQVFLKMNSLQTEDTATYYCARGYYSSYLYLWFAYWGQGTLVTVSSTREDLKNVFPPEVAVFEPSEAEISHTQKATLVCLATGFYPDHVELSWWVNGKEVHSGVCTDPQPLKEQPALNDSRYCLSSRLRVSATFWQNPRNHFRCQVQFYGLSENDEWTQDRAKPVTQIVSAEAWGRADDVIKIHWQEKKSNTILGSQEGNTMKTNDTYMKFSWLTVPEKSLDKEHRCIVRHENNKNGVDQEIIFPPIKTDVITMDPKDNCSKDANDTLLLQLTNTSAYYMYLLLLLKSVVYFAIITCCLLRRTAFCCNGEKS

SEQ ID NO: 16363 - protein, 1009 aa, synthetic construct
MALPVTALLLPLALLLHAARPEVQLVESGGGLVQPGGSLRLSCAASGFSFSDFWMSWVRQAPGKGLEWVATISQAGSEKDYVDSVKGRFTISRDNAKKSLYLQMNSLRAEDTAVYYCASGVYSFDYRGQGTLVTVSSGTGGGGSGGGGSGGGGSEFDVLMTQTPVSLPVSLGGQVSISCRSSQSLVHSDGDTYLHWYLQKPGQSPQLLIYRVSNRFSGVPDRFSGSGSGTDFTLKISRVEPEDLGLYYCLQTTHFPPWTFGGGTKLEMKLEIQNPDPAVYQLRDSKSSDKSVCLFTDFDSQTNVSQSKDSDVYITDKCVLDMRSMDFKSNSAVAWSNKSDFACANAFNNSIIPEDTFFPSPESSDSTDHVKPKETENTKQPSKSCHKPKAIVHTEKVNMMSLTVLGLRMLFAKTVAVNFLLTAKLFFLRAKRSGSGVKQTLNFDLLKLAGDVESNPGPTSMDWIWRILFLVGAATGAHSGPQLQLQESGPGLVKPSETLSLTCTVSGDSISSGDYYWGWIRQPPGKGLEWIGHIYYSGVTYYNPSLKSRVTISVDTSRNQFSLKLSSVTAADTAVYYCTREDSSNWRSRGQGTLVTVSSGSGGGGSGGGGSGGGGSFEQVQLQQSGPELRRPGSSVRLSCKASGYRIKDFLIHWIKNRPEHGLEWIGWIDPEDGETKYAQKFQTKATLTADTSSNTAYMQLSSLTSEDTATYFCARWGDVYYGLMRGHVMDAWGQGTSVTVSSTREDLKNVFPPEVAVFEPSEAEISHTQKATLVCLATGFYPDHVELSWWVNGKEVHSGVCTDPQPLKEQPALNDSRYCLSSRLRVSATFWQNPRNHFRCQVQFYGLSENDEWTQDRAKPVTQIVSAEAWGRADDVIKIHWQEKKSNTILGSQEGNTMKTNDTYMKFSWLTVPEKSLDKEHRCIVRHENNKNGVDQEIIFPPIKTDVITMDPKDNCSKDANDTLLLQLTNTSAYYMYLLLLLKSVVYFAIITCCLLRRTAFCCNGEKS

SEQ ID NO: 16364 - protein, 1004 aa, synthetic construct
MALPVTALLLPLALLLHAARPEVQLVESGGGLVQPGGSLRLSCAASGFSFSDFWMSWVRQAPGKGLEWVATISQAGSEKDYVDSVKGRFTISRDNAKKSLYLQMNSLRAEDTAVYYCASGVYSFDYRGQGTLVTVSSGTGGGGSGGGGSGGGGSEFDIVMTQSPATLSLSPGERATLSCRSSKSLQNVNGNTYLYWFQQKPGQSPQLLIYRMSNLNSGVPDRFSGSGSGTEFTLTISSLEPEDFAVYYCMQHLEYPITFGAGTKLEIKLEIQNPDPAVYQLRDSKSSDKSVCLFTDFDSQTNVSQSKDSDVYITDKCVLDMRSMDFKSNSAVAWSNKSDFACANAFNNSIIPEDTFFPSPESSDSTDHVKPKETENTKQPSKSCHKPKAIVHTEKVNMMSLTVLGLRMLFAKTVAVNFLLTAKLFFLRAKRSGSGVKQTLNFDLLKLAGDVESNPGPTSMDWIWRILFLVGAATGAHSGPQLQLQESGPGLVKPSETLSLTCTVSGDSISSGDYYWGWIRQPPGKGLEWIGHIYYSGVTYYNPSLKSRVTISVDTSRNQFSLKLSSVTAADTAVYYCTREDSSNWRSRGQGTLVTVSSGSGGGGSGGGGSGGGGSFEEVQLVESGGGLVKPGGSLKLSCAASGYTFTSYVMHWVRQAPGKGLEWIGYINPYNDGTKYNEKFQGRVTISSDKSISTAYMELSSLRSEDTAMYYCARGTYYYGTRVFDYWGQGTLVTVSSTREDLKNVFPPEVAVFEPSEAEISHTQKATLVCLATGFYPDHVELSWWVNGKEVHSGVCTDPQPLKEQPALNDSRYCLSSRLRVSATFWQNPRNHFRCQVQFYGLSENDEWTQDRAKPVTQIVSAEAWGRADDVIKIHWQEKKSNTILGSQEGNTMKTNDTYMKFSWLTVPEKSLDKEHRCIVRHENNKNGVDQEIIFPPIKTDVITMDPKDNCSKDANDTLLLQLTNTSAYYMYLLLLLKSVVYFAIITCCLLRRTAFCCNGEKS

SEQ ID NO: 16365 - protein, 1000 aa, synthetic construct
MALPVTALLLPLALLLHAARPEVQLVESGGGLVQPGGSLRLSCAASGFSFSDFWMSWVRQAPGKGLEWVATISQAGSEKDYVDSVKGRFTISRDNAKKSLYLQMNSLRAEDTAVYYCASGVYSFDYRGQGTLVTVSSGTGGGGSGGGGSGGGGSEFDIQMTQSPSSLSASVGDRVTITCKASDHINNWLAWYQQKPGQAPKLLIYGATTLETGVPSRFSGSGSGTDYTLTISSLQPEDFATYYCQQSWNTPWTFGQGTKLEIKRLEIQNPDPAVYQLRDSKSSDKSVCLFTDFDSQTNVSQSKDSDVYITDKCVLDMRSMDFKSNSAVAWSNKSDFACANAFNNSIIPEDTFFPSPESSDSTDHVKPKETENTKQPSKSCHKPKAIVHTEKVNMMSLTVLGLRMLFAKTVAVNFLLTAKLFFLRAKRSGSGVKQTLNFDLLKLAGDVESNPGPTSMDWIWRILFLVGAATGAHSGPQLQLQESGPGLVKPSETLSLTCTVSGDSISSGDYYWGWIRQPPGKGLEWIGHIYYSGVTYYNPSLKSRVTISVDTSRNQFSLKLSSVTAADTAVYYCTREDSSNWRSRGQGTLVTVSSGSGGGGSGGGGSGGGGSFEQVQLQQPGAELVKPGASVKMSCKASGYAFSSYWINWMKQKPGQGLEWIGQIYPGDGDTNYNGKFKGRATLTADTSSSTAYMQLSSLTSEDSAVYFCARSITTVVGCAMDYWGQGTSVTVSSTREDLKNVFPPEVAVFEPSEAEISHTQKATLVCLATGFYPDHVELSWWVNGKEVHSGVCTDPQPLKEQPALNDSRYCLSSRLRVSATFWQNPRNHFRCQVQFYGLSENDEWTQDRAKPVTQIVSAEAWGRADDVIKIHWQEKKSNTILGSQEGNTMKTNDTYMKFSWLTVPEKSLDKEHRCIVRHENNKNGVDQEIIFPPIKTDVITMDPKDNCSKDANDTLLLQLTNTSAYYMYLLLLLKSVVYFAIITCCLLRRTAFCCNGEKS

SEQ ID NO: 16366 - protein, 1002 aa, synthetic construct
MALPVTALLLPLALLLHAARPEVQLVESGGGLVQPGGSLRLSCAASGFSFSDFWMSWVRQAPGKGLEWVATISQAGSEKDYVDSVKGRFTISRDNAKKSLYLQMNSLRAEDTAVYYCASGVYSFDYRGQGTLVTVSSGTGGGGSGGGGSGGGGSEFQIVLSQSPAILSASPGEKVTMTCRASSSVSYMHWYQQKPGSSPKPWIYATSNLASGVPARFSGSGSGTSYSFTISRVEAEDAATYYCQQWTFNPPTFGGGTRLEIKRTVAALEIQNPDPAVYQLRDSKSSDKSVCLFTDFDSQTNVSQSKDSDVYITDKCVLDMRSMDFKSNSAVAWSNKSDFACANAFNNSIIPEDTFFPSPESSDSTDHVKPKETENTKQPSKSCHKPKAIVHTEKVNMMSLTVLGLRMLFAKTVAVNFLLTAKLFFLRAKRSGSGVKQTLNFDLLKLAGDVESNPGPTSMDWIWRILFLVGAATGAHSGPQLQLQESGPGLVKPSETLSLTCTVSGDSISSGDYYWGWIRQPPGKGLEWIGHIYYSGVTYYNPSLKSRVTISVDTSRNQFSLKLSSVTAADTAVYYCTREDSSNWRSRGQGTLVTVSSGSGGGGSGGGGSGGGGSFEQAYLQQSGAELVRPGASVKMSCKASGYTFTSYNMHWVKQTPRQGLEWIGGIYPGNGDTSYNQKFKGKATLTVGKSSSTAYMQLSSLTSEDSAVYFCARYDYNYAMDYWGQGTSVTVSSASTREDLKNVFPPEVAVFEPSEAEISHTQKATLVCLATGFYPDHVELSWWVNGKEVHSGVCTDPQPLKEQPALNDSRYCLSSRLRVSATFWQNPRNHFRCQVQFYGLSENDEWTQDRAKPVTQIVSAEAWGRADDVIKIHWQEKKSNTILGSQEGNTMKTNDTYMKFSWLTVPEKSLDKEHRCIVRHENNKNGVDQEIIFPPIKTDVITMDPKDNCSKDANDTLLLQLTNTSAYYMYLLLLLKSVVYFAIITCCLLRRTAFCCNGEKS

SEQ ID NO: 16367 - protein, 1000 aa, synthetic construct
MALPVTALLLPLALLLHAARPEVQLVESGGGLVQPGGSLRLSCAASGFSFSDFWMSWVRQAPGKGLEWVATISQAGSEKDYVDSVKGRFTISRDNAKKSLYLQMNSLRAEDTAVYYCASGVYSFDYRGQGTLVTVSSGTGGGGSGGGGSGGGGSEFEIVLTQSPATLSLSPGERATLSCRASQSVSSYLAWYQQKPGQAPRLLIYDASNRATGIPARFSGSGSGTDFTLTISSLEPEDFAVYYCQQRSNWPITFGQGTRLEIKLEIQNPDPAVYQLRDSKSSDKSVCLFTDFDSQTNVSQSKDSDVYITDKCVLDMRSMDFKSNSAVAWSNKSDFACANAFNNSIIPEDTFFPSPESSDSTDHVKPKETENTKQPSKSCHKPKAIVHTEKVNMMSLTVLGLRMLFAKTVAVNFLLTAKLFFLRAKRSGSGVKQTLNFDLLKLAGDVESNPGPTSMDWIWRILFLVGAATGAHSGPQLQLQESGPGLVKPSETLSLTCTVSGDSISSGDYYWGWIRQPPGKGLEWIGHIYYSGVTYYNPSLKSRVTISVDTSRNQFSLKLSSVTAADTAVYYCTREDSSNWRSRGQGTLVTVSSGSGGGGSGGGGSGGGGSFEEVQLVESGGGLVQPDRSLRLSCAASGFTFHDYAMHWVRQAPGKGLEWVSTISWNSGTIGYADSVKGRFTISRDNAKNSLYLQMNSLRAEDTALYYCAKDIQYGNYYYGMDVWGQGTTVTVSSTREDLKNVFPPEVAVFEPSEAEISHTQKATLVCLATGFYPDHVELSWWVNGKEVHSGVCTDPQPLKEQPALNDSRYCLSSRLRVSATFWQNPRNHFRCQVQFYGLSENDEWTQDRAKPVTQIVSAEAWGRADDVIKIHWQEKKSNTILGSQEGNTMKTNDTYMKFSWLTVPEKSLDKEHRCIVRHENNKNGVDQEIIFPPIKTDVITMDPKDNCSKDANDTLLLQLTNTSAYYMYLLLLLKSVVYFAIITCCLLRRTAFCCNGEKS

SEQ ID NO: 16368 - protein, 995 aa, synthetic construct
MALPVTALLLPLALLLHAARPEVQLVESGGGLVQPGGSLRLSCAASGFSFSDFWMSWVRQAPGKGLEWVATISQAGSEKDYVDSVKGRFTISRDNAKKSLYLQMNSLRAEDTAVYYCASGVYSFDYRGQGTLVTVSSGTGGGGSGGGGSGGGGSEFDIQMTQSPSSLSASVGDRVTINCKASQDINSYLSWFQQKPGKAPKTLIYRANRLVDGVPSRFSGSGSGQDYTLTISSLQPEDFATYYCLQYDEFPLTFGGGTKVEIKLEIQNPDPAVYQLRDSKSSDKSVCLFTDFDSQTNVSQSKDSDVYITDKCVLDMRSMDFKSNSAVAWSNKSDFACANAFNNSIIPEDTFFPSPESSDSTDHVKPKETENTKQPSKSCHKPKAIVHTEKVNMMSLTVLGLRMLFAKTVAVNFLLTAKLFFLRAKRSGSGVKQTLNFDLLKLAGDVESNPGPTSMDWIWRILFLVGAATGAHSGPQLQLQESGPGLVKPSETLSLTCTVSGDSISSGDYYWGWIRQPPGKGLEWIGHIYYSGVTYYNPSLKSRVTISVDTSRNQFSLKLSSVTAADTAVYYCTREDSSNWRSRGQGTLVTVSSGSGGGGSGGGGSGGGGSFEQVQLVQSGAEVKKPGASVKVSCKASGYTFTNYDINWVRQAPGQGLEWIGWIYPGDGSTKYNEKFKAKATLTADTSTSTAYMELRSLRSDDTAVYYCASGYEDAMDYWGQGTTVTVSSTREDLKNVFPPEVAVFEPSEAEISHTQKATLVCLATGFYPDHVELSWWVNGKEVHSGVCTDPQPLKEQPALNDSRYCLSSRLRVSATFWQNPRNHFRCQVQFYGLSENDEWTQDRAKPVTQIVSAEAWGRADDVIKIHWQEKKSNTILGSQEGNTMKTNDTYMKFSWLTVPEKSLDKEHRCIVRHENNKNGVDQEIIFPPIKTDVITMDPKDNCSKDANDTLLLQLTNTSAYYMYLLLLLKSVVYFAIITCCLLRRTAFCCNGEKS

SEQ ID NO: 16369 - protein, 997 aa, synthetic construct
MALPVTALLLPLALLLHAARPEVQLVESGGGLVQPGGSLRLSCAASGFSFSDFWMSWVRQAPGKGLEWVATISQAGSEKDYVDSVKGRFTISRDNAKKSLYLQMNSLRAEDTAVYYCASGVYSFDYRGQGTLVTVSSGTGGGGSGGGGSGGGGSEFDIVMTQTPLSLSVTPGQPASISCKSSQSLLDGDGKTYLNWLLQKPGQSPQRLIYLVSKLDSGVPDRFSGSGSGTDFTLKISRVEAEDVGVYYCWQGTHFPRTFGQGTKLEIKLEIQNPDPAVYQLRDSKSSDKSVCLFTDFDSQTNVSQSKDSDVYITDKCVLDMRSMDFKSNSAVAWSNKSDFACANAFNNSIIPEDTFFPSPESSDSTDHVKPKETENTKQPSKSCHKPKAIVHTEKVNMMSLTVLGLRMLFAKTVAVNFLLTAKLFFLRAKRSGSGVKQTLNFDLLKLAGDVESNPGPTSMDWIWRILFLVGAATGAHSGPQLQLQESGPGLVKPSETLSLTCTVSGDSISSGDYYWGWIRQPPGKGLEWIGHIYYSGVTYYNPSLKSRVTISVDTSRNQFSLKLSSVTAADTAVYYCTREDSSNWRSRGQGTLVTVSSGSGGGGSGGGGSGGGGSFEQVQLVQSGAEVKKPGASVKVSCKASGYTFKDTYIHWVRQAPGQGLEWMGRIDPANGNTKYDPKFQGRVTMTRDTSISTAYMELSRLRSDDTAVYYCARRGGVDWGQGTLVTVSSTREDLKNVFPPEVAVFEPSEAEISHTQKATLVCLATGFYPDHVELSWWVNGKEVHSGVCTDPQPLKEQPALNDSRYCLSSRLRVSATFWQNPRNHFRCQVQFYGLSENDEWTQDRAKPVTQIVSAEAWGRADDVIKIHWQEKKSNTILGSQEGNTMKTNDTYMKFSWLTVPEKSLDKEHRCIVRHENNKNGVDQEIIFPPIKTDVITMDPKDNCSKDANDTLLLQLTNTSAYYMYLLLLLKSVVYFAIITCCLLRRTAFCCNGEKS

SEQ ID NO: 16370 - protein, 998 aa, synthetic construct
MALPVTALLLPLALLLHAARPEVQLVESGGGLVQPGGSLRLSCAASGFSFSDFWMSWVRQAPGKGLEWVATISQAGSEKDYVDSVKGRFTISRDNAKKSLYLQMNSLRAEDTAVYYCASGVYSFDYRGQGTLVTVSSGTGGGGSGGGGSGGGGSEFDIQMTQSPSSLSASVGDRVTITCKASQDVSTAVAWFQQKPGKAPKLLIYSPSYRYTGVPSRFSGSGSGTDFTLTISSLQPEDFTYYCQQLYSTPYTFGQGTKVEIKLEIQNPDPAVYQLRDSKSSDKSVCLFTDFDSQTNVSQSKDSDVYITDKCVLDMRSMDFKSNSAVAWSNKSDFACANAFNNSIIPEDTFFPSPESSDSTDHVKPKETENTKQPSKSCHKPKAIVHTEKVNMMSLTVLGLRMLFAKTVAVNFLLTAKLFFLRAKRSGSGVKQTLNFDLLKLAGDVESNPGPTSMDWIWRILFLVGAATGAHSGPQLQLQESGPGLVKPSETLSLTCTVSGDSISSGDYYWGWIRQPPGKGLEWIGHIYYSGVTYYNPSLKSRVTISVDTSRNQFSLKLSSVTAADTAVYYCTREDSSNWRSRGQGTLVTVSSGSGGGGSGGGGSGGGGSFEEVQLVQSGAEVKKPGASVKVSCKASGYTFTDYYLDVVVRQAPGQGLEWIGRVNPYNGGTIYNQKFKGRVTLTRDTSTSTAYLELSSLRSEDTAVYYCARDHYRYDPLLDYWGQGTLVTVSSTREDLKNVFPPEVAVFEPSEAEISHTQKATLVCLATGFYPDHVELSWWVNGKEVHSGVCTDPQPLKEQPALNDSRYCLSSRLRVSATFWQNPRNHFRCQVQFYGLSENDEWTQDRAKPVTQIVSAEAWGRADDVIKIHWQEKKSNTILGSQEGNTMKTNDTYMKFSWLTVPEKSLDKEHRCIVRHENNKNGVDQEIIFPPIKTDVITMDPKDNCSKDANDTLLLQLTNTSAYYMYLLLLLKSVVYFAIITCCLLRRTAFCCNGEKS

SEQ ID NO: 16371 - protein, 1004 aa, synthetic construct
MALPVTALLLPLALLLHAARPEVQLVESGGGLVQPGGSLRLSCAASGFSFSDFWMSWVRQAPGKGLEWVATISQAGSEKDYVDSVKGRFTISRDNAKKSLYLQMNSLRAEDTAVYYCASGVYSFDYRGQGTLVTVSSGTGGGGSGGGGSGGGGSEFDIQMTQSPSSLSASVGDRVTITCRASQSVSTSSYNYMHWYQQKPGKPPKLLIKYASNLESGVPSRFSGSGSGTDFTLTISSLQPEDFATYYCQHSWEIPLTFGQGTKVEIKLEIQNPDPAVYQLRDSKSSDKSVCLFTDFDSQTNVSQSKDSDVYITDKCVLDMRSMDFKSNSAVAWSNKSDFACANAFNNSIIPEDTFFPSPESSDSTDHVKPKETENTKQPSKSCHKPKAIVHTEKVNMMSLTVLGLRMLFAKTVAVNFLLTAKLFFLRAKRSGSGVKQTLNFDLLKLAGDVESNPGPTSMDWIWRILFLVGAATGAHSGPQLQLQESGPGLVKPSETLSLTCTVSGDSISSGDYYWGWIRQPPGKGLEWIGHIYYSGVTYYNPSLKSRVTISVDTSRNQFSLKLSSVTAADTAVYYCTREDSSNWRSRGQGTLVTVSSGSGGGGSGGGGSGGGGSFEEVQLVQSGAEVKKPGASVKVSCKASGYSFTDYYMHWVRQAPGQGLEWIGRINPYNGAAFYSQNFKDRVTLTVDTSTSTAYLELSSLRSEDTAVYYCAIERGADLEGYAMDYWGQGTLVTVSSTREDLKNVFPPEVAVFEPSEAEISHTQKATLVCLATGFYPDHVELSWWVNGKEVHSGVCTDPQPLKEQPALNDSRYCLSSRLRVSATFWQNPRNHFRCQVQFYGLSENDEWTQDRAKPVTQIVSAEAWGRADDVIKIHWQEKKSNTILGSQEGNTMKTNDTYMKFSWLTVPEKSLDKEHRCIVRHENNKNGVDQEIIFPPIKTDVITMDPKDNCSKDANDTLLLQLTNTSAYYMYLLLLLKSVVYFAIITCCLLRRTAFCCNGEKS

SEQ ID NO: 16372 - protein, 1002 aa, synthetic construct
MALPVTALLLPLALLLHAARPEVQLVESGGGLVQPGGSLRLSCAASGFSFSDFWMSWVRQAPGKGLEWVATISQAGSEKDYVDSVKGRFTISRDNAKKSLYLQMNSLRAEDTAVYYCASGVYSFDYRGQGTLVTVSSGTGGGGSGGGGSGGGGSEFEIVLTQSPATLSASPGERVTLTCRASSNVISSYVHWYQQKPGSSPRLFLYSTSNLASGVPSRFSGSGSGTDFTFTISSLEAEDAATYYCQQYSGYPLTFGQGTRLEIKLEIQNPDPAVYQLRDSKSSDKSVCLFTDFDSQTNVSQSKDSDVYITDKCVLDMRSMDFKSNSAVAWSNKSDFACANAFNNSIIPEDTFFPSPESSDSTDHVKPKETENTKQPSKSCHKPKAIVHTEKVNMMSLTVLGLRMLFAKTVAVNFLLTAKLFFLRAKRSGSGVKQTLNFDLLKLAGDVESNPGPTSMDWIWRILFLVGAATGAHSGPQLQLQESGPGLVKPSETLSLTCTVSGDSISSGDYYWGWIRQPPGKGLEWIGHIYYSGVTYYNPSLKSRVTISVDTSRNQFSLKLSSVTAADTAVYYCTREDSSNWRSRGQGTLVTVSSGSGGGGSGGGGSGGGGSFEQVQLQESGPGLVKPSETLSLTCAVSGYSITSAYYWNWIRQPPGKGLEWIGYISYDGRNNYNPSLKNRITINPDTSKNQFSLQLNSVTPEDTAVYYCAREGDYDVGNYYAMDYWGQGTLVTVSSTREDLKNVFPPEVAVFEPSEAEISHTQKATLVCLATGFYPDHVELSWWVNGKEVHSGVCTDPQPLKEQPALNDSRYCLSSRLRVSATFWQNPRNHFRCQVQFYGLSENDEWTQDRAKPVTQIVSAEAWGRADDVIKIHWQEKKSNTILGSQEGNTMKTNDTYMKFSWLTVPEKSLDKEHRCIVRHENNKNGVDQEIIFPPIKTDVITMDPKDNCSKDANDTLLLQLTNTSAYYMYLLLLLKSVVYFAIITCCLLRRTAFCCNGEKS

SEQ ID NO: 16373 - protein, 1002 aa, synthetic construct
MALPVTALLLPLALLLHAARPEVQLVESGGGLVQPGGSLRLSCAASGFSFSDFWMSWVRQAPGKGLEWVATISQAGSEKDYVDSVKGRFTISRDNAKKSLYLQMNSLRAEDTAVYYCASGVYSFDYRGQGTLVTVSSGTGGGGSGGGGSGGGGSEFEIVLTQSPATLSLSPGERATLSCRASSNVISSYVHWYQQKPGQAPRLLIYSTSNLASGIPARFSGSGSGTDFTLTISSLEPEDFAVYYCQQYSGYPLTFGQGTRLEIKLEIQNPDPAVYQLRDSKSSDKSVCLFTDFDSQTNVSQSKDSDVYITDKCVLDMRSMDFKSNSAVAWSNKSDFACANAFNNSIIPEDTFFPSPESSDSTDHVKPKETENTKQPSKSCHKPKAIVHTEKVNMMSLTVLGLRMLFAKTVAVNFLLTAKLFFLRAKRSGSGVKQTLNFDLLKLAGDVESNPGPTSMDWIWRILFLVGAATGAHSGPQLQLQESGPGLVKPSETLSLTCTVSGDSISSGDYYWGWIRQPPGKGLEWIGHIYYSGVTYYNPSLKSRVTISVDTSRNQFSLKLSSVTAADTAVYYCTREDSSNWRSRGQGTLVTVSSGSGGGGSGGGGSGGGGSFEEVQLVESGGGLVQPGRSLRLSCAASGYSITSAYYWNWVRQAPGKGLEWVSYISYDGRNNYNPSLKNRFTISRDNAKKSLYLQMNSLRAEDTALYYCAKEGDYDVGNYYAMDYWGQGTTVTVSSTREDLKNVFPPEVAVFEPSEAEISHTQKATLVCLATGFYPDHVELSWWVNGKEVHSGVCTDPQPLKEQPALNDSRYCLSSRLRVSATFWQNPRNHFRCQVQFYGLSENDEWTQDRAKPVTQIVSAEAWGRADDVIKIHWQEKKSNTILGSQEGNTMKTNDTYMKFSWLTVPEKSLDKEHRCIVRHENNKNGVDQEIIFPPIKTDVITMDPKDNCSKDANDTLLLQLTNTSAYYMYLLLLLKSVVYFAIITCCLLRRTAFCCNGEKS

SEQ ID NO: 16374 - protein, 1001 aa, synthetic construct
MALPVTALLLPLALLLHAARPEVQLVESGGGLVQPGGSLRLSCAASGFSFSDFWMSWVRQAPGKGLEWVATISQAGSEKDYVDSVKGRFTISRDNAKKSLYLQMNSLRAEDTAVYYCASGVYSFDYRGQGTLVTVSSGTGGGGSGGGGSGGGGSEFDVVMTQTPLSLPVSLGDQASISCRSSQSLVHSNGNTYLRWYLQKPGQSPKVLIYKVSNRVSGVPDRFSGSGSGTDFTLKINRVEAEDLGVYFCSQSTHVPWTFGGGTKLEIKLEIQNPDPAVYQLRDSKSSDKSVCLFTDFDSQTNVSQSKDSDVYITDKCVLDMRSMDFKSNSAVAWSNKSDFACANAFNNSIIPEDTFFPSPESSDSTDHVKPKETENTKQPSKSCHKPKAIVHTEKVNMMSLTVLGLRMLFAKTVAVNFLLTAKLFFLRAKRSGSGVKQTLNFDLLKLAGDVESNPGPTSMDWIWRILFLVGAATGAHSGPQLQLQESGPGLVKPSETLSLTCTVSGDSISSGDYYWGWIRQPPGKGLEWIGHIYYSGVTYYNPSLKSRVTISVDTSRNQFSLKLSSVTAADTAVYYCTREDSSNWRSRGQGTLVTVSSGSGGGGSGGGGSGGGGSFEGVKLDETGGGLVQPGGAMKLSCVTSGFTFGHYWMNWVRQSPEKGLEWVAQFRNKPYNYETYYSDSVKGRFTISRDDSKSSVYLQMNNLRVEDTGIYYCTGASYGMEYLGQGTSVTVSTTREDLKNVFPPEVAVFEPSEAEISHTQKATLVCLATGFYPDHVELSWWVNGKEVHSGVCTDPQPLKEQPALNDSRYCLSSRLRVSATFWQNPRNHFRCQVQFYGLSENDEWTQDRAKPVTQIVSAEAWGRADDVIKIHWQEKKSNTILGSQEGNTMKTNDTYMKFSWLTVPEKSLDKEHRCIVRHENNKNGVDQEIIFPPIKTDVITMDPKDNCSKDANDTLLLQLTNTSAYYMYLLLLLKSVVYFAIITCCLLRRTAFCCNGEKS

SEQ ID NO: 16375 - protein, 1007 aa, synthetic construct
MALPVTALLLPLALLLHAARPEVQLVESGGGLVQPGGSLRLSCAASGFSFSDFWMSWVRQAPGKGLEWVATISQAGSEKDYVDSVKGRFTISRDNAKKSLYLQMNSLRAEDTAVYYCASGVYSFDYRGQGTLVTVSSGTGGGGSGGGGSGGGGSEFQVQLVESGGNLVQPGGSLRLSCAASGFTFGSFSMSWVRQAPGGGLEWVAGLSARSSLTHYADSVKGRFTISRDNAKNSVYLQMNSLRVEDTAVYYCARRSYDSSGYWGHFYSYMDVWGQGTLVTVSLEIQNPDPAVYQLRDSKSSDKSVCLFTDFDSQTNVSQSKDSDVYITDKCVLDMRSMDFKSNSAVAWSNKSDFACANAFNNSIIPEDTFFPSPESSDSTDHVKPKETENTKQPSKSCHKPKAIVHTEKVNMMSLTVLGLRMLFAKTVAVNFLLTAKLFFLRAKRSGSGVKQTLNFDLLKLAGDVESNPGPTSMDWIWRILFLVGAATGAHSGPQLQLQESGPGLVKPSETLSLTCTVSGDSISSGDYYWGWIRQPPGKGLEWIGHIYYSGVTYYNPSLKSRVTISVDTSRNQFSLKLSSVTAADTAVYYCTREDSSNWRSRGQGTLVTVSSGSGGGGSGGGGSGGGGSFESVLTQPSSVSAAPGQKVTISCSGSTSNIGNNYVSWYQQHPGKAPKLMIYDVSKRPSGVPDRFSGSKSGNSASLDISGLQSEDEADYYCAAWDDSLSEFLFGTGTKLTVLGTREDLKNVFPPEVAVFEPSEAEISHTQKATLVCLATGFYPDHVELSWWVNGKEVHSGVCTDPQPLKEQPALNDSRYCLSSRLRVSATFWQNPRNHFRCQVQFYGLSENDEWTQDRAKPVTQIVSAEAWGRADDVIKIHWQEKKSNTILGSQEGNTMKTNDTYMKFSWLTVPEKSLDKEHRCIVRHENNKNGVDQEIIFPPIKTDVITMDPKDNCSKDANDTLLLQLTNTSAYYMYLLLLLKSVVYFAIITCCLLRRTAFCCNGEKS

SEQ ID NO: 16376 - protein, 1002 aa, synthetic construct
MALPVTALLLPLALLLHAARPEVQLVESGGGLVQPGGSLRLSCAASGFSFSDFWMSWVRQAPGKGLEWVATISQAGSEKDYVDSVKGRFTISRDNAKKSLYLQMNSLRAEDTAVYYCASGVYSFDYRGQGTLVTVSSGTGGGGSGGGGSGGGGSEFDVVMTQSPSSLSASVGDRVTITCQSSLDISHYLNWYQQKPGKAPKLLIYDASNLETGVPSRFSGSGSGTHFTFTISSLQPEDFATYYCQQYDNLPLTFGGGTKLEIKRLEIQNPDPAVYQLRDSKSSDKSVCLFTDFDSQTNVSQSKDSDVYITDKCVLDMRSMDFKSNSAVAWSNKSDFACANAFNNSIIPEDTFFPSPESSDSTDHVKPKETENTKQPSKSCHKPKAIVHTEKVNMMSLTVLGLRMLFAKTVAVNFLLTAKLFFLRAKRSGSGVKQTLNFDLLKLAGDVESNPGPTSMDWIWRILFLVGAATGAHSGPQLQLQESGPGLVKPSETLSLTCTVSGDSISSGDYYWGWIRQPPGKGLEWIGHIYYSGVTYYNPSLKSRVTISVDTSRNQFSLKLSSVTAADTAVYYCTREDSSNWRSRGQGTLVTVSSGSGGGGSGGGGSGGGGSFEQVQLVQSGGGVVQPGGSLRVSCAASGVTLSDYGMHWVRQAPGKGLEWVAFIRNDGSDKYYADSVKGRFTISRDNSEKTVSLQMSSLRAEDTAVYYCAKNGESGPLDYWYLDLWGRGTLVTVSSTREDLKNVFPPEVAVFEPSEAEISHTQKATLVCLATGFYPDHVELSWWVNGKEVHSGVCTDPQPLKEQPALNDSRYCLSSRLRVSATFWQNPRNHFRCQVQFYGLSENDEWTQDRAKPVTQIVSAEAWGRADDVIKIHWQEKKSNTILGSQEGNTMKTNDTYMKFSWLTVPEKSLDKEHRCIVRHENNKNGVDQEIIFPPIKTDVITMDPKDNCSKDANDTLLLQLTNTSAYYMYLLLLLKSVVYFAIITCCLLRRTAFCCNGEKS

SEQ ID NO: 16377 - protein, 1006 aa, synthetic construct
MALPVTALLLPLALLLHAARPEVQLVESGGGLVQPGGSLRLSCAASGFSFSDFWMSWVRQAPGKGLEWVATISQAGSEKDYVDSVKGRFTISRDNAKKSLYLQMNSLRAEDTAVYYCASGVYSFDYRGQGTLVTVSSGTGGGGSGGGGSGGGGSEFSYELTQPPSVSGTPGQRVAISCSGSSSNIGTRMVTWYQHVPGTAPKLLIFNNNQRPSGVPDRFSASKSGTSASLAIIGLQSDDEADYYCATWDDNVKSYVFGTGTKVTVLGSRLEIQNPDPAVYQLRDSKSSDKSVCLFTDFDSQTNVSQSKDSDVYITDKCVLDMRSMDFKSNSAVAWSNKSDFACANAFNNSIIPEDTFFPSPESSDSTDHVKPKETENTKQPSKSCHKPKAIVHTEKVNMMSLTVLGLRMLFAKTVAVNFLLTAKLFFLRAKRSGSGVKQTLNFDLLKLAGDVESNPGPTSMDWIWRILFLVGAATGAHSGPQLQLQESGPGLVKPSETLSLTCTVSGDSISSGDYYWGWIRQPPGKGLEWIGHIYYSGVTYYNPSLKSRVTISVDTSRNQFSLKLSSVTAADTAVYYCTREDSSNWRSRGQGTLVTVSSGSGGGGSGGGGSGGGGSFELEMAQVQLQQWGAGLLKPSETLSLTCAVYGGSFSGYYWSWIRQPPGKGLEWIGEINHSGSTNYNPSLKSRVTISVDTSKNQFSLKLSSVTAADTAVYYCARAPQSWYVGDVWGQGTLVTVSSTREDLKNVFPPEVAVFEPSEAEISHTQKATLVCLATGFYPDHVELSWWVNGKEVHSGVCTDPQPLKEQPALNDSRYCLSSRLRVSATFWQNPRNHFRCQVQFYGLSENDEWTQDRAKPVTQIVSAEAWGRADDVIKIHWQEKKSNTILGSQEGNTMKTNDTYMKFSWLTVPEKSLDKEHRCIVRHENNKNGVDQEIIFPPIKTDVITMDPKDNCSKDANDTLLLQLTNTSAYYMYLLLLLKSVVYFAIITCCLLRRTAFCCNGEKS

SEQ ID NO: 16378 - protein, 1003 aa, synthetic construct
MALPVTALLLPLALLLHAARPEVQLVESGGGLVQPGGSLRLSCAASGFSFSDFWMSWVRQAPGKGLEWVATISQAGSEKDYVDSVKGRFTISRDNAKKSLYLQMNSLRAEDTAVYYCASGVYSFDYRGQGTLVTVSSGTGGGGSGGGGSGGGGSEFQSVLTQPPSLSVAPGKTASITCGGNNIGMKSVHWYQQRPGQAPVLVIYYDSDRPSGIPGRFSGSNSGNTATLTISRVEAGDEADYYCQVWDTTGDHPGYVFGTGTKVTVLLEIQNPDPAVYQLRDSKSSDKSVCLFTDFDSQTNVSQSKDSDVYITDKCVLDMRSMDFKSNSAVAWSNKSDFACANAFNNSIIPEDTFFPSPESSDSTDHVKPKETENTKQPSKSCHKPKAIVHTEKVNMMSLTVLGLRMLFAKTVAVNFLLTAKLFFLRAKRSGSGVKQTLNFDLLKLAGDVESNPGPTSMDWIWRILFLVGAATGAHSGPQLQLQESGPGLVKPSETLSLTCTVSGDSISSGDYYWGWIRQPPGKGLEWIGHIYYSGVTYYNPSLKSRVTISVDTSRNQFSLKLSSVTAADTAVYYCTREDSSNWRSRGQGTLVTVSSGSGGGGSGGGGSGGGGSFEQVQLVQSGAEVKKPGSSVKVSCKASGGTFSSYAISWVRQAPGQGLEWMGGIIPIFGTANYAQKFQGRVTITADESTSTAYMELSSLRSEDTAVYYCARGVYGYSGSAPYDEWGQGTLVTVSSTREDLKNVFPPEVAVFEPSEAEISHTQKATLVCLATGFYPDHVELSWWVNGKEVHSGVCTDPQPLKEQPALNDSRYCLSSRLRVSATFWQNPRNHFRCQVQFYGLSENDEWTQDRAKPVTQIVSAEAWGRADDVIKIHWQEKKSNTILGSQEGNTMKTNDTYMKFSWLTVPEKSLDKEHRCIVRHENNKNGVDQEIIFPPIKTDVITMDPKDNCSKDANDTLLLQLTNTSAYYMYLLLLLKSVVYFAIITCCLLRRTAFCCNGEKS

SEQ ID NO: 16379 - protein, 1001 aa, synthetic construct
MALPVTALLLPLALLLHAARPEVQLVESGGGLVQPGGSLRLSCAASGFSFSDFWMSWVRQAPGKGLEWVATISQAGSEKDYVDSVKGRFTISRDNAKKSLYLQMNSLRAEDTAVYYCASGVYSFDYRGQGTLVTVSSGTGGGGSGGGGSGGGGSEFEVQLVESGGGLVQPGRSLRLSCAASGFTFDDYAMHWVRQAPGKGLEWVSGISWNSGSIGYADSVKGRFTISRDNAKNSLYLQMNSLRAEDTALYYCAKDKGGGYYDFWSGSDYWGQGTLVTVSSLEIQNPDPAVYQLRDSKSSDKSVCLFTDFDSQTNVSQSKDSDVYITDKCVLDMRSMDFKSNSAVAWSNKSDFACANAFNNSIIPEDTFFPSPESSDSTDHVKPKETENTKQPSKSCHKPKAIVHTEKVNMMSLTVLGLRMLFAKTVAVNFLLTAKLFFLRAKRSGSGVKQTLNFDLLKLAGDVESNPGPTSMDWIWRILFLVGAATGAHSGPQLQLQESGPGLVKPSETLSLTCTVSGDSISSGDYYWGWIRQPPGKGLEWIGHIYYSGVTYYNPSLKSRVTISVDTSRNQFSLKLSSVTAADTAVYYCTREDSSNWRSRGQGTLVTVSSGSGGGGSGGGGSGGGGSFESSELTQDPAVSVALGQTVRITCQGDSLRSYYASWYQQKPGQAPVLVIYGKNNRPSGIPDRFSGSSSGNTASLTITGAQAEDEADYYCNSRDSSGWVFGGGTKLTVLTREDLKNVFPPEVAVFEPSEAEISHTQKATLVCLATGFYPDHVELSWWVNGKEVHSGVCTDPQPLKEQPALNDSRYCLSSRLRVSATFWQNPRNHFRCQVQFYGLSENDEWTQDRAKPVTQIVSAEAWGRADDVIKIHWQEKKSNTILGSQEGNTMKTNDTYMKFSWLTVPEKSLDKEHRCIVRHENNKNGVDQEIIFPPIKTDVITMDPKDNCSKDANDTLLLQLTNTSAYYMYLLLLLKSVVYFAIITCCLLRRTAFCCNGEKS

SEQ ID NO: 16380 - protein, 1010 aa, synthetic construct
MALPVTALLLPLALLLHAARPEVQLVESGGGLVQPGGSLRLSCAASGFSFSDFWMSWVRQAPGKGLEWVATISQAGSEKDYVDSVKGRFTISRDNAKKSLYLQMNSLRAEDTAVYYCASGVYSFDYRGQGTLVTVSSGTGGGGSGGGGSGGGGSEFEVQLQQSGPGLVKPSQTLSLTCAISGDSVLSNSDTWNWIRQSPSRGLEWLGRTYHRSTWYDDYASSVRGRVSINVDTSKNQYSLQLNAVTPEDTGVYYCARDRLQDGNSWSDAFDVWGQGTMVTVSSLEIQNPDPAVYQLRDSKSSDKSVCLFTDFDSQTNVSQSKDSDVYITDKCVLDMRSMDFKSNSAVAWSNKSDFACANAFNNSIIPEDTFFPSPESSDSTDHVKPKETENTKQPSKSCHKPKAIVHTEKVNMMSLTVLGLRMLFAKTVAVNFLLTAKLFFLRAKRSGSGVKQTLNFDLLKLAGDVESNPGPTSMDWIWRILFLVGAATGAHSGPQLQLQESGPGLVKPSETLSLTCTVSGDSISSGDYYWGWIRQPPGKGLEWIGHIYYSGVTYYNPSLKSRVTISVDTSRNQFSLKLSSVTAADTAVYYCTREDSSNWRSRGQGTLVTVSSGSGGGGSGGGGSGGGGSFEQSALTQPASVSGSPGQSITISCTGTSSDVGGYNYVSWYQQHPGKAPKLMIYDVSNRPSGVSNRFSGSKSGNTASLTISGLQAEDEADYYCSSYTSSSTLVYVFGTGTKVTVLTREDLKNVFPPEVAVFEPSEAEISHTQKATLVCLATGFYPDHVELSWWVNGKEVHSGVCTDPQPLKEQPALNDSRYCLSSRLRVSATFWQNPRNHFRCQVQFYGLSENDEWTQDRAKPVTQIVSAEAWGRADDVIKIHWQEKKSNTILGSQEGNTMKTNDTYMKFSWLTVPEKSLDKEHRCIVRHENNKNGVDQEIIFPPIKTDVITMDPKDNCSKDANDTLLLQLTNTSAYYMYLLLLLKSVVYFAIITCCLLRRTAFCCNGEKS

SEQ ID NO: 16381 - protein, 988 aa, synthetic construct
MALPVTALLLPLALLLHAARPEVQLVESGGGLVQPGGSLRLSCAASGFSFSDFWMSWVRQAPGKGLEWVATISQAGSEKDYVDSVKGRFTISRDNAKKSLYLQMNSLRAEDTAVYYCASGVYSFDYRGQGTLVTVSSGTGGGGSGGGGSGGGGSEFQVQLVQSGAEVKKPGASVKVSCKASGYTFTSYDINWVRQATGQGLEWMGWMNPNSGNTGYAQKFQGRVTMTRNTSISTAYMELSSLRSEDTAVYYCARGDSTKVEIKLEIQNPDPAVYQLRDSKSSDKSVCLFTDFDSQTNVSQSKDSDVYITDKCVLDMRSMDFKSNSAVAWSNKSDFACANAFNNSIIPEDTFFPSPESSDSTDHVKPKETENTKQPSKSCHKPKAIVHTEKVNMMSLTVLGLRMLFAKTVAVNFLLTAKLFFLRAKRSGSGVKQTLNFDLLKLAGDVESNPGPTSMDWIWRILFLVGAATGAHSGPQLQLQESGPGLVKPSETLSLTCTVSGDSISSGDYYWGWIRQPPGKGLEWIGHIYYSGVTYYNPSLKSRVTISVDTSRNQFSLKLSSVTAADTAVYYCTREDSSNWRSRGQGTLVTVSSGSGGGGSGGGGSGGGGSFEQSVLTQPRSVSGSPGQSVTISCTGTSSDVGGYNYVSWYQQHPGEAPKLIIYDADKRPSGISNRFSSGKSGNTASLTISGLQVEDEADYYCCSYAGGSTWVFGGGTKVTVLTREDLKNVFPPEVAVFEPSEAEISHTQKATLVCLATGFYPDHVELSWWVNGKEVHSGVCTDPQPLKEQPALNDSRYCLSSRLRVSATFWQNPRNHFRCQVQFYGLSENDEWTQDRAKPVTQIVSAEAWGRADDVIKIHWQEKKSNTILGSQEGNTMKTNDTYMKFSWLTVPEKSLDKEHRCIVRHENNKNGVDQEIIFPPIKTDVITMDPKDNCSKDANDTLLLQLTNTSAYYMYLLLLLKSVVYFAIITCCLLRRTAFCCNGEKS

SEQ ID NO: 16382 - protein, 1010 aa, synthetic construct
MALPVTALLLPLALLLHAARPEVQLVESGGGLVQPGGSLRLSCAASGFSFSDFWMSWVRQAPGKGLEWVATISQAGSEKDYVDSVKGRFTISRDNAKKSLYLQMNSLRAEDTAVYYCASGVYSFDYRGQGTLVTVSSGTGGGGSGGGGSGGGGSEFEVQLQQSGPGLVKPSQTLSLTCAISGDSVSSNSAAWNWIRQSPSRGLEWLGRTYYRSKWYSDYAVSVKSRITINPDTSKNQFSLQLNSVTPEDTAVYYCARDPYDFWSGYPDAFDIWGQGTMVTVSSLEIQNPDPAVYQLRDSKSSDKSVCLFTDFDSQTNVSQSKDSDVYITDKCVLDMRSMDFKSNSAVAWSNKSDFACANAFNNSIIPEDTFFPSPESSDSTDHVKPKETENTKQPSKSCHKPKAIVHTEKVNMMSLTVLGLRMLFAKTVAVNFLLTAKLFFLRAKRSGSGVKQTLNFDLLKLAGDVESNPGPTSMDWIWRILFLVGAATGAHSGPQLQLQESGPGLVKPSETLSLTCTVSGDSISSGDYYWGWIRQPPGKGLEWIGHIYYSGVTYYNPSLKSRVTISVDTSRNQFSLKLSSVTAADTAVYYCTREDSSNWRSRGQGTLVTVSSGSGGGGSGGGGSGGGGSFEQSALTQPASVSGSPGQSITISCTGTSSDVGGYNYVSWYQQHPGKAPKVIISEVNNRPSGVSHRFSGSKSGNTASLTISGLQAEDEADYFCSSYTSGRTLYVFGTGSKVTVLGTREDLKNVFPPEVAVFEPSEAEISHTQKATLVCLATGFYPDHVELSWWVNGKEVHSGVCTDPQPLKEQPALNDSRYCLSSRLRVSATFWQNPRNHFRCQVQFYGLSENDEWTQDRAKPVTQIVSAEAWGRADDVIKIHWQEKKSNTILGSQEGNTMKTNDTYMKFSWLTVPEKSLDKEHRCIVRHENNKNGVDQEIIFPPIKTDVITMDPKDNCSKDANDTLLLQLTNTSAYYMYLLLLLKSVVYFAIITCCLLRRTAFCCNGEKS

SEQ ID NO: 16383 - protein, 1009 aa, synthetic construct
MALPVTALLLPLALLLHAARPEVQLVESGGGLVQPGGSLRLSCAASGFSFSDFWMSWVRQAPGKGLEWVATISQAGSEKDYVDSVKGRFTISRDNAKKSLYLQMNSLRAEDTAVYYCASGVYSFDYRGQGTLVTVSSGTGGGGSGGGGSGGGGSEFQSALTQPASASGSPGQSVTISCTGTSSDVGGYNYVSWYQQHPGKAPKLMIYDVSNRPSGVSNRFSGSKSGNTASLTISGLQAEDEADYYCSSYTSSSTLYVFGTGTQLTVLLEIQNPDPAVYQLRDSKSSDKSVCLFTDFDSQTNVSQSKDSDVYITDKCVLDMRSMDFKSNSAVAWSNKSDFACANAFNNSIIPEDTFFPSPESSDSTDHVKPKETENTKQPSKSCHKPKAIVHTEKVNMMSLTVLGLRMLFAKTVAVNFLLTAKLFFLRAKRSGSGVKQTLNFDLLKLAGDVESNPGPTSMDWIWRILFLVGAATGAHSGPQLQLQESGPGLVKPSETLSLTCTVSGDSISSGDYYWGWIRQPPGKGLEWIGHIYYSGVTYYNPSLKSRVTISVDTSRNQFSLKLSSVTAADTAVYYCTREDSSNWRSRGQGTLVTVSSGSGGGGSGGGGSGGGGSFEEVQLQQSGPGLVKPSQTLSLTCAISGDSMLSNSDTWNWIRQSPSRGLEWLGRTYHRSTWYDDYASSVRGRVSINVDTSKNQYSLQLNAVTPEDTGVYYCARVRLQDGNSWSDAFDVWGQGTMVTVSSTREDLKNVFPPEVAVFEPSEAEISHTQKATLVCLATGFYPDHVELSWWVNGKEVHSGVCTDPQPLKEQPALNDSRYCLSSRLRVSATFWQNPRNHFRCQVQFYGLSENDEWTQDRAKPVTQIVSAEAWGRADDVIKIHWQEKKSNTILGSQEGNTMKTNDTYMKFSWLTVPEKSLDKEHRCIVRHENNKNGVDQEIIFPPIKTDVITMDPKDNCSKDANDTLLLQLTNTSAYYMYLLLLLKSVVYFAIITCCLLRRTAFCCNGEKS

SEQ ID NO: 16384 - protein, 1009 aa, synthetic construct
MALPVTALLLPLALLLHAARPEVQLVESGGGLVQPGGSLRLSCAASGFSFSDFWMSWVRQAPGKGLEWVATISQAGSEKDYVDSVKGRFTISRDNAKKSLYLQMNSLRAEDTAVYYCASGVYSFDYRGQGTLVTVSSGTGGGGSGGGGSGGGGSEFDVMLTQTPLSLPVSLGDQASISCRSSQSILHSTGDTYLEWYLQKPGQSPKLLINKVSNRLSGVPDRFSGSGSGTDFTLKISRVEAEDLGVYYCFQGSHVPWTFGGGTKLEIKRADAAPTVSIFPLEIQNPDPAVYQLRDSKSSDKSVCLFTDFDSQTNVSQSKDSDVYITDKCVLDMRSMDFKSNSAVAWSNKSDFACANAFNNSIIPEDTFFPSPESSDSTDHVKPKETENTKQPSKSCHKPKAIVHTEKVNMMSLTVLGLRMLFAKTVAVNFLLTAKLFFLRAKRSGSGVKQTLNFDLLKLAGDVESNPGPTSMDWIWRILFLVGAATGAHSGPQLQLQESGPGLVKPSETLSLTCTVSGDSISSGDYYWGWIRQPPGKGLEWIGHIYYSGVTYYNPSLKSRVTISVDTSRNQFSLKLSSVTAADTAVYYCTREDSSNWRSRGQGTLVTVSSGSGGGGSGGGGSGGGGSFEQVKLQQSGPSLVKPGASVKMSCKASGYTFTDFYMKWVKQSHGKSLEWIGDINPNIGDTFYNQKFKGKATLTVDKSSSTAYMQLNSLTSEDSAVYFCSVGYFDVWGAGTTVTVSSTREDLKNVFPPEVAVFEPSEAEISHTQKATLVCLATGFYPDHVELSWWVNGKEVHSGVCTDPQPLKEQPALNDSRYCLSSRLRVSATFWQNPRNHFRCQVQFYGLSENDEWTQDRAKPVTQIVSAEAWGRADDVIKIHWQEKKSNTILGSQEGNTMKTNDTYMKFSWLTVPEKSLDKEHRCIVRHENNKNGVDQEIIFPPIKTDVITMDPKDNCSKDANDTLLLQLTNTSAYYMYLLLLLKSVVYFAIITCCLLRRTAFCCNGEKS

SEQ ID NO: 16385 - protein, 1005 aa, synthetic construct
MALPVTALLLPLALLLHAARPEVQLVESGGGLVQPGGSLRLSCAASGFSFSDFWMSWVRQAPGKGLEWVATISQAGSEKDYVDSVKGRFTISRDNAKKSLYLQMNSLRAEDTAVYYCASGVYSFDYRGQGTLVTVSSGTGGGGSGGGGSGGGGSEFEIVLTQSPATLSLSPGERATLSCRASQSVSIYLAWYQQKPGQAPRLLIYDASNRATGIPARFSGSGSGTDFTLTISSLEPEDFAVYYCQQRSNWPPFTFGPGTKVDIKLEIQNPDPAVYQLRDSKSSDKSVCLFTDFDSQTNVSQSKDSDVYITDKCVLDMRSMDFKSNSAVAWSNKSDFACANAFNNSIIPEDTFFPSPESSDSTDHVKPKETENTKQPSKSCHKPKAIVHTEKVNMMSLTVLGLRMLFAKTVAVNFLLTAKLFFLRAKRSGSGVKQTLNFDLLKLAGDVESNPGPTSMDWIWRILFLVGAATGAHSGPQLQLQESGPGLVKPSETLSLTCTVSGDSISSGDYYWGWIRQPPGKGLEWIGHIYYSGVTYYNPSLKSRVTISVDTSRNQFSLKLSSVTAADTAVYYCTREDSSNWRSRGQGTLVTVSSGSGGGGSGGGGSGGGGSFEQVQLVESGGGVVQPGRSLRLSCAASGFTFSSYGMHWVRQAPGKGLEWVAVIWDDGSNKYYVDSVKGRFTISRDNSKNTLYLQMNSLRAEDTAVYYCARDDYYGSGSFNSYYGTDVWGQGTTVTVSSTREDLKNVFPPEVAVFEPSEAEISHTQKATLVCLATGFYPDHVELSWWVNGKEVHSGVCTDPQPLKEQPALNDSRYCLSSRLRVSATFWQNPRNHFRCQVQFYGLSENDEWTQDRAKPVTQIVSAEAWGRADDVIKIHWQEKKSNTILGSQEGNTMKTNDTYMKFSWLTVPEKSLDKEHRCIVRHENNKNGVDQEIIFPPIKTDVITMDPKDNCSKDANDTLLLQLTNTSAYYMYLLLLLKSVVYFAIITCCLLRRTAFCCNGEKS

SEQ ID NO: 16386 - protein, 990 aa, synthetic construct
MALPVTALLLPLALLLHAARPEVQLVESGGGLVQPGGSLRLSCAASGFSFSDFWMSWVRQAPGKGLEWVATISQAGSEKDYVDSVKGRFTISRDNAKKSLYLQMNSLRAEDTAVYYCASGVYSFDYRGQGTLVTVSSGTGGGGSGGGGSGGGGSEFDIQMTQSPSSLSASVGDRVTITCRASQGISSWLAWYQQKPEKAPKSLIYAASSLQSGVPSRFSGSGSGTDFTLTISSLQPEDFATYYCQQYNSYPYTFGQGTKLEIKLEIQNPDPAVYQLRDSKSSDKSVCLFTDFDSQTNVSQSKDSDVYITDKCVLDMRSMDFKSNSAVAWSNKSDFACANAFNNSIIPEDTFFPSPESSDSTDHVKPKETENTKQPSKSCHKPKAIVHTEKVNMMSLTVLGLRMLFAKTVAVNFLLTAKLFFLRAKRSGSGVKQTLNFDLLKLAGDVESNPGPTSMDWIWRILFLVGAATGAHSGPQLQLQESGPGLVKPSETLSLTCTVSGDSISSGDYYWGWIRQPPGKGLEWIGHIYYSGVTYYNPSLKSRVTISVDTSRNQFSLKLSSVTAADTAVYYCTREDSSNWRSRGQGTLVTVSSGSGGGGSGGGGSGGGGSFEEVQLVQSGGGLVHPGGSLRLSCAGSGFTFSTYLMYWVRQAPGKTLEWVSAIGSGGDTYYADSVKGRFTISRDNAKNSLYLQMNSLRAEDMAVYYCARGLGYWGQGTLVTVSSTREDLKNVFPPEVAVFEPSEAEISHTQKATLVCLATGFYPDHVELSWWVNGKEVHSGVCTDPQPLKEQPALNDSRYCLSSRLRVSATFWQNPRNHFRCQVQFYGLSENDEWTQDRAKPVTQIVSAEAWGRADDVIKIHWQEKKSNTILGSQEGNTMKTNDTYMKFSWLTVPEKSLDKEHRCIVRHENNKNGVDQEIIFPPIKTDVITMDPKDNCSKDANDTLLLQLTNTSAYYMYLLLLLKSVVYFAIITCCLLRRTAFCCNGEKS

SEQ ID NO: 16387 - protein, 1009 aa, synthetic construct
MALPVTALLLPLALLLHAARPEVQLVESGGGLVQPGGSLRLSCAASGFSFSDFWMSWVRQAPGKGLEWVATISQAGSEKDYVDSVKGRFTISRDNAKKSLYLQMNSLRAEDTAVYYCASGVYSFDYRGQGTLVTVSSGTGGGGSGGGGSGGGGSEFLPVLTQPPSVSVAPGKTARITCGGNNIGSKSVHWYQQKPGQAPVLVVYDDSDRPSGIPERFSGSNSGNTATLTISRVEAGDEADYYCQVWDSSSDYVVFGGGTKLTVLLEIQNPDPAVYQLRDSKSSDKSVCLFTDFDSQTNVSQSKDSDVYITDKCVLDMRSMDFKSNSAVAWSNKSDFACANAFNNSIIPEDTFFPSPESSDSTDHVKPKETENTKQPSKSCHKPKAIVHTEKVNMMSLTVLGLRMLFAKTVAVNFLLTAKLFFLRAKRSGSGVKQTLNFDLLKLAGDVESNPGPTSMDWIWRILFLVGAATGAHSGPQLQLQESGPGLVKPSETLSLTCTVSGDSISSGDYYWGWIRQPPGKGLEWIGHIYYSGVTYYNPSLKSRVTISVDTSRNQFSLKLSSVTAADTAVYYCTREDSSNWRSRGQGTLVTVSSGSGGGGSGGGGSGGGGSFEEVQLVQSGAEVKKPGESLKISCKGSGYSFTSYWIGWVRQMPGKGLEWMGIIYPGDSDTRYSPSFQGQVTISADKSISTAYLQWSSLKASDTAMYYCARQVWGWQGGMYPRSNWWYNLDSWGQGTLVTVSSTREDLKNVFPPEVAVFEPSEAEISHTQKATLVCLATGFYPDHVELSWWVNGKEVHSGVCTDPQPLKEQPALNDSRYCLSSRLRVSATFWQNPRNHFRCQVQFYGLSENDEWTQDRAKPVTQIVSAEAWGRADDVIKIHWQEKKSNTILGSQEGNTMKTNDTYMKFSWLTVPEKSLDKEHRCIVRHENNKNGVDQEIIFPPIKTDVITMDPKDNCSKDANDTLLLQLTNTSAYYMYLLLLLKSVVYFAIITCCLLRRTAFCCNGEKS

SEQ ID NO: 16388 - protein, 1002 aa, synthetic construct
MALPVTALLLPLALLLHAARPEVQLVESGGGLVQPGGSLRLSCAASGFSFSDFWMSWVRQAPGKGLEWVATISQAGSEKDYVDSVKGRFTISRDNAKKSLYLQMNSLRAEDTAVYYCASGVYSFDYRGQGTLVTVSSGTGGGGSGGGGSGGGGSEFELVMTQSPASLAVSLGQRATISCRASESVDSYGKSFMHWYQLKPGQPPKLLIYRASNLESGVPARFSGSGSRTDFTLTIDPVEADDAATYYCQQNNEDPWTFGGGTKLEIKLEIQNPDPAVYQLRDSKSSDKSVCLFTDFDSQTNVSQSKDSDVYITDKCVLDMRSMDFKSNSAVAWSNKSDFACANAFNNSIIPEDTFFPSPESSDSTDHVKPKETENTKQPSKSCHKPKAIVHTEKVNMMSLTVLGLRMLFAKTVAVNFLLTAKLFFLRAKRSGSGVKQTLNFDLLKLAGDVESNPGPTSMDWIWRILFLVGAATGAHSGPQLQLQESGPGLVKPSETLSLTCTVSGDSISSGDYYWGWIRQPPGKGLEWIGHIYYSGVTYYNPSLKSRVTISVDTSRNQFSLKLSSVTAADTAVYYCTREDSSNWRSRGQGTLVTVSSGSGGGGSGGGGSGGGGSFEEVQLEQSGPELVKPGASVKMSCKASGYTFTNYYMKWVKQSHGKSLEWIGDLNPNNGDTFYNQKFKGKATLTVDKSSNTAYMQLNSLTSEDSAVYYCARTGRYEENAMDYWGQGTSVTVSSTREDLKNVFPPEVAVFEPSEAEISHTQKATLVCLATGFYPDHVELSWWVNGKEVHSGVCTDPQPLKEQPALNDSRYCLSSRLRVSATFWQNPRNHFRCQVQFYGLSENDEWTQDRAKPVTQIVSAEAWGRADDVIKIHWQEKKSNTILGSQEGNTMKTNDTYMKFSWLTVPEKSLDKEHRCIVRHENNKNGVDQEIIFPPIKTDVITMDPKDNCSKDANDTLLLQLTNTSAYYMYLLLLLKSVVYFAIITCCLLRRTAFCCNGEKS

SEQ ID NO: 16389 - protein, 996 aa, synthetic construct
MALPVTALLLPLALLLHAARPEVQLVESGGGLVQPGGSLRLSCAASGFSFSDFWMSWVRQAPGKGLEWVATISQAGSEKDYVDSVKGRFTISRDNAKKSLYLQMNSLRAEDTAVYYCASGVYSFDYRGQGTLVTVSSGTGGGGSGGGGSGGGGSEFDVVMTQSPSSLSASVGDRVTITCMASEDIYIRLAWYQQKPGNAPKLLIYAATSLETGVPSRFSGSGSGTDFTLTISSLQPEDFATYYCQQYWSSPWTFGGGTKVEIKLEIQNPDPAVYQLRDSKSSDKSVCLFTDFDSQTNVSQSKDSDVYITDKCVLDMRSMDFKSNSAVAWSNKSDFACANAFNNSIIPEDTFFPSPESSDSTDHVKPKETENTKQPSKSCHKPKAIVHTEKVNMMSLTVLGLRMLFAKTVAVNFLLTAKLFFLRAKRSGSGVKQTLNFDLLKLAGDVESNPGPTSMDWIWRILFLVGAATGAHSGPQLQLQESGPGLVKPSETLSLTCTVSGDSISSGDYYWGWIRQPPGKGLEWIGHIYYSGVTYYNPSLKSRVTISVDTSRNQFSLKLSSVTAADTAVYYCTREDSSNWRSRGQGTLVTVSSGSGGGGSGGGGSGGGGSFEQVQLQESGPGLVKPSQTLSLTCTVSGYSITSDYTWNWIRQPPGNGLEWIGYITYSGSTSYNPSLKSRVLISVDTSKNQVSLKLSSVTAADTAVYYCARLGRRYTMDYWGQGTTVTVSSTREDLKNVFPPEVAVFEPSEAEISHTQKATLVCLATGFYPDHVELSWWVNGKEVHSGVCTDPQPLKEQPALNDSRYCLSSRLRVSATFWQNPRNHFRCQVQFYGLSENDEWTQDRAKPVTQIVSAEAWGRADDVIKIHWQEKKSNTILGSQEGNTMKTNDTYMKFSWLTVPEKSLDKEHRCIVRHENNKNGVDQEIIFPPIKTDVITMDPKDNCSKDANDTLLLQLTNTSAYYMYLLLLLKSVVYFAIITCCLLRRTAFCCNGEKS

SEQ ID NO: 16390 - protein, 1000 aa, synthetic construct; identical to SEQ ID NO: 16253

SEQ ID NO: 16391 - protein, 1000 aa, synthetic construct
MALPVTALLLPLALLLHAARPEVQLVESGGGLVQPGGSLRLSCAASGFSFSDFWMSWVRQAPGKGLEWVATISQAGSEKDYVDSVKGRFTISRDNAKKSLYLQMNSLRAEDTAVYYCASGVYSFDYRGQGTLVTVSSGTGGGGSGGGGSGGGGSEFDIVLTQSPATLSLSPGDRATLSCRASESVTILGSHLIYWYQQKPGQAPRLLIQLASNVQTGIPARFSGSGSRTDFTLTISSLEPEDFAVYYCLQSRTIPRTFGQGTKLEIKRLEIQNPDPAVYQLRDSKSSDKSVCLFTDFDSQTNVSQSKDSDVYITDKCVLDMRSMDFKSNSAVAWSNKSDFACANAFNNSIIPEDTFFPSPESSDSTDHVKPKETENTKQPSKSCHKPKAIVHTEKVNMMSLTVLGLRMLFAKTVAVNFLLTAKLFFLRAKRSGSGVKQTLNFDLLKLAGDVESNPGPTSMDWIWRILFLVGAATGAHSGPQLQLQESGPGLVKPSETLSLTCTVSGDSISSGDYYWGWIRQPPGKGLEWIGHIYYSGVTYYNPSLKSRVTISVDTSRNQFSLKLSSVTAADTAVYYCTREDSSNWRSRGQGTLVTVSSGSGGGGSGGGGSGGGGSFEQVQLVQSGSELKKPGESVKISCKASGYTFTHYSMNWVRQAPGQGLEWMGRINTETGEPLYADDFKGRFVFSLDTSASTAYLQISSLKAEDTAVYYCSNDYLYSLDYWGQGTLVTVSSTREDLKNVFPPEVAVFEPSEAEISHTQKATLVCLATGFYPDHVELSWWVNGKEVHSGVCTDPQPLKEQPALNDSRYCLSSRLRVSATFWQNPRNHFRCQVQFYGLSENDEWTQDRAKPVTQIVSAEAWGRADDVIKIHWQEKKSNTILGSQEGNTMKTNDTYMKFSWLTVPEKSLDKEHRCIVRHENNKNGVDQEIIFPPIKTDVITMDPKDNCSKDANDTLLLQLTNTSAYYMYLLLLLKSVVYFAIITCCLLRRTAFCCNGEKS

SEQ ID NO: 16392 - protein, 1001 aa, synthetic construct
MALPVTALLLPLALLLHAARPEVQLVESGGGLVQPGGSLRLSCAASGFSFSDFWMSWVRQAPGKGLEWVATISQAGSEKDYVDSVKGRFTISRDNAKKSLYLQMNSLRAEDTAVYYCASGVYSFDYRGQGTLVTVSSGTGGGGSGGGGSGGGGSEFDIQLTQSPSFLSASVGDRVTITCRASQGISTDLNWYQQKPGKAPKLLIYAASNLESGVPSRFSGSGSGTEFTLTISSLQPEDFATYYCQQSYNWPYTFGGGTKVEIKRLEIQNPDPAVYQLRDSKSSDKSVCLFTDFDSQTNVSQSKDSDVYITDKCVLDMRSMDFKSNSAVAWSNKSDFACANAFNNSIIPEDTFFPSPESSDSTDHVKPKETENTKQPSKSCHKPKAIVHTEKVNMMSLTVLGLRMLFAKTVAVNFLLTAKLFFLRAKRSGSGVKQTLNFDLLKLAGDVESNPGPTSMDWIWRILFLVGAATGAHSGPQLQLQESGPGLVKPSETLSLTCTVSGDSISSGDYYWGWIRQPPGKGLEWIGHIYYSGVTYYNPSLKSRVTISVDTSRNQFSLKLSSVTAADTAVYYCTREDSSNWRSRGQGTLVTVSSGSGGGGSGGGGSGGGGSFEEVQLVESGGGLVKPGGSLRLSCAASGFTFSNFEMNWVRQAPGKGLEWVSGISSNGRYINYADSVKGRFTISRDNAKNSLYLQMNSLRAEDTAVYYCARVVDFDQDYNGFDYWGQGTLVTVSSTREDLKNVFPPEVAVFEPSEAEISHTQKATLVCLATGFYPDHVELSWWVNGKEVHSGVCTDPQPLKEQPALNDSRYCLSSRLRVSATFWQNPRNHFRCQVQFYGLSENDEWTQDRAKPVTQIVSAEAWGRADDVIKIHWQEKKSNTILGSQEGNTMKTNDTYMKFSWLTVPEKSLDKEHRCIVRHENNKNGVDQEIIFPPIKTDVITMDPKDNCSKDANDTLLLQLTNTSAYYMYLLLLLKSVVYFAIITCCLLRRTAFCCNGEKS

SEQ ID NO: 16393 - protein, 999 aa, synthetic construct
MALPVTALLLPLALLLHAARPEVQLVESGGGLVQPGGSLRLSCAASGFSFSDFWMSWVRQAPGKGLEWVATISQAGSEKDYVDSVKGRFTISRDNAKKSLYLQMNSLRAEDTAVYYCASGVYSFDYRGQGTLVTVSSGTGGGGSGGGGSGGGGSEFDIQLTQSPSFLSASVGDRVTITCSLSLGISTWRDWFPPRLGRGLEPLTYAASTLQSGVPSRFSGSGSGTEFTLTISSLQPEDFATYYCQQLNSYPLTFGGGTKVEIKRLEIQNPDPAVYQLRDSKSSDKSVCLFTDFDSQTNVSQSKDSDVYITDKCVLDMRSMDFKSNSAVAWSNKSDFACANAFNNSIIPEDTFFPSPESSDSTDHVKPKETENTKQPSKSCHKPKAIVHTEKVNMMSLTVLGLRMLFAKTVAVNFLLTAKLFFLRAKRSGSGVKQTLNFDLLKLAGDVESNPGPTSMDWIWRILFLVGAATGAHSGPQLQLQESGPGLVKPSETLSLTCTVSGDSISSGDYYWGWIRQPPGKGLEWIGHIYYSGVTYYNPSLKSRVTISVDTSRNQFSLKLSSVTAADTAVYYCTREDSSNWRSRGQGTLVTVSSGSGGGGSGGGGSGGGGSFEEVQLVESGGGLVKPGGSLRLSCAASGFTFSTYGMSWVRQAPGKGLEWVAYINNGSGYIYYADSVKGRFTISRDNAKNSLYLQMNSLRAEDTAVYYCARGQWWSGGDFDYWGQGTLVTVSSTREDLKNVFPPEVAVFEPSEAEISHTQKATLVCLATGFYPDHVELSWWVNGKEVHSGVCTDPQPLKEQPALNDSRYCLSSRLRVSATFWQNPRNHFRCQVQFYGLSENDEWTQDRAKPVTQIVSAEAWGRADDVIKIHWQEKKSNTILGSQEGNTMKTNDTYMKFSWLTVPEKSLDKEHRCIVRHENNKNGVDQEIIFPPIKTDVITMDPKDNCSKDANDTLLLQLTNTSAYYMYLLLLLKSVVYFAIITCCLLRRTAFCCNGEKS

SEQ ID NO: 16394 - protein, 1000 aa, synthetic construct
MALPVTALLLPLALLLHAARPEVQLVESGGGLVQPGGSLRLSCAASGFSFSDFWMSWVRQAPGKGLEWVATISQAGSEKDYVDSVKGRFTISRDNAKKSLYLQMNSLRAEDTAVYYCASGVYSFDYRGQGTLVTVSSGTGGGGSGGGGSGGGGSEFEIVLTQSPATLSLSPGERATLSCSASSSVSYMYWYQQKPGQAPRLLIYRTSNLASGIPARFSGSGSGTDFTLTISSLEPEDFAVYYCQQYHSYPTTFGQGTKVEIKRTVLEIQNPDPAVYQLRDSKSSDKSVCLFTDFDSQTNVSQSKDSDVYITDKCVLDMRSMDFKSNSAVAWSNKSDFACANAFNNSIIPEDTFFPSPESSDSTDHVKPKETENTKQPSKSCHKPKAIVHTEKVNMMSLTVLGLRMLFAKTVAVNFLLTAKLFFLRAKRSGSGVKQTLNFDLLKLAGDVESNPGPTSMDWIWRILFLVGAATGAHSGPQLQLQESGPGLVKPSETLSLTCTVSGDSISSGDYYWGWIRQPPGKGLEWIGHIYYSGVTYYNPSLKSRVTISVDTSRNQFSLKLSSVTAADTAVYYCTREDSSNWRSRGQGTLVTVSSGSGGGGSGGGGSGGGGSFEEVQLVESGGGLVQPGGSLRLSCAASGFSFNTYAMNWVRQAPGKGLEWVSHIRSKSNNFATYYADSVKDRFTISRDNAKNSLYLQMNSLRAEDTAVYYCARQGGDFPMDYWGQGTLVTVSSTREDLKNVFPPEVAVFEPSEAEISHTQKATLVCLATGFYPDHVELSWWVNGKEVHSGVCTDPQPLKEQPALNDSRYCLSSRLRVSATFWQNPRNHFRCQVQFYGLSENDEWTQDRAKPVTQIVSAEAWGRADDVIKIHWQEKKSNTILGSQEGNTMKTNDTYMKFSWLTVPEKSLDKEHRCIVRHENNKNGVDQEIIFPPIKTDVITMDPKDNCSKDANDTLLLQLTNTSAYYMYLLLLLKSVVYFAIITCCLLRRTAFCCNGEKS

SEQ ID NO: 16395 - protein, 996 aa, synthetic construct
MALPVTALLLPLALLLHAARPEVQLVESGGGLVQPGGSLRLSCAASGFSFSDFWMSWVRQAPGKGLEWVATISQAGSEKDYVDSVKGRFTISRDNAKKSLYLQMNSLRAEDTAVYYCASGVYSFDYRGQGTLVTVSSGTGGGGSGGGGSGGGGSEFDVVMTQSPSSLSASVGDRVTITCKASEDIYIRLAWYQQKPGKAPKLLIYAATSLETGVPSRFSGSGSGTDFTLTISSLQPEDFATYYCQQYWTTPWTFGGGTKVEIKLEIQNPDPAVYQLRDSKSSDKSVCLFTDFDSQTNVSQSKDSDVYITDKCVLDMRSMDFKSNSAVAWSNKSDFACANAFNNSIIPEDTFFPSPESSDSTDHVKPKETENTKQPSKSCHKPKAIVHTEKVNMMSLTVLGLRMLFAKTVAVNFLLTAKLFFLRAKRSGSGVKQTLNFDLLKLAGDVESNPGPTSMDWIWRILFLVGAATGAHSGPQLQLQESGPGLVKPSETLSLTCTVSGDSISSGDYYWGWIRQPPGKGLEWIGHIYYSGVTYYNPSLKSRVTISVDTSRNQFSLKLSSVTAADTAVYYCTREDSSNWRSRGQGTLVTVSSGSGGGGSGGGGSGGGGSFEQVQLQESGPGLVKPSQTLSLTCTVSGYSITIDYTWNWIRQPPGKGLEWIGYITYSGSTDYNPSLKSRVLISVDTSKNQVSLKLSSVTAADTAVYYCARLGRRYALDYWGQGTTVTVSSTREDLKNVFPPEVAVFEPSEAEISHTQKATLVCLATGFYPDHVELSWWVNGKEVHSGVCTDPQPLKEQPALNDSRYCLSSRLRVSATFWQNPRNHFRCQVQFYGLSENDEWTQDRAKPVTQIVSAEAWGRADDVIKIHWQEKKSNTILGSQEGNTMKTNDTYMKFSWLTVPEKSLDKEHRCIVRHENNKNGVDQEIIFPPIKTDVITMDPKDNCSKDANDTLLLQLTNTSAYYMYLLLLLKSVVYFAIITCCLLRRTAFCCNGEKS

SEQ ID NO: 16396 - protein, 1000 aa, synthetic construct
MALPVTALLLPLALLLHAARPEVQLVESGGGLVQPGGSLRLSCAASGFSFSDFWMSWVRQAPGKGLEWVATISQAGSEKDYVDSVKGRFTISRDNAKKSLYLQMNSLRAEDTAVYYCASGVYSFDYRGQGTLVTVSSGTGGGGSGGGGSGGGGSEFDIQMTQTTSSLSASLGDRVTISCRASQDISNYLNWYQQKPDGTVKLLIYYTSILHSGVPSRFSGSGSGTDYSLTISNLEQEDFATYFCQQGNTLPWTFGGGTKLEIKALEIQNPDPAVYQLRDSKSSDKSVCLFTDFDSQTNVSQSKDSDVYITDKCVLDMRSMDFKSNSAVAWSNKSDFACANAFNNSIIPEDTFFPSPESSDSTDHVKPKETENTKQPSKSCHKPKAIVHTEKVNMMSLTVLGLRMLFAKTVAVNFLLTAKLFFLRAKRSGSGVKQTLNFDLLKLAGDVESNPGPTSMDWIWRILFLVGAATGAHSGPQLQLQESGPGLVKPSETLSLTCTVSGDSISSGDYYWGWIRQPPGKGLEWIGHIYYSGVTYYNPSLKSRVTISVDTSRNQFSLKLSSVTAADTAVYYCTREDSSNWRSRGQGTLVTVSSGSGGGGSGGGGSGGGGSFEVQLVESGGGLVKPGGSLKLSCAASGFAFSIYDMSWVRQTPEKRLEWVAYISSGGGTYYPDTVKGRFTISRDNAKNTLYLQMSSLKSEDTAMYYCARHSGYGTHWGVLFAYWGQGTLVTVSATREDLKNVFPPEVAVFEPSEAEISHTQKATLVCLATGFYPDHVELSWWVNGKEVHSGVCTDPQPLKEQPALNDSRYCLSSRLRVSATFWQNPRNHFRCQVQFYGLSENDEWTQDRAKPVTQIVSAEAWGRADDVIKIHWQEKKSNTILGSQEGNTMKTNDTYMKFSWLTVPEKSLDKEHRCIVRHENNKNGVDQEIIFPPIKTDVITMDPKDNCSKDANDTLLLQLTNTSAYYMYLLLLLKSVVYFAIITCCLLRRTAFCCNGEKS

SEQ ID NO: 16397 - protein, 1011 aa, synthetic construct
MALPVTALLLPLALLLHAARPEVQLVESGGGLVQPGGSLRLSCAASGFSFSDFWMSWVRQAPGKGLEWVATISQAGSEKDYVDSVKGRFTISRDNAKKSLYLQMNSLRAEDTAVYYCASGVYSFDYRGQGTLVTVSSGTGGGGSGGGGSGGGGSEFDIVMTQSPDSLAVSLGERATINCKSSQSLLYRSNQKNYLAWYQQKPGQPPKLLIYWASTRESGVPDRFSGSGSGTDFTLTISSLQAEDVAVYYCQQYYNYPRTFGQGTKVEIKRTVLEIQNPDPAVYQLRDSKSSDKSVCLFTDFDSQTNVSQSKDSDVYITDKCVLDMRSMDFKSNSAVAWSNKSDFACANAFNNSIIPEDTFFPSPESSDSTDHVKPKETENTKQPSKSCHKPKAIVHTEKVNMMSLTVLGLRMLFAKTVAVNFLLTAKLFFLRAKRSGSGVKQTLNFDLLKLAGDVESNPGPTSMDWIWRILFLVGAATGAHSGPQLQLQESGPGLVKPSETLSLTCTVSGDSISSGDYYWGWIRQPPGKGLEWIGHIYYSGVTYYNPSLKSRVTISVDTSRNQFSLKLSSVTAADTAVYYCTREDSSNWRSRGQGTLVTVSSGSGGGGSGGGGSGGGGSFEEVQLLESGGGLVQPGGSLRLSCAASGYSITSDYAWNWVRQAPGKGLEWVSYISNSGSTSYNPSLKSRFTISRDNSKNTLYLQMNSLRAEDTAVYYCAKERNYDYDDYYYAMDYWGQGTLVTVSSTREDLKNVFPPEVAVFEPSEAEISHTQKATLVCLATGFYPDHVELSWWVNGKEVHSGVCTDPQPLKEQPALNDSRYCLSSRLRVSATFWQNPRNHFRCQVQFYGLSENDEWTQDRAKPVTQIVSAEAWGRADDVIKIHWQEKKSNTILGSQEGNTMKTNDTYMKFSWLTVPEKSLDKEHRCIVRHENNKNGVDQEIIFPPIKTDVITMDPKDNCSKDANDTLLLQLTNTSAYYMYLLLLLKSVVYFAIITCCLLRRTAFCCNGEKS

SEQ ID NO: 16398 - protein, 1004 aa, synthetic construct
MALPVTALLLPLALLLHAARPEVQLVESGGGLVQPGGSLRLSCAASGFSFSDFWMSWVRQAPGKGLEWVATISQAGSEKDYVDSVKGRFTISRDNAKKSLYLQMNSLRAEDTAVYYCASGVYSFDYRGQGTLVTVSSGTGGGGSGGGGSGGGGSEFDVVMTQSPLSLPVTLGQPASISCRSSQSLLHSSGNTYLEWYQQRPGQSPRPLIYKISTRFSGVPDRFSGSGSGTDFTLKISRVEAEDVGVYYCFQGSHVPYTFGGGTKVEIKRLEIQNPDPAVYQLRDSKSSDKSVCLFTDFDSQTNVSQSKDSDVYITDKCVLDMRSMDFKSNSAVAWSNKSDFACANAFNNSIIPEDTFFPSPESSDSTDHVKPKETENTKQPSKSCHKPKAIVHTEKVNMMSLTVLGLRMLFAKTVAVNFLLTAKLFFLRAKRSGSGVKQTLNFDLLKLAGDVESNPGPTSMDWIWRILFLVGAATGAHSGPQLQLQESGPGLVKPSETLSLTCTVSGDSISSGDYYWGWIRQPPGKGLEWIGHIYYSGVTYYNPSLKSRVTISVDTSRNQFSLKLSSVTAADTAVYYCTREDSSNWRSRGQGTLVTVSSGSGGGGSGGGGSGGGGSFEQVQLVQSGAEVKKPGASVKVSCKASGLTIEDYYMHWVRQAPGQGLEWMGWIDPENGDTEYGPKFQGRVTMTRDTSINTAYMELSRLRSDDTAVYYCAVHNAHYGTWFAYWGQGTLVTVSSTREDLKNVFPPEVAVFEPSEAEISHTQKATLVCLATGFYPDHVELSWWVNGKEVHSGVCTDPQPLKEQPALNDSRYCLSSRLRVSATFWQNPRNHFRCQVQFYGLSENDEWTQDRAKPVTQIVSAEAWGRADDVIKIHWQEKKSNTILGSQEGNTMKTNDTYMKFSWLTVPEKSLDKEHRCIVRHENNKNGVDQEIIFPPIKTDVITMDPKDNCSKDANDTLLLQLTNTSAYYMYLLLLLKSVVYFAIITCCLLRRTAFCCNGEKS

SEQ ID NO: 16399 - protein, 996 aa, synthetic construct
MALPVTALLLPLALLLHAARPEVQLVESGGGLVQPGGSLRLSCAASGFSFSDFWMSWVRQAPGKGLEWVATISQAGSEKDYVDSVKGRFTISRDNAKKSLYLQMNSLRAEDTAVYYCASGVYSFDYRGQGTLVTVSSGTGGGGSGGGGSGGGGSEFDIQMTQSPSSLSASVGDRVTITCRASENIYSNLAWYQQKPGKAPKLLIYAATNLADGVPSRFSGSGSGTDFTLTISSLQPEDFATYYCQHFWGTPTFGQGTKVEIKRTVLEIQNPDPAVYQLRDSKSSDKSVCLFTDFDSQTNVSQSKDSDVYITDKCVLDMRSMDFKSNSAVAWSNKSDFACANAFNNSIIPEDTFFPSPESSDSTDHVKPKETENTKQPSKSCHKPKAIVHTEKVNMMSLTVLGLRMLFAKTVAVNFLLTAKLFFLRAKRSGSGVKQTLNFDLLKLAGDVESNPGPTSMDWIWRILFLVGAATGAHSGPQLQLQESGPGLVKPSETLSLTCTVSGDSISSGDYYWGWIRQPPGKGLEWIGHIYYSGVTYYNPSLKSRVTISVDTSRNQFSLKLSSVTAADTAVYYCTREDSSNWRSRGQGTLVTVSSGSGGGGSGGGGSGGGGSFEEVQLVESGGGLVQPGGSLRLSCAASGFSLTNYGVHWVRQAPGKGLEWVSVIWSGGSTDYNAAFISRFTISADTSKNTAYLQMNSLRAEDTAVYYCARELIHAMDNWGQGTLVTVSSTREDLKNVFPPEVAVFEPSEAEISHTQKATLVCLATGFYPDHVELSWWVNGKEVHSGVCTDPQPLKEQPALNDSRYCLSSRLRVSATFWQNPRNHFRCQVQFYGLSENDEWTQDRAKPVTQIVSAEAWGRADDVIKIHWQEKKSNTILGSQEGNTMKTNDTYMKFSWLTVPEKSLDKEHRCIVRHENNKNGVDQEIIFPPIKTDVITMDPKDNCSKDANDTLLLQLTNTSAYYMYLLLLLKSVVYFAIITCCLLRRTAFCCNGEKS

SEQ ID NO: 16400 - protein, 1003 aa, synthetic construct
MALPVTALLLPLALLLHAARPEVQLVESGGGLVQPGGSLRLSCAASGFSFSDFWMSWVRQAPGKGLEWVATISQAGSEKDYVDSVKGRFTISRDNAKKSLYLQMNSLRAEDTAVYYCASGVYSFDYRGQGTLVTVSSGTGGGGSGGGGSGGGGSEFDFVMTQSPLSLPVTPGEPASISCRSSQSIVHSNGNTYLEWYLQKPGQSPQLLIYKVSNRFSGVPDRFSGSGSGTDFTLKISRVEAEDVGVYYCFQGSHVPLTFGQGTKLEIKRLEIQNPDPAVYQLRDSKSSDKSVCLFTDFDSQTNVSQSKDSDVYITDKCVLDMRSMDFKSNSAVAWSNKSDFACANAFNNSIIPEDTFFPSPESSDSTDHVKPKETENTKQPSKSCHKPKAIVHTEKVNMMSLTVLGLRMLFAKTVAVNFLLTAKLFFLRAKRSGSGVKQTLNFDLLKLAGDVESNPGPTSMDWIWRILFLVGAATGAHSGPQLQLQESGPGLVKPSETLSLTCTVSGDSISSGDYYWGWIRQPPGKGLEWIGHIYYSGVTYYNPSLKSRVTISVDTSRNQFSLKLSSVTAADTAVYYCTREDSSNWRSRGQGTLVTVSSGSGGGGSGGGGSGGGGSFEEVQLVESGAEVKKPGASVKVSCKASGYTFTSYWIHWVRQAPGQGLEWMGENDPSNGRTNYNEKFKNRVTLTVDTSISTAYMELSRLRSDDTAVYYCARGPNYFYSMDYWGQGTMVTVSSTREDLKNVFPPEVAVFEPSEAEISHTQKATLVCLATGFYPDHVELSWWVNGKEVHSGVCTDPQPLKEQPALNDSRYCLSSRLRVSATFWQNPRNHFRCQVQFYGLSENDEWTQDRAKPVTQIVSAEAWGRADDVIKIHWQEKKSNTILGSQEGNTMKTNDTYMKFSWLTVPEKSLDKEHRCIVRHENNKNGVDQEIIFPPIKTDVITMDPKDNCSKDANDTLLLQLTNTSAYYMYLLLLLKSVVYFAIITCCLLRRTAFCCNGEKS

SEQ ID NO: 16401 - protein, 996 aa, synthetic construct
MALPVTALLLPLALLLHAARPEVQLVESGGGLVQPGGSLRLSCAASGFSFSDFWMSWVRQAPGKGLEWVATISQAGSEKDYVDSVKGRFTISRDNAKKSLYLQMNSLRAEDTAVYYCASGVYSFDYRGQGTLVTVSSGTGGGGSGGGGSGGGGSEFDIQLTQSPSFLSASVGDRVTITCSARSSISFMYWYQQKPGKAPKLLIYDTSNLASGVPSRFSGSGSGTEFTLTISSLEAEDAATYYCQQWSSYPLTFGQGTKLEIKLEIQNPDPAVYQLRDSKSSDKSVCLFTDFDSQTNVSQSKDSDVYITDKCVLDMRSMDFKSNSAVAWSNKSDFACANAFNNSIIPEDTFFPSPESSDSTDHVKPKETENTKQPSKSCHKPKAIVHTEKVNMMSLTVLGLRMLFAKTVAVNFLLTAKLFFLRAKRSGSGVKQTLNFDLLKLAGDVESNPGPTSMDWIWRILFLVGAATGAHSGPQLQLQESGPGLVKPSETLSLTCTVSGDSISSGDYYWGWIRQPPGKGLEWIGHIYYSGVTYYNPSLKSRVTISVDTSRNQFSLKLSSVTAADTAVYYCTREDSSNWRSRGQGTLVTVSSGSGGGGSGGGGSGGGGSFEQVQLVQSGAEVKKPGASVKVSCKASGYTFTGSWMNWVRQAPGQGLEWIGRIYPGDGETNYNGKFKDRVTITADKSTSTAYMELSSLRSEDTAVYYCARIYGNNVYFDVWGQGTTVTVSSTREDLKNVFPPEVAVFEPSEAEISHTQKATLVCLATGFYPDHVELSWWVNGKEVHSGVCTDPQPLKEQPALNDSRYCLSSRLRVSATFWQNPRNHFRCQVQFYGLSENDEWTQDRAKPVTQIVSAEAWGRADDVIKIHWQEKKSNTILGSQEGNTMKTNDTYMKFSWLTVPEKSLDKEHRCIVRHENNKNGVDQEIIFPPIKTDVITMDPKDNCSKDANDTLLLQLTNTSAYYMYLLLLLKSVVYFAIITCCLLRRTAFCCNGEKS

SEQ ID NO: 16402 - protein, 1004 aa, synthetic construct
MALPVTALLLPLALLLHAARPEVQLVESGGGLVQPGGSLRLSCAASGFSFSDFWMSWVRQAPGKGLEWVATISQAGSEKDYVDSVKGRFTISRDNAKKSLYLQMNSLRAEDTAVYYCASGVYSFDYRGQGTLVTVSSGTGGGGSGGGGSGGGGSEFQLVLTQSPSASASLGSSVKLTCTLSSGHKTDTIDWYQQQPGKAPRYLMKLEGSGSYNKGSGVPDRFSGSSSGADWYLTISSLQSEDEADYYCGTDYPGNYLFGGGTQLTVLGLEIQNPDPAVYQLRDSKSSDKSVCLFTDFDSQTNVSQSKDSDVYITDKCVLDMRSMDFKSNSAVAWSNKSDFACANAFNNSIIPEDTFFPSPESSDSTDHVKPKETENTKQPSKSCHKPKAIVHTEKVNMMSLTVLGLRMLFAKTVAVNFLLTAKLFFLRAKRSGSGVKQTLNFDLLKLAGDVESNPGPTSMDWIWRILFLVGAATGAHSGPQLQLQESGPGLVKPSETLSLTCTVSGDSISSGDYYWGWIRQPPGKGLEWIGHIYYSGVTYYNPSLKSRVTISVDTSRNQFSLKLSSVTAADTAVYYCTREDSSNWRSRGQGTLVTVSSGSGGGGSGGGGSGGGGSFEQEQLVESGGGLVQPGGSLRLSCAASGFTFSDYYMSWIRQAPGKGLEWVATIYPSSGKTYYADSAKGRLTISSDNAKDSLYLQMNSLRAEDTAVYYCTRDSYADDAALFDIWGQGTTVTVSSTREDLKNVFPPEVAVFEPSEAEISHTQKATLVCLATGFYPDHVELSWWVNGKEVHSGVCTDPQPLKEQPALNDSRYCLSSRLRVSATFWQNPRNHFRCQVQFYGLSENDEWTQDRAKPVTQIVSAEAWGRADDVIKIHWQEKKSNTILGSQEGNTMKTNDTYMKFSWLTVPEKSLDKEHRCIVRHENNKNGVDQEIIFPPIKTDVITMDPKDNCSKDANDTLLLQLTNTSAYYMYLLLLLKSVVYFAIITCCLLRRTAFCCNGEKS

SEQ ID NO: 16403 - protein, 996 aa, synthetic construct; identical to SEQ ID NO: 16399

SEQ ID NO: 16404 - protein, 1003 aa, synthetic construct; identical to SEQ ID NO: 16400

SEQ ID NO: 16405 - protein, 996 aa, synthetic construct; identical to SEQ ID NO: 16401

SEQ ID NO: 16406 - protein, 1004 aa, synthetic construct; identical to SEQ ID NO: 16402

SEQ ID NO: 16407 - protein, 1003 aa, synthetic construct
MALPVTALLLPLALLLHAARPEVQLVESGGGLVQPGGSLRLSCAASGFSFSDFWMSWVRQAPGKGLEWVATISQAGSEKDYVDSVKGRFTISRDNAKKSLYLQMNSLRAEDTAVYYCASGVYSFDYRGQGTLVTVSSGTGGGGSGGGGSGGGGSEFDIQLTQSPSSLSASVGDRVSFTCQASQDINNFLNWYQQKPGKAPKLLIYDASNLETGVPSRFSGSGSGTDFTFTISSLQPEDIATYYCQQYGNLPFTFGGGTKVEIKRLEIQNPDPAVYQLRDSKSSDKSVCLFTDFDSQTNVSQSKDSDVYITDKCVLDMRSMDFKSNSAVAWSNKSDFACANAFNNSIIPEDTFFPSPESSDSTDHVKPKETENTKQPSKSCHKPKAIVHTEKVNMMSLTVLGLRMLFAKTVAVNFLLTAKLFFLRAKRSGSGVKQTLNFDLLKLAGDVESNPGPTSMDWIWRILFLVGAATGAHSGPQLQLQESGPGLVKPSETLSLTCTVSGDSISSGDYYWGWIRQPPGKGLEWIGHIYYSGVTYYNPSLKSRVTISVDTSRNQFSLKLSSVTAADTAVYYCTREDSSNWRSRGQGTLVTVSSGSGGGGSGGGGSGGGGSFEQVQLQESGPGLVKPSQTLSLTCTVSGGSISSGGFYWSWIRQHPGKGLEWIGYIHHSGSTHYNPSLKSRVTISIDTSKNLFSLRLSSVTAADTAVYYCASLVYCGGDCYSGFDYWGQGTLVTVSSTREDLKNVFPPEVAVFEPSEAEISHTQKATLVCLATGFYPDHVELSWWVNGKEVHSGVCTDPQPLKEQPALNDSRYCLSSRLRVSATFWQNPRNHFRCQVQFYGLSENDEWTQDRAKPVTQIVSAEAWGRADDVIKIHWQEKKSNTILGSQEGNTMKTNDTYMKFSWLTVPEKSLDKEHRCIVRHENNKNGVDQEIIFPPIKTDVITMDPKDNCSKDANDTLLLQLTNTSAYYMYLLLLLKSVVYFAIITCCLLRRTAFCCNGEKS

SEQ ID NO: 16408 - protein, 999 aa, synthetic construct
MALPVTALLLPLALLLHAARPEVQLVESGGGLVQPGGSLRLSCAASGFSFSDFWMSWVRQAPGKGLEWVATISQAGSEKDYVDSVKGRFTISRDNAKKSLYLQMNSLRAEDTAVYYCASGVYSFDYRGQGTLVTVSSGTGGGGSGGGGSGGGGSEFDIQMTQSPSSLSASVGDRVTITCKSSQSVLYSSNQKNYLAWFQQKPGKAPKLLIYWASTRESGVPSRFSGSGSGTDFTLTISSLQPEDFATYFCHQYLSSYTFGQGTKVEIKRLEIQNPDPAVYQLRDSKSSDKSVCLFTDFDSQTNVSQSKDSDVYITDKCVLDMRSMDFKSNSAVAWSNKSDFACANAFNNSIIPEDTFFPSPESSDSTDHVKPKETENTKQPSKSCHKPKAIVHTEKVNMMSLTVLGLRMLFAKTVAVNFLLTAKLFFLRAKRSGSGVKQTLNFDLLKLAGDVESNPGPTSMDWIWRILFLVGAATGAHSGPQLQLQESGPGLVKPSETLSLTCTVSGDSISSGDYYWGWIRQPPGKGLEWIGHIYYSGVTYYNPSLKSRVTISVDTSRNQFSLKLSSVTAADTAVYYCTREDSSNWRSRGQGTLVTVSSGSGGGGSGGGGSGGGGSFEEVQLVESGGGLVQPGGSLRLSCAASGYTFTTYWMHWVRQAPGKGLEWVGYIRPSTGYTEYNQKFKDRFTISADTSKNTAYLQMNSLRAEDTAVYYCARSRWLLDYWGQGTLVTVSTREDLKNVFPPEVAVFEPSEAEISHTQKATLVCLATGFYPDHVELSWWVNGKEVHSGVCTDPQPLKEQPALNDSRYCLSSRLRVSATFWQNPRNHFRCQVQFYGLSENDEWTQDRAKPVTQIVSAEAWGRADDVIKIHWQEKKSNTILGSQEGNTMKTNDTYMKFSWLTVPEKSLDKEHRCIVRHENNKNGVDQEIIFPPIKTDVITMDPKDNCSKDANDTLLLQLTNTSAYYMYLLLLLKSVVYFAIITCCLLRRTAFCCNGEKS

SEQ ID NO: 16409 - protein, 996 aa, synthetic construct
MALPVTALLLPLALLLHAARPEVQLVESGGGLVQPGGSLRLSCAASGFSFSDFWMSWVRQAPGKGLEWVATISQAGSEKDYVDSVKGRFTISRDNAKKSLYLQMNSLRAEDTAVYYCASGVYSFDYRGQGTLVTVSSGTGGGGSGGGGSGGGGSEFDIQMTQSPSSLSASVGDRVTITCRASQDISNYLNWYQQKPGKAPKLLIYYTSRLHSGVPSRFSGSGSGTDFTLTISSLQPEDFATYYCQQGNTLPYTFGQGTKVEIKRLEIQNPDPAVYQLRDSKSSDKSVCLFTDFDSQTNVSQSKDSDVYITDKCVLDMRSMDFKSNSAVAWSNKSDFACANAFNNSIIPEDTFFPSPESSDSTDHVKPKETENTKQPSKSCHKPKAIVHTEKVNMMSLTVLGLRMLFAKTVAVNFLLTAKLFFLRAKRSGSGVKQTLNFDLLKLAGDVESNPGPTSMDWIWRILFLVGAATGAHSGPQLQLQESGPGLVKPSETLSLTCTVSGDSISSGDYYWGWIRQPPGKGLEWIGHIYYSGVTYYNPSLKSRVTISVDTSRNQFSLKLSSVTAADTAVYYCTREDSSNWRSRGQGTLVTVSSGSGGGGSGGGGSGGGGSFEEVQLVESGGGLVQPGGSLRLSCAASGFTFSDYFMSWVRQAPGKGLEWVATISNGGTYTYYPDSVKGRFTISRDNSKNTLYLQMNSLRAEDTAVYYCARFDGYIFDYWGQGTLVTVSSTREDLKNVFPPEVAVFEPSEAEISHTQKATLVCLATGFYPDHVELSWWVNGKEVHSGVCTDPQPLKEQPALNDSRYCLSSRLRVSATFWQNPRNHFRCQVQFYGLSENDEWTQDRAKPVTQIVSAEAWGRADDVIKIHWQEKKSNTILGSQEGNTMKTNDTYMKFSWLTVPEKSLDKEHRCIVRHENNKNGVDQEIIFPPIKTDVITMDPKDNCSKDANDTLLLQLTNTSAYYMYLLLLLKSVVYFAIITCCLLRRTAFCCNGEKS

SEQ ID NO: 16410 - protein, 794 aa, synthetic construct
MALPVTALLLPLALLLHAARPDIQMTQSPSSLSASVGDRVTITCKASDHINNWLAWYQQKPGQAPKLLIYGATTLETGVPSRFSGSGSGTDYTLTISSLQPEDFATYYCQQSWNTPWTFGQGTKLEIKRLEDLKNVFPPEVAVFEPSEAEISHTQKATLVCLATGFYPDHVELSWWVNGKEVHSGVCTDPQPLKEQPALNDSRYCLSSRLRVSATFWQNPRNHFRCQVQFYGLSENDEWTQDRAKPVTQIVSAEAWGRADDVIKIHWQEKKSNTILGSQEGNTMKTNDTYMKFSWLTVPEKSLDKEHRCIVRHENNKNGVDQEIIFPPIKTDVITMDPKDNCSKDANDTLLLQLTNTSAYYMYLLLLLKSVVYFAIITCCLLRRTAFCCNGEKSRAKRSGSGATNFSLLKQAGDVEENPGPTSMDWIWRILFLVGAATGAHSGPMDPDLEIRAAFLRQRNTALRTEVAELEQEVQRLENEVSQYETRYGPLGGGKGSGGGGSGGGGSGGGGSFEQVQLQQPGAELVKPGASVKMSCKASGYAFSSYWINWMKQKPGQGLEWIGQIYPGDGDTNYNGKFKGRATLTADTSSSTAYMQLSSLTSEDSAVYFCARSITTVVGCAMDYWGQGTSVTVSSTRIQNPDPAVYQLRDSKSSDKSVCLFTDFDSQTNVSQSKDSDVYITDKCVLDMRSMDFKSNSAVAWSNKSDFACANAFNNSIIPEDTFFPSPESSDSTDHVKPKETENTKQPSKSCHKPKAIVHTEKVNMMSLTVLGLRMLFAKTVAVNFLLTAKLFFL

SEQ ID NO: 16411 - protein, 798 aa, synthetic construct
MALPVTALLLPLALLLHAARPDIQMTQSPSSLSASVGDRVTITCKASDHINNWLAWYQQKPGQAPKLLIYGATTLETGVPSRFSGSGSGTDYTLTISSLQPEDFATYYCQQSWNTPWTFGQGTKLEIKRLEIQNPDPAVYQLRDSKSSDKSVCLFTDFDSQTNVSQSKDSDVYITDKCVLDMRSMDFKSNSAVAWSNKSDFACANAFNNSIIPEDTFFPSPESSDSTDHVKPKETENTKQPSKSCHKPKAIVHTEKVNMMSLTVLGLRMLFAKTVAVNFLLTAKLFFLRAKRSGSGVKQTLNFDLLKLAGDVESNPGPTSMDWIWRILFLVGAATGAHSGPMDPDLEIRAAFLRQRNTALRTEVAELEQEVQRLENEVSQYETRYGPLGGGKGSGGGGSGGGGSGGGGSFEQVQLQQPGAELVKPGASVKMSCKASGYAFSSYWINWMKQKPGQGLEWIGQIYPGDGDTNYNGKFKGRATLTADTSSSTAYMQLSSLTSEDSAVYFCARSITTVVGCAMDYWGQGTSVTVSSTREDLKNVFPPEVAVFEPSEAEISHTQKATLVCLATGFYPDHVELSWWVNGKEVHSGVCTDPQPLKEQPALNDSRYCLSSRLRVSATFWQNPRNHFRCQVQFYGLSENDEWTQDRAKPVTQIVSAEAWGRADDVIKIHWQEKKSNTILGSQEGNTMKTNDTYMKFSWLTVPEKSLDKEHRCIVRHENNKNGVDQEIIFPPIKTDVITMDPKDNCSKDANDTLLLQLTNTSAYYMYLLLLLKSVVYFAIITCCLLRRTAFCCNGEKS

SEQ ID NO: 16412 - protein, 771 aa, synthetic construct
MALPVTALLLPLALLLHAARPDIQMTQSPSSLSASVGDRVTITCKASDHINNWLAWYQQKPGQAPKLLIYGATTLETGVPSRFSGSGSGTDYTLTISSLQPEDFATYYCQQSWNTPWTFGQGTKLEIKRLEDLKNVFPPEVAVFEPSEAEISHTQKATLVCLATGFYPDHVELSWWVNGKEVHSGVCTDPQPLKEQPALNDSRYCLSSRLRVSATFWQNPRNHFRCQVQFYGLSENDEWTQDRAKPVTQIVSAEAWGRADDVIKIHWQEKKSNTILGSQEGNTMKTNDTYMKFSWLTVPEKSLDKEHRCIVRHENNKNGVDQEIIFPPIKTDVITMDPKDNCSKDANDTLLLQLTNTSAYYMYLLLLLKSVVYFAIITCCLLRRTAFCCNGEKSRAKRSGSGATNFSLLKQAGDVEENPGPTSMDWIWRILFLVGAATGAHSGPEVAALEKEVAALEKEVAALEKEVAALEKGSGGGGSGGGGSGGGGSFEQVQLQQPGAELVKPGASVKMSCKASGYAFSSYWINWMKQKPGQGLEWIGQIYPGDGDTNYNGKFKGRATLTADTSSSTAYMQLSSLTSEDSAVYFCARSITTVVGCAMDYWGQGTSVTVSSTRIQNPDPAVYQLRDSKSSDKSVCLFTDFDSQTNVSQSKDSDVYITDKCVLDMRSMDFKSNSAVAWSNKSDFACANAFNNSIIPEDTFFPSPESSDSTDHVKPKETENTKQPSKSCHKPKAIVHTEKVNMMSLTVLGLRMLFAKTVAVNFLLTAKLFFL

SEQ ID NO: 16413 - protein, 775 aa, synthetic construct
MALPVTALLLPLALLLHAARPDIQMTQSPSSLSASVGDRVTITCKASDHINNWLAWYQQKPGQAPKLLIYGATTLETGVPSRFSGSGSGTDYTLTISSLQPEDFATYYCQQSWNTPWTFGQGTKLEIKRLEIQNPDPAVYQLRDSKSSDKSVCLFTDFDSQTNVSQSKDSDVYITDKCVLDMRSMDFKSNSAVAWSNKSDFACANAFNNSIIPEDTFFPSPESSDSTDHVKPKETENTKQPSKSCHKPKAIVHTEKVNMMSLTVLGLRMLFAKTVAVNFLLTAKLFFLRAKRSGSGVKQTLNFDLLKLAGDVESNPGPTSMDWIWRILFLVGAATGAHSGPEVAALEKEVAALEKEVAALEKEVAALEKGSGGGGSGGGGSGGGGSFEQVQLQQPGAELVKPGASVKMSCKASGYAFSSYWINWMKQKPGQGLEWIGQIYPGDGDTNYNGKFKGRATLTADTSSSTAYMQLSSLTSEDSAVYFCARSITTVVGCAMDYWGQGTSVTVSSTREDLKNVFPPEVAVFEPSEAEISHTQKATLVCLATGFYPDHVELSWWVNGKEVHSGVCTDPQPLKEQPALNDSRYCLSSRLRVSATFWQNPRNHFRCQVQFYGLSENDEWTQDRAKPVTQIVSAEAWGRADDVIKIHWQEKKSNTILGSQEGNTMKTNDTYMKFSWLTVPEKSLDKEHRCIVRHENNKNGVDQEIIFPPIKTDVITMDPKDNCSKDANDTLLLQLTNTSAYYMYLLLLLKSVVYFAIITCCLLRRTAFCCNGEKS

SEQ ID NO: 16414 - protein, 771 aa, synthetic construct; identical to SEQ ID NO: 16412

SEQ ID NO: 16415 - protein, 775 aa, synthetic construct; identical to SEQ ID NO: 16413

SEQ ID NO: 16416 - protein, 861 aa, synthetic construct
MALPVTALLLPLALLLHAARPDIQMTQSPSSLSASVGDRVTITCKASDHINNWLAWYQQKPGQAPKLLIYGATTLETGVPSRFSGSGSGTDYTLTISSLQPEDFATYYCQQSWNTPWTFGQGTKLEIKRLEDLKNVFPPEVAVFEPSEAEISHTQKATLVCLATGFYPDHVELSWWVNGKEVHSGVCTDPQPLKEQPALNDSRYCLSSRLRVSATFWQNPRNHFRCQVQFYGLSENDEWTQDRAKPVTQIVSAEAWGRADDVIKIHWQEKKSNTILGSQEGNTMKTNDTYMKFSWLTVPEKSLDKEHRCIVRHENNKNGVDQEIIFPPIKTDVITMDPKDNCSKDANDTLLLQLTNTSAYYMYLLLLLKSVVYFAIITCCLLRRTAFCCNGEKSRAKRSGSGATNFSLLKQAGDVEENPGPTSMDWIWRILFLVGAATGAHSGPQVQLQESGGGLAQAGGSLRLSCAASGRTFSMGWFRQAPGKEREFVAAITYSGGSPYYASSVRGRFTISRDNAKNTVYLQMNSLKPEDTAVYYCAANPTYGSDWNAENWGQGTQVTVSSGSGGGGSGGGGSGGGGSFEQVQLQQPGAELVKPGASVKMSCKASGYAFSSYWINWMKQKPGQGLEWIGQIYPGDGDTNYNGKFKGRATLTADTSSSTAYMQLSSLTSEDSAVYFCARSITTVVGCAMDYWGQGTSVTVSSTRIQNPDPAVYQLRDSKSSDKSVCLFTDFDSQTNVSQSKDSDVYITDKCVLDMRSMDFKSNSAVAWSNKSDFACANAFNNSIIPEDTFFPSPESSDSTDHVKPKETENTKQPSKSCHKPKAIVHTEKVNMMSLTVLGLRMLFAKTVAVNFLLTAKLFFL

SEQ ID NO: 16417 - protein, 865 aa, synthetic construct
MALPVTALLLPLALLLHAARPDIQMTQSPSSLSASVGDRVTITCKASDHINNWLAWYQQKPGQAPKLLIYGATTLETGVPSRFSGSGSGTDYTLTISSLQPEDFATYYCQQSWNTPWTFGQGTKLEIKRLEIQNPDPAVYQLRDSKSSDKSVCLFTDFDSQTNVSQSKDSDVYITDKCVLDMRSMDFKSNSAVAWSNKSDFACANAFNNSIIPEDTFFPSPESSDSTDHVKPKETENTKQPSKSCHKPKAIVHTEKVNMMSLTVLGLRMLFAKTVAVNFLLTAKLFFLRAKRSGSGVKQTLNFDLLKLAGDVESNPGPTSMDWIWRILFLVGAATGAHSGPQVQLQESGGGLAQAGGSLRLSCAASGRTFSMGWFRQAPGKEREFVAAITYSGGSPYYASSVRGRFTISRDNAKNTVYLQMNSLKPEDTAVYYCAANPTYGSDWNAENWGQGTQVTVSSGSGGGGSGGGGSGGGGSFEQVQLQQPGAELVKPGASVKMSCKASGYAFSSYWINWMKQKPGQGLEWIGQIYPGDGDTNYNGKFKGRATLTADTSSSTAYMQLSSLTSEDSAVYFCARSITTVVGCAMDYWGQGTSVTVSSTREDLKNVFPPEVAVFEPSEAEISHTQKATLVCLATGFYPDHVELSWWVNGKEVHSGVCTDPQPLKEQPALNDSRYCLSSRLRVSATFWQNPRNHFRCQVQFYGLSENDEWTQDRAKPVTQIVSAEAWGRADDVIKIHWQEKKSNTILGSQEGNTMKTNDTYMKFSWLTVPEKSLDKEHRCIVRHENNKNGVDQEIIFPPIKTDVITMDPKDNCSKDANDTLLLQLTNTSAYYMYLLLLLKSVVYFAIITCCLLRRTAFCCNGEKS

SEQ ID NO: 16418 - protein, 867 aa, synthetic construct
MALPVTALLLPLALLLHAARPEVQLVESGGSLVQPGGSLRLSCAASGFTFDDYAMSWVRQVPGKGLEWVSSINWSGTHTDYADSVKGRFTISRNNANNTLYLQMNSLKSEDTAVYYCAKNWRDAGTTWFEKSGSAGQGTQVTVSSGTGGGGSGGGGSGGGGSEFDIQMTQSPSSLSASVGDRVTITCKASDHINNWLAWYQQKPGQAPKLLIYGATTLETGVPSRFSGSGSGTDYTLTISSLQPEDFATYYCQQSWNTPWTFGQGTKLEIKRLEDLKNVFPPEVAVFEPSEAEISHTQKATLVCLATGFYPDHVELSWWVNGKEVHSGVCTDPQPLKEQPALNDSRYCLSSRLRVSATFWQNPRNHFRCQVQFYGLSENDEWTQDRAKPVTQIVSAEAWGRADDVIKIHWQEKKSNTILGSQEGNTMKTNDTYMKFSWLTVPEKSLDKEHRCIVRHENNKNGVDQEIIFPPIKTDVITMDPKDNCSKDANDTLLLQLTNTSAYYMYLLLLLKSVVYFAIITCCLLRRTAFCCNGEKSRAKRSGSGATNFSLLKQAGDVEENPGPTSMDWIWRILFLVGAATGAHSFEQVQLQQPGAELVKPGASVKMSCKASGYAFSSYWINWMKQKPGQGLEWIGQIYPGDGDTNYNGKFKGRATLTADTSSSTAYMQLSSLTSEDSAVYFCARSITTVVGCAMDYWGQGTSVTVSSTRIQNPDPAVYQLRDSKSSDKSVCLFTDFDSQTNVSQSKDSDVYITDKCVLDMRSMDFKSNSAVAWSNKSDFACANAFNNSIIPEDTFFPSPESSDSTDHVKPKETENTKQPSKSCHKPKAIVHTEKVNMMSLTVLGLRMLFAKTVAVNFLLTAKLFFL

SEQ ID NO: 16419 - protein, 871 aa, synthetic construct
MALPVTALLLPLALLLHAARPEVQLVESGGSLVQPGGSLRLSCAASGFTFDDYAMSWVRQVPGKGLEWVSSINWSGTHTDYADSVKGRFTISRNNANNTLYLQMNSLKSEDTAVYYCAKNWRDAGTTWFEKSGSAGQGTQVTVSSGTGGGGSGGGGSGGGGSEFDIQMTQSPSSLSASVGDRVTITCKASDHINNWLAWYQQKPGQAPKLLIYGATTLETGVPSRFSGSGSGTDYTLTISSLQPEDFATYYCQQSWNTPWTFGQGTKLEIKRLEIQNPDPAVYQLRDSKSSDKSVCLFTDFDSQTNVSQSKDSDVYITDKCVLDMRSMDFKSNSAVAWSNKSDFACANAFNNSIIPEDTFFPSPESSDSTDHVKPKETENTKQPSKSCHKPKAIVHTEKVNMMSLTVLGLRMLFAKTVAVNFLLTAKLFFLRAKRSGSGVKQTLNFDLLKLAGDVESNPGPTSMDWIWRILFLVGAATGAHSFEQVQLQQPGAELVKPGASVKMSCKASGYAFSSYWINWMKQKPGQGLEWIGQIYPGDGDTNYNGKFKGRATLTADTSSSTAYMQLSSLTSEDSAVYFCARSITTVVGCAMDYWGQGTSVTVSSTREDLKNVFPPEVAVFEPSEAEISHTQKATLVCLATGFYPDHVELSWWVNGKEVHSGVCTDPQPLKEQPALNDSRYCLSSRLRVSATFWQNPRNHFRCQVQFYGLSENDEWTQDRAKPVTQIVSAEAWGRADDVIKIHWQEKKSNTILGSQEGNTMKTNDTYMKFSWLTVPEKSLDKEHRCIVRHENNKNGVDQEIIFPPIKTDVITMDPKDNCSKDANDTLLLQLTNTSAYYMYLLLLLKSVVYFAIITCCLLRRTAFCCNGEKS

SEQ ID NO: 16420 - protein, 865 aa, synthetic construct
MALPVTALLLPLALLLHAARPEVQLLESGGGLVQPGGSLRLSCAASGFIFSSYAMSWVRQAPGKGQEWVSGVSGTGVNTYYADSVKGRFTISRDNSKNTLYLQMNSLRAEDTAVYYCASGKGWDSGSWYEDYRGQGTLVTVSSGTGGGGSGGGGSGGGGSEFDIQMTQSPSSLSASVGDRVTITCKASDHINNWLAWYQQKPGQAPKLLIYGATTLETGVPSRFSGSGSGTDYTLTISSLQPEDFATYYCQQSWNTPWTFGQGTKLEIKRLEDLKNVFPPEVAVFEPSEAEISHTQKATLVCLATGFYPDHVELSWWVNGKEVHSGVCTDPQPLKEQPALNDSRYCLSSRLRVSATFWQNPRNHFRCQVQFYGLSENDEWTQDRAKPVTQIVSAEAWGRADDVIKIHWQEKKSNTILGSQEGNTMKTNDTYMKFSWLTVPEKSLDKEHRCIVRHENNKNGVDQEIIFPPIKTDVITMDPKDNCSKDANDTLLLQLTNTSAYYMYLLLLLKSVVYFAIITCCLLRRTAFCCNGEKSRAKRSGSGATNFSLLKQAGDVEENPGPTSMDWIWRILFLVGAATGAHSFEQVQLQQPGAELVKPGASVKMSCKASGYAFSSYWINWMKQKPGQGLEWIGQIYPGDGDTNYNGKFKGRATLTADTSSSTAYMQLSSLTSEDSAVYFCARSITTVVGCAMDYWGQGTSVTVSSTRIQNPDPAVYQLRDSKSSDKSVCLFTDFDSQTNVSQSKDSDVYITDKCVLDMRSMDFKSNSAVAWSNKSDFACANAFNNSIIPEDTFFPSPESSDSTDHVKPKETENTKQPSKSCHKPKAIVHTEKVNMMSLTVLGLRMLFAKTVAVNFLLTAKLFFL

SEQ ID NO: 16421 - protein, 869 aa, synthetic construct
MALPVTALLLPLALLLHAARPEVQLLESGGGLVQPGGSLRLSCAASGFIFSSYAMSWVRQAPGKGQEWVSGVSGTGVNTYYADSVKGRFTISRDNSKNTLYLQMNSLRAEDTAVYYCASGKGWDSGSWYEDYRGQGTLVTVSSGTGGGGSGGGGSGGGGSEFDIQMTQSPSSLSASVGDRVTITCKASDHINNWLAWYQQKPGQAPKLLIYGATTLETGVPSRFSGSGSGTDYTLTISSLQPEDFATYYCQQSWNTPWTFGQGTKLEIKRLEIQNPDPAVYQLRDSKSSDKSVCLFTDFDSQTNVSQSKDSDVYITDKCVLDMRSMDFKSNSAVAWSNKSDFACANAFNNSIIPEDTFFPSPESSDSTDHVKPKETENTKQPSKSCHKPKAIVHTEKVNMMSLTVLGLRMLFAKTVAVNFLLTAKLFFLRAKRSGSGVKQTLNFDLLKLAGDVESNPGPTSMDWIWRILFLVGAATGAHSFEQVQLQQPGAELVKPGASVKMSCKASGYAFSSYWINWMKQKPGQGLEWIGQIYPGDGDTNYNGKFKGRATLTADTSSSTAYMQLSSLTSEDSAVYFCARSITTVVGCAMDYWGQGTSVTVSSTREDLKNVFPPEVAVFEPSEAEISHTQKATLVCLATGFYPDHVELSWWVNGKEVHSGVCTDPQPLKEQPALNDSRYCLSSRLRVSATFWQNPRNHFRCQVQFYGLSENDEWTQDRAKPVTQIVSAEAWGRADDVIKIHWQEKKSNTILGSQEGNTMKTNDTYMKFSWLTVPEKSLDKEHRCIVRHENNKNGVDQEIIFPPIKTDVITMDPKDNCSKDANDTLLLQLTNTSAYYMYLLLLLKSVVYFAIITCCLLRRTAFCCNGEKS

SEQ ID NO: 16422 - protein, 833 aa, synthetic construct
MALPVTALLLPLALLLHAARPMLPAPKNLVVSRITEDSARLSWTAPDAAFDSFPIRYIETLIWGEAIWLDVPGSERSYDLTGLKPGTEYAVVITGVKGGRFSSPLVASFTTGTGGGGSGGGGSGGGGSEFDIQMTQSPSSLSASVGDRVTITCKASDHINNWLAWYQQKPGQAPKLLIYGATTLETGVPSRFSGSGSGTDYTLTISSLQPEDFATYYCQQSWNTPWTFGQGTKLEIKRLEDLKNVFPPEVAVFEPSEAEISHTQKATLVCLATGFYPDHVELSWWVNGKEVHSGVCTDPQPLKEQPALNDSRYCLSSRLRVSATFWQNPRNHFRCQVQFYGLSENDEWTQDRAKPVTQIVSAEAWGRADDVIKIHWQEKKSNTILGSQEGNTMKTNDTYMKFSWLTVPEKSLDKEHRCIVRHENNKNGVDQEIIFPPIKTDVITMDPKDNCSKDANDTLLLQLTNTSAYYMYLLLLLKSVVYFAIITCCLLRRTAFCCNGEKSRAKRSGSGATNFSLLKQAGDVEENPGPTSMDWIWRILFLVGAATGAHSFEQVQLQQPGAELVKPGASVKMSCKASGYAFSSYWINWMKQKPGQGLEWIGQIYPGDGDTNYNGKFKGRATLTADTSSSTAYMQLSSLTSEDSAVYFCARSITTVVGCAMDYWGQGTSVTVSSTRIQNPDPAVYQLRDSKSSDKSVCLFTDFDSQTNVSQSKDSDVYITDKCVLDMRSMDFKSNSAVAWSNKSDFACANAFNNSIIPEDTFFPSPESSDSTDHVKPKETENTKQPSKSCHKPKAIVHTEKVNMMSLTVLGLRMLFAKTVAVNFLLTAKLFFL

SEQ ID NO: 16423 - protein, 837 aa, synthetic construct
MALPVTALLLPLALLLHAARPMLPAPKNLVVSRITEDSARLSWTAPDAAFDSFPIRYIETLIWGEAIWLDVPGSERSYDLTGLKPGTEYAVVITGVKGGRFSSPLVASFTTGTGGGGSGGGGSGGGGSEFDIQMTQSPSSLSASVGDRVTITCKASDHINNWLAWYQQKPGQAPKLLIYGATTLETGVPSRFSGSGSGTDYTLTISSLQPEDFATYYCQQSWNTPWTFGQGTKLEIKRLEIQNPDPAVYQLRDSKSSDKSVCLFTDFDSQTNVSQSKDSDVYITDKCVLDMRSMDFKSNSAVAWSNKSDFACANAFNNSIIPEDTFFPSPESSDSTDHVKPKETENTKQPSKSCHKPKAIVHTEKVNMMSLTVLGLRMLFAKTVAVNFLLTAKLFFLRAKRSGSGVKQTLNFDLLKLAGDVESNPGPTSMDWIWRILFLVGAATGAHSFEQVQLQQPGAELVKPGASVKMSCKASGYAFSSYWINWMKQKPGQGLEWIGQIYPGDGDTNYNGKFKGRATLTADTSSSTAYMQLSSLTSEDSAVYFCARSITTVVGCAMDYWGQGTSVTVSSTREDLKNVFPPEVAVFEPSEAEISHTQKATLVCLATGFYPDHVELSWWVNGKEVHSGVCTDPQPLKEQPALNDSRYCLSSRLRVSATFWQNPRNHFRCQVQFYGLSENDEWTQDRAKPVTQIVSAEAWGRADDVIKIHWQEKKSNTILGSQEGNTMKTNDTYMKFSWLTVPEKSLDKEHRCIVRHENNKNGVDQEIIFPPIKTDVITMDPKDNCSKDANDTLLLQLTNTSAYYMYLLLLLKSVVYFAIITCCLLRRTAFCCNGEKS

SEQ ID NO: 16424 - protein, 862 aa, synthetic construct
MALPVTALLLPLALLLHAARPEVQLVESGGGLVQPGGSLRLSCAASGFNIKDTCIGWVRRAPGKEEELVAKICKYSGHTRYADSVKGRFTISADTSKNTAYLQMNSLRAEDTAVYYCAAVSVRDGHYNYWGQGTTVTVSSGTGGGGSGGGGSGGGGSEFDIQMTQSPSSLSASVGDRVTITCKASDHINNWLAWYQQKPGQAPKLLIYGATTLETGVPSRFSGSGSGTDYTLTISSLQPEDFATYYCQQSWNTPWTFGQGTKLEIKRLEDLKNVFPPEVAVFEPSEAEISHTQKATLVCLATGFYPDHVELSWWVNGKEVHSGVCTDPQPLKEQPALNDSRYCLSSRLRVSATFWQNPRNHFRCQVQFYGLSENDEWTQDRAKPVTQIVSAEAWGRADDVIKIHWQEKKSNTILGSQEGNTMKTNDTYMKFSWLTVPEKSLDKEHRCIVRHENNKNGVDQEIIFPPIKTDVITMDPKDNCSKDANDTLLLQLTNTSAYYMYLLLLLKSVVYFAIITCCLLRRTAFCCNGEKSRAKRSGSGATNFSLLKQAGDVEENPGPTSMDWIWRILFLVGAATGAHSFEQVQLQQPGAELVKPGASVKMSCKASGYAFSSYWINWMKQKPGQGLEWIGQIYPGDGDTNYNGKFKGRATLTADTSSSTAYMQLSSLTSEDSAVYFCARSITTVVGCAMDYWGQGTSVTVSSTRIQNPDPAVYQLRDSKSSDKSVCLFTDFDSQTNVSQSKDSDVYITDKCVLDMRSMDFKSNSAVAWSNKSDFACANAFNNSIIPEDTFFPSPESSDSTDHVKPKETENTKQPSKSCHKPKAIVHTEKVNMMSLTVLGLRMLFAKTVAVNFLLTAKLFFL

SEQ ID NO: 16425 - protein, 866 aa, synthetic construct
MALPVTALLLPLALLLHAARPEVQLVESGGGLVQPGGSLRLSCAASGFNIKDTCIGWVRRAPGKEEELVAKICKYSGHTRYADSVKGRFTISADTSKNTAYLQMNSLRAEDTAVYYCAAVSVRDGHYNYWGQGTTVTVSSGTGGGGSGGGGSGGGGSEFDIQMTQSPSSLSASVGDRVTITCKASDHINNWLAWYQQKPGQAPKLLIYGATTLETGVPSRFSGSGSGTDYTLTISSLQPEDFATYYCQQSWNTPWTFGQGTKLEIKRLEIQNPDPAVYQLRDSKSSDKSVCLFTDFDSQTNVSQSKDSDVYITDKCVLDMRSMDFKSNSAVAWSNKSDFACANAFNNSIIPEDTFFPSPESSDSTDHVKPKETENTKQPSKSCHKPKAIVHTEKVNMMSLTVLGLRMLFAKTVAVNFLLTAKLFFLRAKRSGSGVKQTLNFDLLKLAGDVESNPGPTSMDWIWRILFLVGAATGAHSFEQVQLQQPGAELVKPGASVKMSCKASGYAFSSYWINWMKQKPGQGLEWIGQIYPGDGDTNYNGKFKGRATLTADTSSSTAYMQLSSLTSEDSAVYFCARSITTVVGCAMDYWGQGTSVTVSSTREDLKNVFPPEVAVFEPSEAEISHTQKATLVCLATGFYPDHVELSWWVNGKEVHSGVCTDPQPLKEQPALNDSRYCLSSRLRVSATFWQNPRNHFRCQVQFYGLSENDEWTQDRAKPVTQIVSAEAWGRADDVIKIHWQEKKSNTILGSQEGNTMKTNDTYMKFSWLTVPEKSLDKEHRCIVRHENNKNGVDQEIIFPPIKTDVITMDPKDNCSKDANDTLLLQLTNTSAYYMYLLLLLKSVVYFAIITCCLLRRTAFCCNGEKS

SEQ ID NO: 16426 - protein, 739 aa, synthetic construct
MALPVTALLLPLALLLHAARPQLQLQESGPGLVKPSETLSLTCTVSGDSISSGDYYWGWIRQPPGKGLEWIGHIYYSGVTYYNPSLKSRVTISVDTSRNQFSLKLSSVTAADTAVYYCTREDSSNWRSRGQGTLVTVSSLEDLKNVFPPEVAVFEPSEAEISHTQKATLVCLATGFYPDHVELSWWVNGKEVHSGVCTDPQPLKEQPALNDSRYCLSSRLRVSATFWQNPRNHFRCQVQFYGLSENDEWTQDRAKPVTQIVSAEAWGRADDVIKIHWQEKKSNTILGSQEGNTMKTNDTYMKFSWLTVPEKSLDKEHRCIVRHENNKNGVDQEIIFPPIKTDVITMDPKDNCSKDANDTLLLQLTNTSAYYMYLLLLLKSVVYFAIITCCLLRRTAFCCNGEKSRAKRSGSGATNFSLLKQAGDVEENPGPTSMDWIWRILFLVGAATGAHSFEVQLVESGGGVVQPGRSLRLSCAASGFSFSGYGMHWVRQAPGKGLEWVAYISYDGSNKYYADSVKGRFTISRDNSKNTLYLQMNSLRAEDTAVYYCAKDPAWGLRLGESSSYDFDIWGQGTMVTVSSTRIQNPDPAVYQLRDSKSSDKSVCLFTDFDSQTNVSQSKDSDVYITDKCVLDMRSMDFKSNSAVAWSNKSDFACANAFNNSIIPEDTFFPSPESSDSTDHVKPKETENTKQPSKSCHKPKAIVHTEKVNMMSLTVLGLRMLFAKTVAVNFLLTAKLFFL

SEQ ID NO: 16427 - protein, 743 aa, synthetic construct
MALPVTALLLPLALLLHAARPQLQLQESGPGLVKPSETLSLTCTVSGDSISSGDYYWGWIRQPPGKGLEWIGHIYYSGVTYYNPSLKSRVTISVDTSRNQFSLKLSSVTAADTAVYYCTREDSSNWRSRGQGTLVTVSSLEIQNPDPAVYQLRDSKSSDKSVCLFTDFDSQTNVSQSKDSDVYITDKCVLDMRSMDFKSNSAVAWSNKSDFACANAFNNSIIPEDTFFPSPESSDSTDHVKPKETENTKQPSKSCHKPKAIVHTEKVNMMSLTVLGLRMLFAKTVAVNFLLTAKLFFLRAKRSGSGVKQTLNFDLLKLAGDVESNPGPTSMDWIWRILFLVGAATGAHSFEVQLVESGGGVVQPGRSLRLSCAASGFSFSGYGMHWVRQAPGKGLEWVAYISYDGSNKYYADSVKGRFTISRDNSKNTLYLQMNSLRAEDTAVYYCAKDPAWGLRLGESSSYDFDIWGQGTMVTVSSTREDLKNVFPPEVAVFEPSEAEISHTQKATLVCLATGFYPDHVELSWWVNGKEVHSGVCTDPQPLKEQPALNDSRYCLSSRLRVSATFWQNPRNHFRCQVQFYGLSENDEWTQDRAKPVTQIVSAEAWGRADDVIKIHWQEKKSNTILGSQEGNTMKTNDTYMKFSWLTVPEKSLDKEHRCIVRHENNKNGVDQEIIFPPIKTDVITMDPKDNCSKDANDTLLLQLTNTSAYYMYLLLLLKSVVYFAIITCCLLRRTAFCCNGEKS

SEQ ID NO: 16428 - protein, 728 aa, synthetic construct
MALPVTALLLPLALLLHAARPQLQLQESGPGLVKPSETLSLTCTVSGDSISSGDYYWGWIRQPPGKGLEWIGHIYYSGVTYYNPSLKSRVTISVDTSRNQFSLKLSSVTAADTAVYYCTREDSSNWRSRGQGTLVTVSSLEDLKNVFPPEVAVFEPSEAEISHTQKATLVCLATGFYPDHVELSWWVNGKEVHSGVCTDPQPLKEQPALNDSRYCLSSRLRVSATFWQNPRNHFRCQVQFYGLSENDEWTQDRAKPVTQIVSAEAWGRADDVIKIHWQEKKSNTILGSQEGNTMKTNDTYMKFSWLTVPEKSLDKEHRCIVRHENNKNGVDQEIIFPPIKTDVITMDPKDNCSKDANDTLLLQLTNTSAYYMYLLLLLKSVVYFAIITCCLLRRTAFCCNGEKSRAKRSGSGATNFSLLKQAGDVEENPGPTSMDWIWRILFLVGAATGAHSFEVQLVESGGGLVQPGGSLRLSCAASGFSFSDFWMSWVRQAPGKGLEWVATISQAGSEKDYVDSVKGRFTISRDNAKKSLYLQMNSLRAEDTAVYYCASGVYSFDYRGQGTLVTVSSTRIQNPDPAVYQLRDSKSSDKSVCLFTDFDSQTNVSQSKDSDVYITDKCVLDMRSMDFKSNSAVAWSNKSDFACANAFNNSIIPEDTFFPSPESSDSTDHVKPKETENTKQPSKSCHKPKAIVHTEKVNMMSLTVLGLRMLFAKTVAVNFLLTAKLFFL

SEQ ID NO: 16429 - protein, 732 aa, synthetic construct
MALPVTALLLPLALLLHAARPQLQLQESGPGLVKPSETLSLTCTVSGDSISSGDYYWGWIRQPPGKGLEWIGHIYYSGVTYYNPSLKSRVTISVDTSRNQFSLKLSSVTAADTAVYYCTREDSSNWRSRGQGTLVTVSSLEIQNPDPAVYQLRDSKSSDKSVCLFTDFDSQTNVSQSKDSDVYITDKCVLDMRSMDFKSNSAVAWSNKSDFACANAFNNSIIPEDTFFPSPESSDSTDHVKPKETENTKQPSKSCHKPKAIVHTEKVNMMSLTVLGLRMLFAKTVAVNFLLTAKLFFLRAKRSGSGVKQTLNFDLLKLAGDVESNPGPTSMDWIWRILFLVGAATGAHSFEVQLVESGGGLVQPGGSLRLSCAASGFSFSDFWMSWVRQAPGKGLEWVATISQAGSEKDYVDSVKGRFTISRDNAKKSLYLQMNSLRAEDTAVYYCASGVYSFDYRGQGTLVTVSSTREDLKNVFPPEVAVFEPSEAEISHTQKATLVCLATGFYPDHVELSWWVNGKEVHSGVCTDPQPLKEQPALNDSRYCLSSRLRVSATFWQNPRNHFRCQVQFYGLSENDEWTQDRAKPVTQIVSAEAWGRADDVIKIHWQEKKSNTILGSQEGNTMKTNDTYMKFSWLTVPEKSLDKEHRCIVRHENNKNGVDQEIIFPPIKTDVITMDPKDNCSKDANDTLLLQLTNTSAYYMYLLLLLKSVVYFAIITCCLLRRTAFCCNGEKS

SEQ ID NO: 16430 - protein, 730 aa, synthetic construct
MALPVTALLLPLALLLHAARPQLQLQESGPGLVKPSETLSLTCTVSGDSISSGDYYWGWIRQPPGKGLEWIGHIYYSGVTYYNPSLKSRVTISVDTSRNQFSLKLSSVTAADTAVYYCTREDSSNWRSRGQGTLVTVSSLEDLKNVFPPEVAVFEPSEAEISHTQKATLVCLATGFYPDHVELSWWVNGKEVHSGVCTDPQPLKEQPALNDSRYCLSSRLRVSATFWQNPRNHFRCQVQFYGLSENDEWTQDRAKPVTQIVSAEAWGRADDVIKIHWQEKKSNTILGSQEGNTMKTNDTYMKFSWLTVPEKSLDKEHRCIVRHENNKNGVDQEIIFPPIKTDVITMDPKDNCSKDANDTLLLQLTNTSAYYMYLLLLLKSVVYFAIITCCLLRRTAFCCNGEKSRAKRSGSGATNFSLLKQAGDVEENPGPTSMDWIWRILFLVGAATGAHSFQVQLVESGGGLVQPGGSLRLSCAASGFTFTNHAMSWVRQAPGKGLELVSSISGNGRTTYYADSVKGRFTISRDISKNTLDLQMNSLRAEDTAVYYCAKDGGETLVDSRGQGTLVTVSSTRIQNPDPAVYQLRDSKSSDKSVCLFTDFDSQTNVSQSKDSDVYITDKCVLDMRSMDFKSNSAVAWSNKSDFACANAFNNSIIPEDTFFPSPESSDSTDHVKPKETENTKQPSKSCHKPKAIVHTEKVNMMSLTVLGLRMLFAKTVAVNFLLTAKLFFL

SEQ ID NO: 16431 - protein, 734 aa, synthetic construct
MALPVTALLLPLALLLHAARPQLQLQESGPGLVKPSETLSLTCTVSGDSISSGDYYWGWIRQPPGKGLEWIGHIYYSGVTYYNPSLKSRVTISVDTSRNQFSLKLSSVTAADTAVYYCTREDSSNWRSRGQGTLVTVSSLEIQNPDPAVYQLRDSKSSDKSVCLFTDFDSQTNVSQSKDSDVYITDKCVLDMRSMDFKSNSAVAWSNKSDFACANAFNNSIIPEDTFFPSPESSDSTDHVKPKETENTKQPSKSCHKPKAIVHTEKVNMMSLTVLGLRMLFAKTVAVNFLLTAKLFFLRAKRSGSGVKQTLNFDLLKLAGDVESNPGPTSMDWIWRILFLVGAATGAHSFQVQLVESGGGLVQPGGSLRLSCAASGFTFTNHAMSWVRQAPGKGLELVSSISGNGRTTYYADSVKGRFTISRDISKNTLDLQMNSLRAEDTAVYYCAKDGGETLVDSRGQGTLVTVSSTREDLKNVFPPEVAVFEPSEAEISHTQKATLVCLATGFYPDHVELSWWVNGKEVHSGVCTDPQPLKEQPALNDSRYCLSSRLRVSATFWQNPRNHFRCQVQFYGLSENDEWTQDRAKPVTQIVSAEAWGRADDVIKIHWQEKKSNTILGSQEGNTMKTNDTYMKFSWLTVPEKSLDKEHRCIVRHENNKNGVDQEIIFPPIKTDVITMDPKDNCSKDANDTLLLQLTNTSAYYMYLLLLLKSVVYFAIITCCLLRRTAFCCNGEKS

SEQ ID NO: 16432 - protein, 729 aa, synthetic construct
MALPVTALLLPLALLLHAARPEVQLLESGGGLIQPGGSLRLSCAASGFTFSSHAMTWVRQAPGKGLEWVSAISGSGDYTHYADSVKGRFTISRDNSKNTVYLQMNSLRAEDSAVYYCAKDEDGGSLLGHRGQGTLVTVSSLEDLKNVFPPEVAVFEPSEAEISHTQKATLVCLATGFYPDHVELSWWVNGKEVHSGVCTDPQPLKEQPALNDSRYCLSSRLRVSATFWQNPRNHFRCQVQFYGLSENDEWTQDRAKPVTQIVSAEAWGRADDVIKIHWQEKKSNTILGSQEGNTMKTNDTYMKFSWLTVPEKSLDKEHRCIVRHENNKNGVDQEIIFPPIKTDVITMDPKDNCSKDANDTLLLQLTNTSAYYMYLLLLLKSVVYFAIITCCLLRRTAFCCNGEKSRAKRSGSGATNFSLLKQAGDVEENPGPTSMDWIWRILFLVGAATGAHSFEVQLVESGGGLVQPGGSLRLSCAASGFSFSDFWMSWVRQAPGKGLEWVATISQAGSEKDYVDSVKGRFTISRDNAKKSLYLQMNSLRAEDTAVYYCASGVYSFDYRGQGTLVTVSSTRIQNPDPAVYQLRDSKSSDKSVCLFTDFDSQTNVSQSKDSDVYITDKCVLDMRSMDFKSNSAVAWSNKSDFACANAFNNSIIPEDTFFPSPESSDSTDHVKPKETENTKQPSKSCHKPKAIVHTEKVNMMSLTVLGLRMLFAKTVAVNFLLTAKLFFL

SEQ ID NO: 16433 - protein, 733 aa, synthetic construct
MALPVTALLLPLALLLHAARPEVQLLESGGGLIQPGGSLRLSCAASGFTFSSHAMTWVRQAPGKGLEWVSAISGSGDYTHYADSVKGRFTISRDNSKNTVYLQMNSLRAEDSAVYYCAKDEDGGSLLGHRGQGTLVTVSSLEIQNPDPAVYQLRDSKSSDKSVCLFTDFDSQTNVSQSKDSDVYITDKCVLDMRSMDFKSNSAVAWSNKSDFACANAFNNSIIPEDTFFPSPESSDSTDHVKPKETENTKQPSKSCHKPKAIVHTEKVNMMSLTVLGLRMLFAKTVAVNFLLTAKLFFLRAKRSGSGVKQTLNFDLLKLAGDVESNPGPTSMDWIWRILFLVGAATGAHSFEVQLVESGGGLVQPGGSLRLSCAASGFSFSDFWMSWVRQAPGKGLEWVATISQAGSEKDYVDSVKGRFTISRDNAKKSLYLQMNSLRAEDTAVYYCASGVYSFDYRGQGTLVTVSSTREDLKNVFPPEVAVFEPSEAEISHTQKATLVCLATGFYPDHVELSWWVNGKEVHSGVCTDPQPLKEQPALNDSRYCLSSRLRVSATFWQNPRNHFRCQVQFYGLSENDEWTQDRAKPVTQIVSAEAWGRADDVIKIHWQEKKSNTILGSQEGNTMKTNDTYMKFSWLTVPEKSLDKEHRCIVRHENNKNGVDQEIIFPPIKTDVITMDPKDNCSKDANDTLLLQLTNTSAYYMYLLLLLKSVVYFAIITCCLLRRTAFCCNGEKS

SEQ ID NO: 16434 - protein, 735 aa, synthetic construct
MALPVTALLLPLALLLHAARPQVQLVESGGGLVQPGGSLRLSCAASGFTFTNHAMSWVRQAPGKGLELVSSISGNGRTTYYADSVKGRFTISRDISKNTLDLQMNSLRAEDTAVYYCAKDGGETLVDSRGQGTLVTVSSLEDLKNVFPPEVAVFEPSEAEISHTQKATLVCLATGFYPDHVELSWWVNGKEVHSGVCTDPQPLKEQPALNDSRYCLSSRLRVSATFWQNPRNHFRCQVQFYGLSENDEWTQDRAKPVTQIVSAEAWGRADDVIKIHWQEKKSNTILGSQEGNTMKTNDTYMKFSWLTVPEKSLDKEHRCIVRHENNKNGVDQEIIFPPIKTDVITMDPKDNCSKDANDTLLLQLTNTSAYYMYLLLLLKSVVYFAIITCCLLRRTAFCCNGEKSRAKRSGSGATNFSLLKQAGDVEENPGPTSMDWIWRILFLVGAATGAHSFEEVQLLESGGGLVQPGGSLRLSCAASGFIFSSYAMSWVRQAPGKGQEWVSGVSGTGVNTYYADSVKGRFTISRDNSKNTLYLQMNSLRAEDTAVYYCASGKGWDSGSWYEDYRGQGTLVTVSSTRIQNPDPAVYQLRDSKSSDKSVCLFTDFDSQTNVSQSKDSDVYITDKCVLDMRSMDFKSNSAVAWSNKSDFACANAFNNSIIPEDTFFPSPESSDSTDHVKPKETENTKQPSKSCHKPKAIVHTEKVNMMSLTVLGLRMLFAKTVAVNFLLTAKLFFL

SEQ ID NO: 16435 - protein, 739 aa, synthetic construct
MALPVTALLLPLALLLHAARPQVQLVESGGGLVQPGGSLRLSCAASGFTFTNHAMSWVRQAPGKGLELVSSISGNGRTTYYADSVKGRFTISRDISKNTLDLQMNSLRAEDTAVYYCAKDGGETLVDSRGQGTLVTVSSLEIQNPDPAVYQLRDSKSSDKSVCLFTDFDSQTNVSQSKDSDVYITDKCVLDMRSMDFKSNSAVAWSNKSDFACANAFNNSIIPEDTFFPSPESSDSTDHVKPKETENTKQPSKSCHKPKAIVHTEKVNMMSLTVLGLRMLFAKTVAVNFLLTAKLFFLRAKRSGSGVKQTLNFDLLKLAGDVESNPGPTSMDWIWRILFLVGAATGAHSFEEVQLLESGGGLVQPGGSLRLSCAASGFIFSSYAMSWVRQAPGKGQEWVSGVSGTGVNTYYADSVKGRFTISRDNSKNTLYLQMNSLRAEDTAVYYCASGKGWDSGSWYEDYRGQGTLVTVSSTREDLKNVFPPEVAVFEPSEAEISHTQKATLVCLATGFYPDHVELSWWVNGKEVHSGVCTDPQPLKEQPALNDSRYCLSSRLRVSATFWQNPRNHFRCQVQFYGLSENDEWTQDRAKPVTQIVSAEAWGRADDVIKIHWQEKKSNTILGSQEGNTMKTNDTYMKFSWLTVPEKSLDKEHRCIVRHENNKNGVDQEIIFPPIKTDVITMDPKDNCSKDANDTLLLQLTNTSAYYMYLLLLLKSVVYFAIITCCLLRRTAFCCNGEKS

SEQ ID NO: 16436 - protein, 731 aa, synthetic construct
MALPVTALLLPLALLLHAARPEVQLVESGGGLVQAGGSLRLSCAASGRTFSMGWFRQAPGKEREFVAAITYSGGSPYYADSVKGRFTISRDNAKNTVYLQMNSLKPEDTAVYYCAANPTYGSDWNAENWGQGTQVTVSSLEDLKNVFPPEVAVFEPSEAEISHTQKATLVCLATGFYPDHVELSWWVNGKEVHSGVCTDPQPLKEQPALNDSRYCLSSRLRVSATFWQNPRNHFRCQVQFYGLSENDEWTQDRAKPVTQIVSAEAWGRADDVIKIHWQEKKSNTILGSQEGNTMKTNDTYMKFSWLTVPEKSLDKEHRCIVRHENNKNGVDQEIIFPPIKTDVITMDPKDNCSKDANDTLLLQLTNTSAYYMYLLLLLKSVVYFAIITCCLLRRTAFCCNGEKSRAKRSGSGATNFSLLKQAGDVEENPGPTSMDWIWRILFLVGAATGAHSFEQLQLQESGPGLVKPSETLSLTCTVSGGSISSGDYYWGWIRQPPGKGLEWIGSISYSGSTYYNPSLKSRVTISVDTSRNQFSLKLSSVTAADTAVYYCTREDSSNWRSRGQGTLVTVSSTRIQNPDPAVYQLRDSKSSDKSVCLFTDFDSQTNVSQSKDSDVYITDKCVLDMRSMDFKSNSAVAWSNKSDFACANAFNNSIIPEDTFFPSPESSDSTDHVKPKETENTKQPSKSCHKPKAIVHTEKVNMMSLTVLGLRMLFAKTVAVNFLLTAKLFFL

SEQ ID NO: 16437 - protein, 735 aa, synthetic construct
MALPVTALLLPLALLLHAARPEVQLVESGGGLVQAGGSLRLSCAASGRTFSMGWFRQAPGKEREFVAAITYSGGSPYYADSVKGRFTISRDNAKNTVYLQMNSLKPEDTAVYYCAANPTYGSDWNAENWGQGTQVTVSSLEIQNPDPAVYQLRDSKSSDKSVCLFTDFDSQTNVSQSKDSDVYITDKCVLDMRSMDFKSNSAVAWSNKSDFACANAFNNSIIPEDTFFPSPESSDSTDHVKPKETENTKQPSKSCHKPKAIVHTEKVNMMSLTVLGLRMLFAKTVAVNFLLTAKLFFLRAKRSGSGVKQTLNFDLLKLAGDVESNPGPTSMDWIWRILFLVGAATGAHSFEQLQLQESGPGLVKPSETLSLTCTVSGGSISSGDYYWGWIRQPPGKGLEWIGSISYSGSTYYNPSLKSRVTISVDTSRNQFSLKLSSVTAADTAVYYCTREDSSNWRSRGQGTLVTVSSTREDLKNVFPPEVAVFEPSEAEISHTQKATLVCLATGFYPDHVELSWWVNGKEVHSGVCTDPQPLKEQPALNDSRYCLSSRLRVSATFWQNPRNHFRCQVQFYGLSENDEWTQDRAKPVTQIVSAEAWGRADDVIKIHWQEKKSNTILGSQEGNTMKTNDTYMKFSWLTVPEKSLDKEHRCIVRHENNKNGVDQEIIFPPIKTDVITMDPKDNCSKDANDTLLLQLTNTSAYYMYLLLLLKSVVYFAIITCCLLRRTAFCCNGEKS

SEQ ID NO: 16438 - protein, 1233 aa, synthetic construct
MALPVTALLLPLALLLHAARPEVQLVESGGGLVQAGGSLRLSCAASGRTFSMGWFRQAPGKEREFVAAITYSGGSPYYADSVKGRFTISRDNAKNTVYLQMNSLKPEDTAVYYCAANPTYGSDWNAENWGQGTQVTVSSGTGGGGSGGGGSGGGGSEFDIQMTQSPSSLSASVGDRVTITCKASDHINNWLAWYQQKPGQAPKLLIYGATTLETGVPSRFSGSGSGTDYTLTISSLQPEDFATYYCQQSWNTPWTFGQGTKLEIKRLEDLKNVFPPEVAVFEPSEAEISHTQKATLVCLATGFYPDHVELSWWVNGKEVHSGVCTDPQPLKEQPALNDSRYCLSSRLRVSATFWQNPRNHFRCQVQFYGLSENDEWTQDRAKPVTQIVSAEAWGRADDVIKIHWQEKKSNTILGSQEGNTMKTNDTYMKFSWLTVPEKSLDKEHRCIVRHENNKNGVDQEIIFPPIKTDVITMDPKDNCSKDANDTLLLQLTNTSAYYMYLLLLLKSVVYFAIITCCLLRRTAFCCNGEKSRAKRSGSGATNFSLLKQAGDVEENPGPTSATMDWIWRILFLVGAATGAHSGPEVQLVESGGGLVQAGGSLRLSCAASGRTFTMGWFRQAPGKEREFVAAISLSPTLAYYADSVKGRFTISRDNAKNTVVLQMNSLKPEDTALYYCAADRKSVMSIRPDYWGQGTQVTVSSGSGGGGSGGGGSGGGGSFEQVQLQQPGAELVKPGASVKMSCKASGYAFSSYWINWMKQKPGQGLEWIGQIYPGDGDTNYNGKFKGRATLTADTSSSTAYMQLSSLTSEDSAVYFCARSITTVVGCAMDYWGQGTSVTVSSTRIQNPDPAVYQLRDSKSSDKSVCLFTDFDSQTNVSQSKDSDVYITDKCVLDMRSMDFKSNSAVAWSNKSDFACANAFNNSIIPEDTFFPSPESSDSTDHVKPKETENTKQPSKSCHKPKAIVHTEKVNMMSLTVLGLRMLFAKTVAVNFLLTAKLFFLRAKRSGSGVKQTLNFDLLKLAGDVESNPGPSRGHMTEYKPTVRLATRDDVPRAVRTLAAAFADYPATRHTVDPDRHIERVTELQELFLTRVGLDIGKVWVADDGAAVAVWTTPESVEAGAVFAEIGPRMAELSGSRLAAQQQMEGLLAPHRPKEPAWFLATVGVSPDHQGKGLGSAVVLPGVEAAERAGVPAFLETSAPRNLPFYERLGFTVTADVEVPEGPRTWCMTRKPGA

SEQ ID NO: 16439 - protein, 871 aa, synthetic construct
MALPVTALLLPLALLLHAARPEVQLVESGGGLVQPGGSLRLSCAASGFASDYYIIGWFRQAPGKEREGVSCISSRYANTNYADSVKGRFTISRDNAKNTVYLQMNSLKPEDTAVYYCAADTRRYTCPDIATMHRNFDSWGQGTLVTVSSGTGGGGSGGGGSGGGGSEFDIQMTQSPSSLSASVGDRVTITCKASDHINNWLAWYQQKPGQAPKLLIYGATTLETGVPSRFSGSGSGTDYTLTISSLQPEDFATYYCQQSWNTPWTFGQGTKLEIKRLEDLKNVFPPEVAVFEPSEAEISHTQKATLVCLATGFYPDHVELSWWVNGKEVHSGVCTDPQPLKEQPALNDSRYCLSSRLRVSATFWQNPRNHFRCQVQFYGLSENDEWTQDRAKPVTQIVSAEAWGRADDVIKIHWQEKKSNTILGSQEGNTMKTNDTYMKFSWLTVPEKSLDKEHRCIVRHENNKNGVDQEIIFPPIKTDVITMDPKDNCSKDANDTLLLQLTNTSAYYMYLLLLLKSVVYFAIITCCLLRRTAFCCNGEKSRAKRSGSGATNFSLLKQAGDVEENPGPTSMDWIWRILFLVGAATGAHSFEQVQLQQPGAELVKPGASVKMSCKASGYAFSSYWINWMKQKPGQGLEWIGQIYPGDGDTNYNGKFKGRATLTADTSSSTAYMQLSSLTSEDSAVYFCARSITTVVGCAMDYWGQGTSVTVSSTRIQNPDPAVYQLRDSKSSDKSVCLFTDFDSQTNVSQSKDSDVYITDKCVLDMRSMDFKSNSAVAWSNKSDFACANAFNNSIIPEDTFFPSPESSDSTDHVKPKETENTKQPSKSCHKPKAIVHTEKVNMMSLTVLGLRMLFAKTVAVNFLLTAKLFFL

SEQ ID NO: 16440 - protein, 871 aa, synthetic construct
MALPVTALLLPLALLLHAARPEVQLVESGGGLVQPGGSLRLSCEASGFASDDYIIGWFRQAPGKEREGVSCISSKYANTVYTDSVKGRFRLSRGTAKNTVYLQMSALKPEDTAVYYCAMDSRRVTCPEISTMHRNFDSWGQGTLVTVSSGTGGGGSGGGGSGGGGSEFDIQMTQSPSSLSASVGDRVTITCKASDHINNWLAWYQQKPGQAPKLLIYGATTLETGVPSRFSGSGSGTDYTLTISSLQPEDFATYYCQQSWNTPWTFGQGTKLEIKRLEDLKNVFPPEVAVFEPSEAEISHTQKATLVCLATGFYPDHVELSWWVNGKEVHSGVCTDPQPLKEQPALNDSRYCLSSRLRVSATFWQNPRNHFRCQVQFYGLSENDEWTQDRAKPVTQIVSAEAWGRADDVIKIHWQEKKSNTILGSQEGNTMKTNDTYMKFSWLTVPEKSLDKEHRCIVRHENNKNGVDQEIIFPPIKTDVITMDPKDNCSKDANDTLLLQLTNTSAYYMYLLLLLKSVVYFAIITCCLLRRTAFCCNGEKSRAKRSGSGATNFSLLKQAGDVEENPGPTSMDWIWRILFLVGAATGAHSFEQVQLQQPGAELVKPGASVKMSCKASGYAFSSYWINWMKQKPGQGLEWIGQIYPGDGDTNYNGKFKGRATLTADTSSSTAYMQLSSLTSEDSAVYFCARSITTVVGCAMDYWGQGTSVTVSSTRIQNPDPAVYQLRDSKSSDKSVCLFTDFDSQTNVSQSKDSDVYITDKCVLDMRSMDFKSNSAVAWSNKSDFACANAFNNSIIPEDTFFPSPESSDSTDHVKPKETENTKQPSKSCHKPKAIVHTEKVNMMSLTVLGLRMLFAKTVAVNFLLTAKLFFL

SEQ ID NO: 16441 - protein, 863 aa, synthetic construct
MALPVTALLLPLALLLHAARPEVQLVESGGGLVQPGGSLRLSCAASGFASDYYIIGWFRQAPGKEREGVSCISSRYANTNYADSVKGRFTISRDNAKNTVYLQMNSLKPEDTAVYYCAADTRRYTCPDIATMHRNFDSWGQGTLVTVSSGTGGGGSGGGGSGGGGSEFDIQMTQSPSSLSASVGDRVTITCKASDHINNWLAWYQQKPGQAPKLLIYGATTLETGVPSRFSGSGSGTDYTLTISSLQPEDFATYYCQQSWNTPWTFGQGTKLEIKRLEIQNPDPAVYQLRDSKSSDKSVCLFTDFDSQTNVSQSKDSDVYIIDKCVLDMRRQAPERQICSGVFQIRRRTRLPTTALSPRTHSSQAPRAAATSWWKRRDREHQAAQQELPQAQGHRAHRESEHDEPDRAGPADAVRQNRGRELPADRQAVLPLSRQEKRIWREADPEFRPAEAGWRRGIQPRPYYGLDLAHPFPCRRCYRRAFLRTSSASTAWRAGQTWRFCEDELQSQRLRLQQLLDQLDEAETRPGTRMDRPNLSRRRRHQLQRQVQGQSHTDRRYLQHSLHAAEQPDQRRRRVLLCPVHHNSRGLRYGLLGPGNKRDRVYAGPEERVPTGGRVRARGRDQPHPESHPRVPGYRLLPRPCGTVLVGQRQRGAQRRVYRPPATERTARPERQPVLPEQQTESVRHLLAEPPEPLQMPGAVLRPERERRVDPGQSQARDPDRVCRSLGQSRCDDPLAGKEVQHHPGQPGRQHHEDQRHLHEVQLADRAREVPGQRTQMHRAARKQQERRGPGNHLPTHQDRCDYNGPQGQLLQGRQRYPAAPADQHQRLLHVLVAAAEVRGVLRHHHMLPAAENRLLLQRREVL

SEQ ID NO: 16442 - protein, 863 aa, synthetic construct
MALPVTALLLPLALLLHAARPEVQLVESGGGLVQPGGSLRLSCEASGFASDDYIIGWFRQAPGKEREGVSCISSKYANTVYTDSVKGRFRLSRGTAKNTVYLQMSALKPEDTAVYYCAMDSRRVTCPEISTMHRNFDSWGQGTLVTVSSGTGGGGSGGGGSGGGGSEFDIQMTQSPSSLSASVGDRVTITCKASDHINNWLAWYQQKPGQAPKLLIYGATTLETGVPSRFSGSGSGTDYTLTISSLQPEDFATYYCQQSWNTPWTFGQGTKLEIKRLEIQNPDPAVYQLRDSKSSDKSVCLFTDFDSQTNVSQSKDSDVYIIDKCVLDMRRQAPERQICSGVFQIRRRTRLPTTALSPRTHSSQAPRAAATSWWKRRDREHQAAQQELPQAQGHRAHRESEHDEPDRAGPADAVRQNRGRELPADRQAVLPLSRQEKRIWREADPEFRPAEAGWRRGIQPRPYYGLDLAHPFPCRRCYRRAFLRTSSASTAWRAGQTWRFCEDELQSQRLRLQQLLDQLDEAETRPGTRMDRPNLSRRRRHQLQRQVQGQSHTDRRYLQHSLHAAEQPDQRRRRVLLCPVHHNSRGLRYGLLGPGNKRDRVYAGPEERVPTGGRVRARGRDQPHPESHPRVPGYRLLPRPCGTVLVGQRQRGAQRRVYRPPATERTARPERQPVLPEQQTESVRHLLAEPPEPLQMPGAVLRPERERRVDPGQSQARDPDRVCRSLGQSRCDDPLAGKEVQHHPGQPGRQHHEDQRHLHEVQLADRAREVPGQRTQMHRAARKQQERRGPGNHLPTHQDRCDYNGPQGQLLQGRQRYPAAPADQHQRLLHVLVAAAEVRGVLRHHHMLPAAENRLLLQRREVL

SEQ ID NO: 16443 - protein, 856 aa, synthetic construct
MALPVTALLLPLALLLHAARPACQVKLEESGGGLVQPGESLRLSCSASGSIFKVFRVFAMSWYRQGPGKQRELVASISSGETTTYAESVKGRFTISRDNAKNTAYLQMDSLKPEDTAVYYCNADHTFTGDFWGQGTQVTVSSGTGGGGSGGGGSGGGGSEFDIQMTQSPSSLSASVGDRVTITCKASDHINNWLAWYQQKPGQAPKLLIYGATTLETGVPSRFSGSGSGTDYTLTISSLQPEDFATYYCQQSWNTPWTFGQGTKLEIKRLEIQNPDPAVYQLRDSKSSDKSVCLFTDFDSQTNVSQSKDSDVYIIDKCVLDMRRQAPERQICSGVFQIRRRTRLPTTALSPRTHSSQAPRAAATSWWKRRDREHQAAQQELPQAQGHRAHRESEHDEPDRAGPADAVRQNRGRELPADRQAVLPLSRQEKRIWREADPEFRPAEAGWRRGIQPRPYYGLDLAHPFPCRRCYRRAFLRTSSASTAWRAGQTWRFCEDELQSQRLRLQQLLDQLDEAETRPGTRMDRPNLSRRRRHQLQRQVQGQSHTDRRYLQHSLHAAEQPDQRRRRVLLCPVHHNSRGLRYGLLGPGNKRDRVYAGPEERVPTGGRVRARGRDQPHPESHPRVPGYRLLPRPCGTVLVGQRQRGAQRRVYRPPATERTARPERQPVLPEQQTESVRHLLAEPPEPLQMPGAVLRPERERRVDPGQSQARDPDRVCRSLGQSRCDDPLAGKEVQHHPGQPGRQHHEDQRHLHEVQLADRAREVPGQRTQMHRAARKQQERRGPGNHLPTHQDRCDYNGPQGQLLQGRQRYPAAPADQHQRLLHVLVAAAEVRGVLRHHHMLPAAENRLLLQRREVL

SEQ ID NO: 16444 - protein, 863 aa, synthetic construct
MALPVTALLLPLALLLHAARPDIQMTQSPSSLSASVGDRVTITCKASDHINNWLAWYQQKPGQAPKLLIYGATTLETGVPSRFSGSGSGTDYTLTISSLQPEDFATYYCQQSWNTPWTFGQGTKLEIKRLEDLKNVFPPEVAVFEPSEAEISHTQKATLVCLATGFYPDHVELSWWVNGKEVHSGVCTDPQPLKEQPALNDSRYCLSSRLRVSATFWQNPRNHFRCQVQFYGLSENDEWTQDRAKPVTQIVSAEAWGRADDVIKIHWQEKKSNTILGSQEGNTMKTNDTYMKFSWLTVPEKSLDKEHRCIVRHENNKNGVDQEIIFPPIKTDVITMDPKDNCSKDANDTLLLQLTNTSAYYMYLLLLLKSVVYFAIITCCLLRRTAFCCNGEKSRAKRSGSGATNFSLLKQAGDVEENPGPTSATMDWIWRILFLVGAATGAHSGPEVQLVESGGGLVQAGGSLRLSCAASGRTFSMGWFRQAPGKEREFVAAITYSGGSPYYADSVKGRFTISRDNAKNTVYLQMNSLKPEDTAVYYCAANPTYGSDWNAENWGQGTQVTVSSGSGGGGSGGGGSGGGGSFEQVQLQQPGAELVKPGASVKMSCKASGYAFSSYWINWMKQKPGQGLEWIGQIYPGDGDTNYNGKFKGRATLTADTSSSTAYMQLSSLTSEDSAVYFCARSITTVVGCAMDYWGQGTSVTVSSTRIQNPDPAVYQLRDSKSSDKSVCLFTDFDSQTNVSQSKDSDVYITDKCVLDMRSMDFKSNSAVAWSNKSDFACANAFNNSIIPEDTFFPSPESSDSTDHVKPKETENTKQPSKSCHKPKAIVHTEKVNMMSLTVLGLRMLFAKTVAVNFLLTAKLFFL

SEQ ID NO: 16445 - protein, 864 aa, synthetic construct
MALPVTALLLPLALLLHAARPDIQMTQSPSSLSASVGDRVTITCKASDHINNWLAWYQQKPGQAPKLLIYGATTLETGVPSRFSGSGSGTDYTLTISSLQPEDFATYYCQQSWNTPWTFGQGTKLEIKRLEDLKNVFPPEVAVFEPSEAEISHTQKATLVCLATGFYPDHVELSWWVNGKEVHSGVCTDPQPLKEQPALNDSRYCLSSRLRVSATFWQNPRNHFRCQVQFYGLSENDEWTQDRAKPVTQIVSAEAWGRADDVIKIHWQEKKSNTILGSQEGNTMKTNDTYMKFSWLTVPEKSLDKEHRCIVRHENNKNGVDQEIIFPPIKTDVITMDPKDNCSKDANDTLLLQLTNTSAYYMYLLLLLKSVVYFAIITCCLLRRTAFCCNGEKSRAKRSGSGATNFSLLKQAGDVEENPGPTSATMDWIWRILFLVGAATGAHSGPEVQLVESGGGLVQPGGSLRLSCAASGSIFGFNDMAWYRQAPGKQRELVALISRVGVTSSADSVKGRFTISRVNAKDTVYLQMNSLKPEDTAVYYCYMDQRLDGSTLAYWGQGTQVTVSSGSGGGGSGGGGSGGGGSFEQVQLQQPGAELVKPGASVKMSCKASGYAFSSYWINWMKQKPGQGLEWIGQIYPGDGDTNYNGKFKGRATLTADTSSSTAYMQLSSLTSEDSAVYFCARSITTVVGCAMDYWGQGTSVTVSSTRIQNPDPAVYQLRDSKSSDKSVCLFTDFDSQTNVSQSKDSDVYITDKCVLDMRSMDFKSNSAVAWSNKSDFACANAFNNSIIPEDTFFPSPESSDSTDHVKPKETENTKQPSKSCHKPKAIVHTEKVNMMSLTVLGLRMLFAKTVAVNFLLTAKLFFL

SEQ ID NO: 16446 - protein, 860 aa, synthetic construct
MALPVTALLLPLALLLHAARPDIQMTQSPSSLSASVGDRVTITCKASDHINNWLAWYQQKPGQAPKLLIYGATTLETGVPSRFSGSGSGTDYTLTISSLQPEDFATYYCQQSWNTPWTFGQGTKLEIKRLEDLKNVFPPEVAVFEPSEAEISHTQKATLVCLATGFYPDHVELSWWVNGKEVHSGVCTDPQPLKEQPALNDSRYCLSSRLRVSATFWQNPRNHFRCQVQFYGLSENDEWTQDRAKPVTQIVSAEAWGRADDVIKIHWQEKKSNTILGSQEGNTMKTNDTYMKFSWLTVPEKSLDKEHRCIVRHENNKNGVDQEIIFPPIKTDVITMDPKDNCSKDANDTLLLQLTNTSAYYMYLLLLLKSVVYFAIITCCLLRRTAFCCNGEKSRAKRSGSGATNFSLLKQAGDVEENPGPTSATMDWIWRILFLVGAATGAHSGPEVQLVESGGGLVQAGGSLRLSCAASGSVFSGNVMGWYRQAPGKEREWVAAIASGGSIYYRDSVKGRFTISRDNAKNTVYLQMNSLKPEDTAVYYCNSHPPTLPYWGLGTQVTVSSGSGGGGSGGGGSGGGGSFEQVQLQQPGAELVKPGASVKMSCKASGYAFSSYWINWMKQKPGQGLEWIGQIYPGDGDTNYNGKFKGRATLTADTSSSTAYMQLSSLTSEDSAVYFCARSITTVVGCAMDYWGQGTSVTVSSTRIQNPDPAVYQLRDSKSSDKSVCLFTDFDSQTNVSQSKDSDVYITDKCVLDMRSMDFKSNSAVAWSNKSDFACANAFNNSIIPEDTFFPSPESSDSTDHVKPKETENTKQPSKSCHKPKAIVHTEKVNMMSLTVLGLRMLFAKTVAVNFLLTAKLFFL

SEQ ID NO: 16447 - protein, 858 aa, synthetic construct
MALPVTALLLPLALLLHAARPDIQMTQSPSSLSASVGDRVTITCKASDHINNWLAWYQQKPGQAPKLLIYGATTLETGVPSRFSGSGSGTDYTLTISSLQPEDFATYYCQQSWNTPWTFGQGTKLEIKRLEDLKNVFPPEVAVFEPSEAEISHTQKATLVCLATGFYPDHVELSWWVNGKEVHSGVCTDPQPLKEQPALNDSRYCLSSRLRVSATFWQNPRNHFRCQVQFYGLSENDEWTQDRAKPVTQIVSAEAWGRADDVIKIHWQEKKSNTILGSQEGNTMKTNDTYMKFSWLTVPEKSLDKEHRCIVRHENNKNGVDQEIIFPPIKTDVITMDPKDNCSKDANDTLLLQLTNTSAYYMYLLLLLKSVVYFAIITCCLLRRTAFCCNGEKSRAKRSGSGATNFSLLKQAGDVEENPGPTSATMDWIWRILFLVGAATGAHSGPEVQLLESGGGLVQPGGSLRLSCAASGFSFSSYALSWVRQAPGKGLEWVSSIGENDGTTDYADAVKGRFTISRDNSKNTLYLQMNSLRVEDTAVYYCVKDGIHWGQGTLVTVSSGSGGGGSGGGGSGGGGSFEQVQLQQPGAELVKPGASVKMSCKASGYAFSSYWINWMKQKPGQGLEWIGQIYPGDGDTNYNGKFKGRATLTADTSSSTAYMQLSSLTSEDSAVYFCARSITTVVGCAMDYWGQGTSVTVSSTRIQNPDPAVYQLRDSKSSDKSVCLFTDFDSQTNVSQSKDSDVYITDKCVLDMRSMDFKSNSAVAWSNKSDFACANAFNNSIIPEDTFFPSPESSDSTDHVKPKETENTKQPSKSCHKPKAIVHTEKVNMMSLTVLGLRMLFAKTVAVNFLLTAKLFFL

SEQ ID NO: 16448 - protein, 1227 aa, synthetic construct
MGPRLLFWALLCLLGTGPVEAGVTQSPTHLIKTRGQQATLRCSPISGHTSVYWYQQALGLGLQFLLWYDEGEERNRGNFPPRFSGRQFPNYSSELNVNALELEDSALYLCASSLGGPRGLAGLRGDEQFFGPGTRLTVLEGTGGGGSGGGEFDIQMTQSPSSLSASVGDRVTITCKASDHINNWLAWYQQKPGQAPKLLIYGATTLETGVPSRFSGSGSGTDYTLTISSLQPEDFATYYCQQSWNTPWTFGQGTKLEIKRLEDLKNVFPPEVAVFEPSEAEISHTQKATLVCLATGFYPDHVELSWWVNGKEVHSGVCTDPQPLKEQPALNDSRYCLSSRLRVSATFWQNPRNHFRCQVQFYGLSENDEWTQDRAKPVTQIVSAEAWGRADDVIKIHWQEKKSNTILGSQEGNTMKTNDTYMKFSWLTVPEKSLDKEHRCIVRHENNKNGVDQEIIFPPIKTDVITMDPKDNCSKDANDTLLLQLTNTSAYYMYLLLLLKSVVYFAIITCCLLRRTAFCCNGEKSRAKRSGSGATNFSLLKQAGDVEENPGPTSATMDWIWRILFLVGAATGAHSGPEVQLVESGGGLVQAGGSLRLSCAASGRTFSMGWFRQAPGKEREFVAAITYSGGSPYYADSVKGRFTISRDNAKNTVYLQMNSLKPEDTAVYYCAANPTYGSDWNAENWGQGTQVTVSSGSGGGGSGGGGSGGGGSFEQVQLQQPGAELVKPGASVKMSCKASGYAFSSYWINWMKQKPGQGLEWIGQIYPGDGDTNYNGKFKGRATLTADTSSSTAYMQLSSLTSEDSAVYFCARSITTVVGCAMDYWGQGTSVTVSSTRIQNPDPAVYQLRDSKSSDKSVCLFTDFDSQTNVSQSKDSDVYITDKCVLDMRSMDFKSNSAVAWSNKSDFACANAFNNSIIPEDTFFPSPESSDSTDHVKPKETENTKQPSKSCHKPKAIVHTEKVNMMSLTVLGLRMLFAKTVAVNFLLTAKLFFLRAKRSGSGVKQTLNFDLLKLAGDVESNPGPSRGHMTEYKPTVRLATRDDVPRAVRTLAAAFADYPATRHTVDPDRHIERVTELQELFLTRVGLDIGKVWVADDGAAVAVWTTPESVEAGAVFAEIGPRMAELSGSRLAAQQQMEGLLAPHRPKEPAWFLATVGVSPDHQGKGLGSAVVLPGVEAAERAGVPAFLETSAPRNLPFYERLGFTVTADVEVPEGPRTWCMTRKPGA

SEQ ID NO: 16449 - protein, 1226 aa, synthetic construct
MGPRLLFWALLCLLGTGPVEAGVTQSPTHLIKTRGQQATLRCSPISGHTSVYWYQQALGLGLQFLLWYDEGEERNRGNFPPRFSGRQFPNYSSELNVNALELEDSALYLCASSLGGDELGADGNEQFFGPGTRLTVLEGTGGGGSGGGSEFDIQMTQSPSSLSASVGDRVTITCKASDHINNWLAWYQQKPGQAPKLLIYGATTLETGVPSRFSGSGSGTDYTLTISSLQPEDFATYYCQQSWNTPWTFGQGTKLEIKRLEDLKNVFPPEVAVFEPSEAEISHTQKATLVCLATGFYPDHVELSWWVNGKEVHSGVCTDPQPLKEQPALNDSRYCLSSRLRVSATFWQNPRNHFRCQVQFYGLSENDEWTQDRAKPVTQIVSAEAWGRADDVIKIHWQEKKSNTILGSQEGNTMKTNDTYMKFSWLTVPEKSLDKEHRCIVRHENNKNGVDQEIIFPPIKTDVITMDPKDNCSKDANDTLLLQLTNTSAYYMYLLLLLKSVVYFAIITCCLLRRTAFCCNGEKSRAKRSGSGATNFSLLKQAGDVEENPGPTSATMDWIWRILFLVGAATGAHSGPEVQLVESGGGLVQAGGSLRLSCAASGRTFSMGWFRQAPGKEREFVAAITYSGGSPYYADSVKGRFTISRDNAKNTVYLQMNSLKPEDTAVYYCAANPTYGSDWNAENWGQGTQVTVSSGSGGGGSGGGGSGGGGSFEQVQLQQPGAELVKPGASVKMSCKASGYAFSSYWINWMKQKPGQGLEWIGQIYPGDGDTNYNGKFKGRATLTADTSSSTAYMQLSSLTSEDSAVYFCARSITTVVGCAMDYWGQGTSVTVSSTRIQNPDPAVYQLRDSKSSDKSVCLFTDFDSQTNVSQSKDSDVYITDKCVLDMRSMDFKSNSAVAWSNKSDFACANAFNNSIIPEDTFFPSPESSDSTDHVKPKETENTKQPSKSCHKPKAIVHTEKVNMMSLTVLGLRMLFAKTVAVNFLLTAKLFFLRAKRSGSGVKQTLNFDLLKLAGDVESNPGPSRGHMTEYKPTVRLATRDDVPRAVRTLAAAFADYPATRHTVDPDRHIERVTELQELFLTRVGLDIGKVWVADDGAAVAVWTTPESVEAGAVFAEIGPRMAELSGSRLAAQQQMEGLLAPHRPKEPAWFLATVGVSPDHQGKGLGSAVVLPGVEAAERAGVPAFLETSAPRNLPFYERLGFTVTADVEVPEGPRTWCMTRKPGA

SEQ ID NO: 16450 - protein, 1001 aa, synthetic construct
MALPVTALLLPLALLLHAARPACLFNQEVQIPLTESYCGPCPKNWICYKNNCYQFFDESKNWYESQASCMSQNASLLKVYSKEDQDLLKLVKSAHWMGLVHIPTNGSWQWEDGSILSPNLLTIIEMQKGDCALYASSFKGYIENCSTPNTYICMQRTVLEDLKNVFPPEVAVFEPSEAEISHTQKATLVCLATGFYPDHVELSWWVNGKEVHSGVCTDPQPLKEQPALNDSRYCLSSRLRVSATFWQNPRNHFRCQVQFYGLSENDEWTQDRAKPVTQIVSAEAWGRADDVIKIHWQEKKSNTILGSQEGNTMKTNDTYMKFSWLTVPEKSLDKEHRCIVRHENNKNGVDQEIIFPPIKTDVITMDPKDNCSKDANDTLLLQLTNTSAYYMYLLLLLKSVVYFAIITCCLLRRTAFCCNGEKSRAKRSGSGATNFSLLKQAGDVEENPGPTSMDWIWRILFLVGAATGAHSFEDLFNQEVQIPLTESYCGPCPKNWICYKNNCYQFFDESKNWYESQASCMSQNASLLKVYSKEDQDLLKLVKSAHWMGLVHIPTNGSWQWEDGSILSPNLLTIIEMQKGDCALYASSFKGFIENCSTPNTYICMQRTVTRIQNPDPAVYQLRDSKSSDKSVCLFTDFDSQTNVSQSKDSDVYITDKCVLDMRSMDFKSNSAVAWSNKSDFACANAFNNSIIPEDTFFPSPESSDSTDHVKPKETENTKQPSKSCHKPKAIVHTEKVNMMSLTVLGLRMLFAKTVAVNFLLTAKLFFLRAKRSGSGVKQTLNFDLLKLAGDVESNPGPSRGHMTEYKPTVRLATRDDVPRAVRTLAAAFADYPATRHTVDPDRHIERVTELQELFLTRVGLDIGKVWVADDGAAVAVWTTPESVEAGAVFAEIGPRMAELSGSRLAAQQQMEGLLAPHRPKEPAWFLATVGVSPDHQGKGLGSAVVLPGVEAAERAGVPAFLETSAPRNLPFYERLGFTVTADVEVPEGPRTWCMTRKPGA

SEQ ID NO: 16451 - protein, 1051 aa, synthetic construct
MALPVTALLLPLALLLHAARPDIQMTQSPSSLSASVGDRVTITCKASDHINNWLAWYQQKPGQAPKLLIYGATTLETGVPSRFSGSGSGTDYTLTISSLQPEDFATYYCQQSWNTPWTFGQGTKLEIKRLEDLKNVFPPEVAVFEPSEAEISHTQKATLVCLATGFYPDHVELSWWVNGKEVHSGVCTDPQPLKEQPALNDSRYCLSSRLRVSATFWQNPRNHFRCQVQFYGLSENDEWTQDRAKPVTQIVSAEAWGRADDVIKIHWQEKKSNTILGSQEGNTMKTNDTYMKFSWLTVPEKSLDKEHRCIVRHENNKNGVDQEIIFPPIKTDVITMDPKDNCSKDANDTLLLQLTNTSAYYMYLLLLLKSVVYFAIITCCLLRRTAFCCNGEKSRAKRSGSGATNFSLLKQAGDVEENPGPTSATMDWIWRILFLVGAATGAHSGPMGSWLEFYHRLNAIDSRLWALGGSEAELAAFEKEIAAFESELQAYKGKGNPEVESLRDHAAHIREWLQAYRHNGSGGGGSGGGGSGGGGSFEQVQLQQPGAELVKPGASVKMSCKASGYAFSSYWINWMKQKPGQGLEWIGQIYPGDGDTNYNGKFKGRATLTADTSSSTAYMQLSSLTSEDSAVYFCARSITTVVGCAMDYWGQGTSVTVSSTRIQNPDPAVYQLRDSKSSDKSVCLFTDFDSQTNVSQSKDSDVYITDKCVLDMRSMDFKSNSAVAWSNKSDFACANAFNNSIIPEDTFFPSPESSDSTDHVKPKETENTKQPSKSCHKPKAIVHTEKVNMMSLTVLGLRMLFAKTVAVNFLLTAKLFFLRAKRSGSGVKQTLNFDLLKLAGDVESNPGPSRGHMTEYKPTVRLATRDDVPRAVRTLAAAFADYPATRHTVDPDRHIERVTELQELFLTRVGLDIGKVWVADDGAAVAVWTTPESVEAGAVFAEIGPRMAELSGSRLAAQQQMEGLLAPHRPKEPAWFLATVGVSPDHQGKGLGSAVVLPGVEAAERAGVPAFLETSAPRNLPFYERLGFTVTADVEVPEGPRTWCMTRKPGA

SEQ ID NO: 16452 - protein, 1051 aa, synthetic construct
MALPVTALLLPLALLLHAARPACMGSWFEFYDRLNAIDARLWALGGSEAELAAFEKEIAAFESELQAYKGKGNPEVENLRVHAAAIREWLQAYRHNGTGGGGSGGGGSGGGGSEFDIQMTQSPSSLSASVGDRVTITCKASDHINNWLAWYQQKPGQAPKLLIYGATTLETGVPSRFSGSGSGTDYTLTISSLQPEDFATYYCQQSWNTPWTFGQGTKLEIKRLEDLKNVFPPEVAVFEPSEAEISHTQKATLVCLATGFYPDHVELSWWVNGKEVHSGVCTDPQPLKEQPALNDSRYCLSSRLRVSATFWQNPRNHFRCQVQFYGLSENDEWTQDRAKPVTQIVSAEAWGRADDVIKIHWQEKKSNTILGSQEGNTMKTNDTYMKFSWLTVPEKSLDKEHRCIVRHENNKNGVDQEIIFPPIKTDVITMDPKDNCSKDANDTLLLQLTNTSAYYMYLLLLLKSVVYFAIITCCLLRRTAFCCNGEKSRAKRSGSGATNFSLLKQAGDVEENPGPTSMDWIWRILFLVGAATGAHSFEQVQLQQPGAELVKPGASVKMSCKASGYAFSSYWINWMKQKPGQGLEWIGQIYPGDGDTNYNGKFKGRATLTADTSSSTAYMQLSSLTSEDSAVYFCARSITTVVGCAMDYWGQGTSVTVSSTRIQNPDPAVYQLRDSKSSDKSVCLFTDFDSQTNVSQSKDSDVYITDKCVLDMRSMDFKSNSAVAWSNKSDFACANAFNNSIIPEDTFFPSPESSDSTDHVKPKETENTKQPSKSCHKPKAIVHTEKVNMMSLTVLGLRMLFAKTVAVNFLLTAKLFFLRAKRSGSGVKQTLNFDLLKLAGDVESNPGPSRGHMTEYKPTVRLATRDDVPRAVRTLAAAFADYPATRHTVDPDRHIERVTELQELFLTRVGLDIGKVWVADDGAAVAVWTTPESVEAGAVFAEIGPRMAELSGSRLAAQQQMEGLLAPHRPKEPAWFLATVGVSPDHQGKGLGSAVVLPGVEAAERAGVPAFLETSAPRNLPFYERLGFTVTADVEVPEGPRTWCMTRKPGA

SEQ ID NO: 16453 - protein, 1168 aa, synthetic construct
MALPVTALLLPLALLLHAARPACMDPDLEIRAAFLRQRNTALRTEVAELEQEVQRLENEVSQYETRYGPLGGGKGTGGGGSGGGGSGGGGSEFDIQMTQSPSSLSASVGDRVTITCKASDHINNWLAWYQQKPGQAPKLLIYGATTLETGVPSRFSGSGSGTDYTLTISSLQPEDFATYYCQQSWNTPWTFGQGTKLEIKRLEDLKNVFPPEVAVFEPSEAEISHTQKATLVCLATGFYPDHVELSWWVNGKEVHSGVCTDPQPLKEQPALNDSRYCLSSRLRVSATFWQNPRNHFRCQVQFYGLSENDEWTQDRAKPVTQIVSAEAWGRADDVIKIHWQEKKSNTILGSQEGNTMKTNDTYMKFSWLTVPEKSLDKEHRCIVRHENNKNGVDQEIIFPPIKTDVITMDPKDNCSKDANDTLLLQLTNTSAYYMYLLLLLKSVVYFAIITCCLLRRTAFCCNGEKSRAKRSGSGATNFSLLKQAGDVEENPGPTSATMDWIWRILFLVGAATGAHSGPEVQLVESGGGLVQAGGSLRLSCAASGRTFSMGWFRQAPGKEREFVAAITYSGGSPYYADSVKGRFTISRDNAKNTVYLQMNSLKPEDTAVYYCAANPTYGSDWNAENWGQGTQVTVSSGSGGGGSGGGGSGGGGSFEQVQLQQPGAELVKPGASVKMSCKASGYAFSSYWINWMKQKPGQGLEWIGQIYPGDGDTNYNGKFKGRATLTADTSSSTAYMQLSSLTSEDSAVYFCARSITTVVGCAMDYWGQGTSVTVSSTRIQNPDPAVYQLRDSKSSDKSVCLFTDFDSQTNVSQSKDSDVYITDKCVLDMRSMDFKSNSAVAWSNKSDFACANAFNNSIIPEDTFFPSPESSDSTDHVKPKETENTKQPSKSCHKPKAIVHTEKVNMMSLTVLGLRMLFAKTVAVNFLLTAKLFFLRAKRSGSGVKQTLNFDLLKLAGDVESNPGPSRGHMTEYKPTVRLATRDDVPRAVRTLAAAFADYPATRHTVDPDRHIERVTELQELFLTRVGLDIGKVWVADDGAAVAVWTTPESVEAGAVFAEIGPRMAELSGSRLAAQQQMEGLLAPHRPKEPAWFLATVGVSPDHQGKGLGSAVVLPGVEAAERAGVPAFLETSAPRNLPFYERLGFTVTADVEVPEGPRTWCMTRKPGA

SEQ ID NO: 16454 - protein, 1051 aa, synthetic construct
MALPVTALLLPLALLLHAARPDIQMTQSPSSLSASVGDRVTITCKASDHINNWLAWYQQKPGQAPKLLIYGATTLETGVPSRFSGSGSGTDYTLTISSLQPEDFATYYCQQSWNTPWTFGQGTKLEIKRLEDLKNVFPPEVAVFEPSEAEISHTQKATLVCLATGFYPDHVELSWWVNGKEVHSGVCTDPQPLKEQPALNDSRYCLSSRLRVSATFWQNPRNHFRCQVQFYGLSENDEWTQDRAKPVTQIVSAEAWGRADDVIKIHWQEKKSNTILGSQEGNTMKTNDTYMKFSWLTVPEKSLDKEHRCIVRHENNKNGVDQEIIFPPIKTDVITMDPKDNCSKDANDTLLLQLTNTSAYYMYLLLLLKSVVYFAIITCCLLRRTAFCCNGEKSRAKRSGSGATNFSLLKQAGDVEENPGPTSATMDWIWRILFLVGAATGAHSGPMGSWSEFYDRLHAIHHRLYALGGSEAELAAFEKEIAAFESELQAYKGKGNPEVEALRDTAAFIRTRLQAYRHNGSGGGGSGGGGSGGGGSFEQVQLQQPGAELVKPGASVKMSCKASGYAFSSYWINWMKQKPGQGLEWIGQIYPGDGDTNYNGKFKGRATLTADTSSSTAYMQLSSLTSEDSAVYFCARSITTVVGCAMDYWGQGTSVTVSSTRIQNPDPAVYQLRDSKSSDKSVCLFTDFDSQTNVSQSKDSDVYITDKCVLDMRSMDFKSNSAVAWSNKSDFACANAFNNSIIPEDTFFPSPESSDSTDHVKPKETENTKQPSKSCHKPKAIVHTEKVNMMSLTVLGLRMLFAKTVAVNFLLTAKLFFLRAKRSGSGVKQTLNFDLLKLAGDVESNPGPSRGHMTEYKPTVRLATRDDVPRAVRTLAAAFADYPATRHTVDPDRHIERVTELQELFLTRVGLDIGKVWVADDGAAVAVWTTPESVEAGAVFAEIGPRMAELSGSRLAAQQQMEGLLAPHRPKEPAWFLATVGVSPDHQGKGLGSAVVLPGVEAAERAGVPAFLETSAPRNLPFYERLGFTVTADVEVPEGPRTWCMTRKPGA

SEQ ID NO: 16455 - protein, 1261 aa, synthetic construct
MALPVTALLLPLALLLHAARPDIQMTQSPSSLSASVGDRVTITCKASDHINNWLAWYQQKPGQAPKLLIYGATTLETGVPSRFSGSGSGTDYTLTISSLQPEDFATYYCQQSWNTPWTFGQGTKLEIKRLEDLKNVFPPEVAVFEPSEAEISHTQKATLVCLATGFYPDHVELSWWVNGKEVHSGVCTDPQPLKEQPALNDSRYCLSSRLRVSATFWQNPRNHFRCQVQFYGLSENDEWTQDRAKPVTQIVSAEAWGRADDVIKIHWQEKKSNTILGSQEGNTMKTNDTYMKFSWLTVPEKSLDKEHRCIVRHENNKNGVDQEIIFPPIKTDVITMDPKDNCSKDANDTLLLQLTNTSAYYMYLLLLLKSVVYFAIITCCLLRRTAFCCNGEKSRAKRSGSGATNFSLLKQAGDVEENPGPTSTMDWIWRILFLVGAATGAHSLFNQEVQIPLTESYCGPCPKNWICYKNNCYQFFDESKNWYESQASCMSQNASLLKVYSKEDQDLLKLVKSAHWMGLVHIPTNGSWQWEDGSILSPNLLTIIEMQKGDCALYASSFKGYIENCSTPNTYICMQRTVSGGGGSGGGGSGGGGDLFNQEVQIPLTESYCGPCPKNWICYKNNCYQFFDESKNWYESQASCMSQNASLLKVYSKEDQDLLKLVKSAHWMGLVHIPTNGSWQWEDGSILSPNLLTIIEMQKGDCALYASSFKGYIENCSTPNTYICMQRTVGSGGGGSGGGGSGGGGSFEQVQLQQPGAELVKPGASVKMSCKASGYAFSSYWINWMKQKPGQGLEWIGQIYPGDGDTNYNGKFKGRATLTADTSSSTAYMQLSSLTSEDSAVYFCARSITTVVGCAMDYWGQGTSVTVSSTRIQNPDPAVYQLRDSKSSDKSVCLFTDFDSQTNVSQSKDSDVYITDKCVLDMRSMDFKSNSAVAWSNKSDFACANAFNNSIIPEDTFFPSPESSDSTDHVKPKETENTKQPSKSCHKPKAIVHTEKVNMMSLTVLGLRMLFAKTVAVNFLLTAKLFFLRAKRSGSGVKQTLNFDLLKLAGDVESNPGPSRGHMTEYKPTVRLATRDDVPRAVRTLAAAFADYPATRHTVDPDRHIERVTELQELFLTRVGLDIGKVWVADDGAAVAVWTTPESVEAGAVFAEIGPRMAELSGSRLAAQQQMEGLLAPHRPKEPAWFLATVGVSPDHQGKGLGSAVVLPGVEAAERAGVPAFLETSAPRNLPFYERLGFTVTADVEVPEGPRTWCMTRKPGA

SEQ ID NO: 16456 - protein, 19 aa, synthetic construct
GGGGGGGGGGGGGGGGGGG

SEQ ID NO: 16457 - protein, 622 aa, synthetic construct
MALPVTALLLPLALLLHAARPDIQMTQSPSSLSASVGDRVTITCKASDHINNWLAWYQQKPGQAPKLLIYGATTLETGVPSRFSGSGSGTDYTLTISSLQPEDFATYYCQQSWNTPWTFGQGTKLEIKRLEDLKNVFPPEVAVFEPSEAEISHTQKATLVCLATGFYPDHVELSWWVNGKEVHSGVSTDPQPLKEQPALNDSRYCLSSRLRVSATFWQNPRNHFRCQVQFYGLSENDEWTQDRAKPVTQIVSAEAWGRADCDVKLVEKSFETDTNLNFQNLSVIGFRILLLKVAGFNLLMTLRLWSSRAKRSGSGATNFSLLKQAGDVEENPGPTSMDWIWRILFLVGAATGAHSFEQVQLQQPGAELVKPGASVKMSCKASGYAFSSYWINWMKQKPGQGLEWIGQIYPGDGDTNYNGKFKGRATLTADTSSSTAYMQLSSLTSEDSAVYFCARSITTVVGCAMDYWGQGTSVTVSSTRIQNPDPAVYQLRDSKSSDKSVCLFTDFDSQTNVSQSKDSDVYITDKTVLDMRSMDFKSNSAVAWSNKSDFACANAFNNSIIPEDTFFPSPESSCGFTSESYQQGVLSATILYEILLGKATLYAVLVSALVLMAMVKRKDSRG

SEQ ID NO: 16458 - protein, 619 aa, synthetic construct
MALPVTALLLPLALLLHAARPDIQMTQTTSSLSASLGDRVTISCRASQDISKYLNWYQQKPDGTVKLLIYHTSRLHSGVPSRFSGSGSGTDYSLTISNLEQEDIATYFCQQGNTLPYTFGGGTKLEITLEDLKNVFPPEVAVFEPSEAEISHTQKATLVCLATGFYPDHVELSWWVNGKEVHSGVSTDPQPLKEQPALNDSRYCLSSRLRVSATFWQNPRNHFRCQVQFYGLSENDEWTQDRAKPVTQIVSAEAWGRADCDVKLVEKSFETDTNLNFQNLSVIGFRILLLKVAGFNLLMTLRLWSSRAKRSGSGATNFSLLKQAGDVEENPGPTSMDWIWRILFLVGAATGAHSFEVKLQESGPGLVAPSQSLSVTCTVSGVSLPDYGVSWIRQPPRKGLEWLGVIWGSETTYYNSALKSRLTIIKDNSKSQVFLKMNSLQTDDTAIYYCAKHYYYGGSYAMDYWGQGTSVTVSSTRIQNPDPAVYQLRDSKSSDKSVCLFTDFDSQTNVSQSKDSDVYITDKTVLDMRSMDFKSNSAVAWSNKSDFACANAFNNSIIPEDTFFPSPESSCGFTSESYQQGVLSATILYEILLGKATLYAVLVSALVLMAMVKRKDSRG

SEQ ID NO: 16459 - protein, 620 aa, synthetic construct
MALPVTALLLPLALLLHAARPEIVMTQSPATLSLSPGERATLSCRASQDISKYLNWYQQKPGQAPRLLIYHTSRLHSGIPARFSGSGSGTDYTLTISSLQPEDFAVYFCQQGNTLPYTFGQGTKLEIKLEDLKNVFPPEVAVFEPSEAEISHTQKATLVCLATGFYPDHVELSWWVNGKEVHSGVSTDPQPLKEQPALNDSRYCLSSRLRVSATFWQNPRNHFRCQVQFYGLSENDEWTQDRAKPVTQIVSAEAWGRADCDVKLVEKSFETDTNLNFQNLSVIGFRILLLKVAGFNLLMTLRLWSSRAKRSGSGATNFSLLKQAGDVEENPGPTSMDWIWRILFLVGAATGAHSFEQVQLQESGPGLVKPSETLSLTCTVSGVSLPDYGVSWIRQPPGKGLEWIGVIWGSETTYYNSSLKSRVTISKDNSKNQVSLKLSSVTAADTAVYYCAKHYYYGGSYAMDYWGQGTLVTVSSTRIQNPDPAVYQLRDSKSSDKSVCLFTDFDSQTNVSQSKDSDVYITDKTVLDMRSMDFKSNSAVAWSNKSDFACANAFNNSIIPEDTFFPSPESSCGFTSESYQQGVLSATILYEILLGKATLYAVLVSALVLMAMVKRKDSRG

SEQ ID NO: 16460 - protein, 621 aa, synthetic construct
MALPVTALLLPLALLLHAARPDEIVLTQSPATLSLSPGERATLSCSASSSVSYMHWYQQKPGQAPRLLIYDTSKLASGIPARFSGSGSGTDFTLTISSLEPEDVAVYYCFQGSVYPFTFGQGTKLEIKRLEDLKNVFPPEVAVFEPSEAEISHTQKATLVCLATGFYPDHVELSWWVNGKEVHSGVSTDPQPLKEQPALNDSRYCLSSRLRVSATFWQNPRNHFRCQVQFYGLSENDEWTQDRAKPVTQIVSAEAWGRADCDVKLVEKSFETDTNLNFQNLSVIGFRILLLKVAGFNLLMTLRLWSSRAKRSGSGATNFSLLKQAGDVEENPGPTSMDWIWRILFLVGAATGAHSFEQVQLQESGPGLVKPSQTLSLTCTVSGGSISTSGMGVGWIRQHPGKGLEWIGHIWWDDDKRYNPALKSRVTISVDTSKNQFSLKLSSVTAADTAVYYCARMELWSYYFDYWGQGTLVTVSSTRIQNPDPAVYQLRDSKSSDKSVCLFTDFDSQTNVSQSKDSDVYITDKTVLDMRSMDFKSNSAVAWSNKSDFACANAFNNSIIPEDTFFPSPESSCGFTSESYQQGVLSATILYEILLGKATLYAVLVSALVLMAMVKRKDSRG

SEQ ID NO: 16461 - protein, 619 aa, synthetic construct
MALPVTALLLPLALLLHAARPDYIHVTQSPSSLSVSIGDRVTINCQTSQGVGSDLHWYQHKPGRAPKLLIHHASSVEDGVPSRFSGTGFHTSFNLTINDLQADDIGTYYCQVLQSFGRGSRLDTKLEDLKNVFPPEVAVFEPSEAEISHTQKATLVCLATGFYPDHVELSWWVNGKEVHSGVSTDPQPLKEQPALNDSRYCLSSRLRVSATFWQNPRNHFRCQVQFYGLSENDEWTQDRAKPVTQIVSAEAWGRADCDVKLVEKSFETDTNLNFQNLSVIGFRILLLKVAGFNLLMTLRLWSSRAKRSGSGATNFSLLKQAGDVEENPGPTSMDWIWRILFLVGAATGAHSFERAHLVQSGTAMKKPGASVRVSCQTSGYTFTAHILFWFRQAPGRGLEWVGWIKPQYGAVNFGGGFRDRVTLTRDVYREIAYMDIRGLKPDDTAVYYCARDRSYGDSSWALDAWGQGTTVVVSATRIQNPDPAVYQLRDSKSSDKSVCLFTDFDSQTNVSQSKDSDVYITDKTVLDMRSMDFKSNSAVAWSNKSDFACANAFNNSIIPEDTFFPSPESSCGFTSESYQQGVLSATILYEILLGKATLYAVLVSALVLMAMVKRKDSRG

SEQ ID NO: 16462 - protein, 629 aa, synthetic construct
MALPVTALLLPLALLLHAARPDVQMIQTPDSLAVSLGQRATISCRASESVDNYGISFMHWYQQKPGQSPKLLIYRASNLESGIPARFSGSGSRTDFTLTINPVETDDVATYYCQQNNKDPPTFGGGTKLEIKLEDLKNVFPPEVAVFEPSEAEISHTQKATLVCLATGFYPDHVELSWWVNGKEVHSGVSTDPQPLKEQPALNDSRYCLSSRLRVSATFWQNPRNHFRCQVQFYGLSENDEWTQDRAKPVTQIVSAEAWGRADCDVKLVEKSFETDTNLNFQNLSVIGFRILLLKVAGFNLLMTLRLWSSRAKRSGSGATNFSLLKQAGDVEENPGPTSMDWIWRILFLVGAATGAHSFEGGGGSQVQLQQSGAELVKPGASVKISCKASGYAFSSYWMNWVKQRPGKGLEWIGQIYPGDGDTTYNGKFKGKATLTADKSSSTVYMQLNSLTSEDSAVYFCVRYYYGSSGYFDYWGQGTTLTVSSTRIQNPDPAVYQLRDSKSSDKSVCLFTDFDSQTNVSQSKDSDVYITDKTVLDMRSMDFKSNSAVAWSNKSDFACANAFNNSIIPEDTFFPSPESSCGFTSESYQQGVLSATILYEILLGKATLYAVLVSALVLMAMVKRKDSRG

SEQ ID NO: 16463 - protein, 620 aa, synthetic construct
MALPVTALLLPLALLLHAARPDVQMIQTPSSLSASLGDRVTISCRASQDIGNYLNWYQQKPDGTVKLLIYYTSRLHSGVPSRFSGSGSGTEYSLTISNLEQEDIATYFCQQGSALPPTFGGGTKLEINLEDLKNVFPPEVAVFEPSEAEISHTQKATLVCLATGFYPDHVELSWWVNGKEVHSGVSTDPQPLKEQPALNDSRYCLSSRLRVSATFWQNPRNHFRCQVQFYGLSENDEWTQDRAKPVTQIVSAEAWGRADCDVKLVEKSFETDTNLNFQNLSVIGFRILLLKVAGFNLLMTLRLWSSRAKRSGSGATNFSLLKQAGDVEENPGPTSMDWIWRILFLVGAATGAHSFEALQLQQSGAELVRPGASVTLSCKASGYTFTDYEMHWVKQTPVHGLEWIGAIDPETGGTAYNQKFEGKAILTADKSSSTAYMELRSLTSEDSPVYYCARRRYYGSSSFDYWGQGTTLTVSSTRIQNPDPAVYQLRDSKSSDKSVCLFTDFDSQTNVSQSKDSDVYITDKTVLDMRSMDFKSNSAVAWSNKSDFACANAFNNSIIPEDTFFPSPESSCGFTSESYQQGVLSATILYEILLGKATLYAVLVSALVLMAMVKRKDSRG

SEQ ID NO: 16464 - protein, 622 aa, synthetic construct
MALPVTALLLPLALLLHAARPDIQMTQSPSSLSASVGDRVTITCKASDHINNWLAWYQQKPGQAPKLLIYGATTLETGVPSRFSGSGSGTDYTLTISSLQPEDFATYYCQQSWNTPWTFGQGTKLEIKRLEDLKNVFPPEVAVFEPSEAEISHTQKATLVCLATGFYPDHVELSWWVNGKEVHSGVSTDPQPLKEQPALNDSRYCLSSRLRVSATFWQNPRNHFRCQVQFYGLSENDEWTQDRAKPVTQIVSAEAWGRADCGFTSESYQQGVLSATNLSVIGFRILLLKVAGFNLLMTLRLWSSRAKRSGSGATNFSLLKQAGDVEENPGPTSMDWIWRILFLVGAATGAHSFEQVQLQQPGAELVKPGASVKMSCKASGYAFSSYWINWMKQKPGQGLEWIGQIYPGDGDTNYNGKFKGRATLTADTSSSTAYMQLSSLTSEDSAVYFCARSITTVVGCAMDYWGQGTSVTVSSTRIQNPDPAVYQLRDSKSSDKSVCLFTDFDSQTNVSQSKDSDVYITDKTVLDMRSMDFKSNSAVAWSNKSDFACANAFNNSIIPEDTFFPSPESSCDVKLVEKSFETDTNLNFQILYEILLGKATLYAVLVSALVLMAMVKRKDSRG

SEQ ID NO: 16465 - protein, 619 aa, synthetic construct
MALPVTALLLPLALLLHAARPDIQMTQTTSSLSASLGDRVTISCRASQDISKYLNWYQQKPDGTVKLLIYHTSRLHSGVPSRFSGSGSGTDYSLTISNLEQEDIATYFCQQGNTLPYTFGGGTKLEITLEDLKNVFPPEVAVFEPSEAEISHTQKATLVCLATGFYPDHVELSWWVNGKEVHSGVSTDPQPLKEQPALNDSRYCLSSRLRVSATFWQNPRNHFRCQVQFYGLSENDEWTQDRAKPVTQIVSAEAWGRADCGFTSESYQQGVLSATNLSVIGFRILLLKVAGFNLLMTLRLWSSRAKRSGSGATNFSLLKQAGDVEENPGPTSMDWIWRILFLVGAATGAHSFEVKLQESGPGLVAPSQSLSVTCTVSGVSLPDYGVSWIRQPPRKGLEWLGVIWGSETTYYNSALKSRLTIIKDNSKSQVFLKMNSLQTDDTAIYYCAKHYYYGGSYAMDYWGQGTSVTVSSTRIQNPDPAVYQLRDSKSSDKSVCLFTDFDSQTNVSQSKDSDVYITDKTVLDMRSMDFKSNSAVAWSNKSDFACANAFNNSIIPEDTFFPSPESSCDVKLVEKSFETDTNLNFQILYEILLGKATLYAVLVSALVLMAMVKRKDSRG

SEQ ID NO: 16466 - protein, 620 aa, synthetic construct
MALPVTALLLPLALLLHAARPEIVMTQSPATLSLSPGERATLSCRASQDISKYLNWYQQKPGQAPRLLIYHTSRLHSGIPARFSGSGSGTDYTLTISSLQPEDFAVYFCQQGNTLPYTFGQGTKLEIKLEDLKNVFPPEVAVFEPSEAEISHTQKATLVCLATGFYPDHVELSWWVNGKEVHSGVSTDPQPLKEQPALNDSRYCLSSRLRVSATFWQNPRNHFRCQVQFYGLSENDEWTQDRAKPVTQIVSAEAWGRADCGFTSESYQQGVLSATNLSVIGFRILLLKVAGFNLLMTLRLWSSRAKRSGSGATNFSLLKQAGDVEENPGPTSMDWIWRILFLVGAATGAHSFEQVQLQESGPGLVKPSETLSLTCTVSGVSLPDYGVSWIRQPPGKGLEWIGVIWGSETTYYNSSLKSRVTISKDNSKNQVSLKLSSVTAADTAVYYCAKHYYYGGSYAMDYWGQGTLVTVSSTRIQNPDPAVYQLRDSKSSDKSVCLFTDFDSQTNVSQSKDSDVYITDKTVLDMRSMDFKSNSAVAWSNKSDFACANAFNNSIIPEDTFFPSPESSCDVKLVEKSFETDTNLNFQILYEILLGKATLYAVLVSALVLMAMVKRKDSRG

SEQ ID NO: 16467 - protein, 621 aa, synthetic construct
MALPVTALLLPLALLLHAARPDEIVLTQSPATLSLSPGERATLSCSASSSVSYMHWYQQKPGQAPRLLIYDTSKLASGIPARFSGSGSGTDFTLTISSLEPEDVAVYYCFQGSVYPFTFGQGTKLEIKRLEDLKNVFPPEVAVFEPSEAEISHTQKATLVCLATGFYPDHVELSWWVNGKEVHSGVSTDPQPLKEQPALNDSRYCLSSRLRVSATFWQNPRNHFRCQVQFYGLSENDEWTQDRAKPVTQIVSAEAWGRADCGFTSESYQQGVLSATNLSVIGFRILLLKVAGFNLLMTLRLWSSRAKRSGSGATNFSLLKQAGDVEENPGPTSMDWIWRILFLVGAATGAHSFEQVQLQESGPGLVKPSQTLSLTCTVSGGSISTSGMGVGWIRQHPGKGLEWIGHIWWDDDKRYNPALKSRVTISVDTSKNQFSLKLSSVTAADTAVYYCARMELWSYYFDYWGQGTLVTVSSTRIQNPDPAVYQLRDSKSSDKSVCLFTDFDSQTNVSQSKDSDVYITDKTVLDMRSMDFKSNSAVAWSNKSDFACANAFNNSIIPEDTFFPSPESSCDVKLVEKSFETDTNLNFQILYEILLGKATLYAVLVSALVLMAMVKRKDSRG

SEQ ID NO: 16468 - protein, 619 aa, synthetic construct
MALPVTALLLPLALLLHAARPDYIHVTQSPSSLSVSIGDRVTINCQTSQGVGSDLHWYQHKPGRAPKLLIHHASSVEDGVPSRFSGTGFHTSFNLTINDLQADDIGTYYCQVLQSFGRGSRLDTKLEDLKNVFPPEVAVFEPSEAEISHTQKATLVCLATGFYPDHVELSWWVNGKEVHSGVSTDPQPLKEQPALNDSRYCLSSRLRVSATFWQNPRNHFRCQVQFYGLSENDEWTQDRAKPVTQIVSAEAWGRADCGFTSESYQQGVLSATNLSVIGFRILLLKVAGFNLLMTLRLWSSRAKRSGSGATNFSLLKQAGDVEENPGPTSMDWIWRILFLVGAATGAHSFERAHLVQSGTAMKKPGASVRVSCQTSGYTFTAHILFWFRQAPGRGLEWVGWIKPQYGAVNFGGGFRDRVTLTRDVYREIAYMDIRGLKPDDTAVYYCARDRSYGDSSWALDAWGQGTTVVVSATRIQNPDPAVYQLRDSKSSDKSVCLFTDFDSQTNVSQSKDSDVYITDKTVLDMRSMDFKSNSAVAWSNKSDFACANAFNNSIIPEDTFFPSPESSCDVKLVEKSFETDTNLNFQILYEILLGKATLYAVLVSALVLMAMVKRKDSRG

SEQ ID NO: 16469 - protein, 629 aa, synthetic construct
MALPVTALLLPLALLLHAARPDVQMIQTPDSLAVSLGQRATISCRASESVDNYGISFMHWYQQKPGQSPKLLIYRASNLESGIPARFSGSGSRTDFTLTINPVETDDVATYYCQQNNKDPPTFGGGTKLEIKLEDLKNVFPPEVAVFEPSEAEISHTQKATLVCLATGFYPDHVELSWWVNGKEVHSGVSTDPQPLKEQPALNDSRYCLSSRLRVSATFWQNPRNHFRCQVQFYGLSENDEWTQDRAKPVTQIVSAEAWGRADCGFTSESYQQGVLSATNLSVIGFRILLLKVAGFNLLMTLRLWSSRAKRSGSGATNFSLLKQAGDVEENPGPTSMDWIWRILFLVGAATGAHSFEGGGGSQVQLQQSGAELVKPGASVKISCKASGYAFSSYWMNWVKQRPGKGLEWIGQIYPGDGDTTYNGKFKGKATLTADKSSSTVYMQLNSLTSEDSAVYFCVRYYYGSSGYFDYWGQGTTLTVSSTRIQNPDPAVYQLRDSKSSDKSVCLFTDFDSQTNVSQSKDSDVYITDKTVLDMRSMDFKSNSAVAWSNKSDFACANAFNNSIIPEDTFFPSPESSCDVKLVEKSFETDTNLNFQILYEILLGKATLYAVLVSALVLMAMVKRKDSRG

SEQ ID NO: 16470 - protein, 620 aa, synthetic construct
MALPVTALLLPLALLLHAARPDVQMIQTPSSLSASLGDRVTISCRASQDIGNYLNWYQQKPDGTVKLLIYYTSRLHSGVPSRFSGSGSGTEYSLTISNLEQEDIATYFCQQGSALPPTFGGGTKLEINLEDLKNVFPPEVAVFEPSEAEISHTQKATLVCLATGFYPDHVELSWWVNGKEVHSGVSTDPQPLKEQPALNDSRYCLSSRLRVSATFWQNPRNHFRCQVQFYGLSENDEWTQDRAKPVTQIVSAEAWGRADCGFTSESYQQGVLSATNLSVIGFRILLLKVAGFNLLMTLRLWSSRAKRSGSGATNFSLLKQAGDVEENPGPTSMDWIWRILFLVGAATGAHSFEALQLQQSGAELVRPGASVTLSCKASGYTFTDYEMHWVKQTPVHGLEWIGAIDPETGGTAYNQKFEGKAILTADKSSSTAYMELRSLTSEDSPVYYCARRRYYGSSSFDYWGQGTTLTVSSTRIQNPDPAVYQLRDSKSSDKSVCLFTDFDSQTNVSQSKDSDVYITDKTVLDMRSMDFKSNSAVAWSNKSDFACANAFNNSIIPEDTFFPSPESSCDVKLVEKSFETDTNLNFQILYEILLGKATLYAVLVSALVLMAMVKRKDSRG

SEQ ID NO: 16471 - protein, 726 aa, synthetic construct
MALPVTALLLPLALLLHAARPDIQMTQSPSSLSASVGDRVTITCKASDHINNWLAWYQQKPGQAPKLLIYGATTLETGVPSRFSGSGSGTDYTLTISSLQPEDFATYYCQQSWNTPWTFGQGTKLEIKRLEDLKNVFPPEVAVFEPSEAEISHTQKATLVCLATGFYPDHVELSWWVNGKEVHSGVSTDPQPLKEQPALNDSRYCLSSRLRVSATFWQNPRNHFRCQVQFYGLSENDEWTQDRAKPVTQIVSAEAWGRADDVIKIHWQEKKSNTILGSQEGNTMKTNDTYMKFSWLTVPEKSLDKEHRCIVRHENNKNGVDQEIIFPPIKTDVITMDPKDNCSKDANDTLLLQLTNTSAYYMYLLLLLKSVVYFAIITCCLLMAMVKRKDSRGRAKRSGSGATNFSLLKQAGDVEENPGPTSMDWIWRILFLVGAATGAHSFEQVQLQQPGAELVKPGASVKMSCKASGYAFSSYWINWMKQKPGQGLEWIGQIYPGDGDTNYNGKFKGRATLTADTSSSTAYMQLSSLTSEDSAVYFCARSITTVVGCAMDYWGQGTSVTVSSTRIQNPDPAVYQLRDSKSSDKSVCLFTDFDSQTNVSQSKDSDVYITDKTVLDMRSMDFKSNSAVAWSNKSDFACANAFNNSIIPEDTFFPSPESSDSTDHVKPKETENTKQPSKSCHKPKAIVHTEKVNMMSLTVLGLRMLFAKTVAVNFLLTAKLFFLLTA

SEQ ID NO: 16472 - protein, 723 aa, synthetic construct
MALPVTALLLPLALLLHAARPDIQMTQTTSSLSASLGDRVTISCRASQDISKYLNWYQQKPDGTVKLLIYHTSRLHSGVPSRFSGSGSGTDYSLTISNLEQEDIATYFCQQGNTLPYTFGGGTKLEITLEDLKNVFPPEVAVFEPSEAEISHTQKATLVCLATGFYPDHVELSWWVNGKEVHSGVSTDPQPLKEQPALNDSRYCLSSRLRVSATFWQNPRNHFRCQVQFYGLSENDEWTQDRAKPVTQIVSAEAWGRADDVIKIHWQEKKSNTILGSQEGNTMKTNDTYMKFSWLTVPEKSLDKEHRCIVRHENNKNGVDQEIIFPPIKTDVITMDPKDNCSKDANDTLLLQLTNTSAYYMYLLLLLKSVVYFAIITCCLLMAMVKRKDSRGRAKRSGSGATNFSLLKQAGDVEENPGPTSMDWIWRILFLVGAATGAHSFEVKLQESGPGLVAPSQSLSVTCTVSGVSLPDYGVSWIRQPPRKGLEWLGVIWGSETTYYNSALKSRLTIIKDNSKSQVFLKMNSLQTDDTAIYYCAKHYYYGGSYAMDYWGQGTSVTVSSTRIQNPDPAVYQLRDSKSSDKSVCLFTDFDSQTNVSQSKDSDVYITDKTVLDMRSMDFKSNSAVAWSNKSDFACANAFNNSIIPEDTFFPSPESSDSTDHVKPKETENTKQPSKSCHKPKAIVHTEKVNMMSLTVLGLRMLFAKTVAVNFLLTAKLFFLLTA

SEQ ID NO: 16473 - protein, 724 aa, synthetic construct
MALPVTALLLPLALLLHAARPEIVMTQSPATLSLSPGERATLSCRASQDISKYLNWYQQKPGQAPRLLIYHTSRLHSGIPARFSGSGSGTDYTLTISSLQPEDFAVYFCQQGNTLPYTFGQGTKLEIKLEDLKNVFPPEVAVFEPSEAEISHTQKATLVCLATGFYPDHVELSWWVNGKEVHSGVSTDPQPLKEQPALNDSRYCLSSRLRVSATFWQNPRNHFRCQVQFYGLSENDEWTQDRAKPVTQIVSAEAWGRADDVIKIHWQEKKSNTILGSQEGNTMKTNDTYMKFSWLTVPEKSLDKEHRCIVRHENNKNGVDQEIIFPPIKTDVITMDPKDNCSKDANDTLLLQLTNTSAYYMYLLLLLKSVVYFAIITCCLLMAMVKRKDSRGRAKRSGSGATNFSLLKQAGDVEENPGPTSMDWIWRILFLVGAATGAHSFEQVQLQESGPGLVKPSETLSLTCTVSGVSLPDYGVSWIRQPPGKGLEWIGVIWGSETTYYNSSLKSRVTISKDNSKNQVSLKLSSVTAADTAVYYCAKHYYYGGSYAMDYWGQGTLVTVSSTRIQNPDPAVYQLRDSKSSDKSVCLFTDFDSQTNVSQSKDSDVYITDKTVLDMRSMDFKSNSAVAWSNKSDFACANAFNNSIIPEDTFFPSPESSDSTDHVKPKETENTKQPSKSCHKPKAIVHTEKVNMMSLTVLGLRMLFAKTVAVNFLLTAKLFFLLTA

SEQ ID NO: 16474 - protein, 725 aa, synthetic construct
MALPVTALLLPLALLLHAARPDEIVLTQSPATLSLSPGERATLSCSASSSVSYMHWYQQKPGQAPRLLIYDTSKLASGIPARFSGSGSGTDFTLTISSLEPEDVAVYYCFQGSVYPFTFGQGTKLEIKRLEDLKNVFPPEVAVFEPSEAEISHTQKATLVCLATGFYPDHVELSWWVNGKEVHSGVSTDPQPLKEQPALNDSRYCLSSRLRVSATFWQNPRNHFRCQVQFYGLSENDEWTQDRAKPVTQIVSAEAWGRADDVIKIHWQEKKSNTILGSQEGNTMKTNDTYMKFSWLTVPEKSLDKEHRCIVRHENNKNGVDQEIIFPPIKTDVITMDPKDNCSKDANDTLLLQLTNTSAYYMYLLLLLKSVVYFAIITCCLLMAMVKRKDSRGRAKRSGSGATNFSLLKQAGDVEENPGPTSMDWIWRILFLVGAATGAHSFEQVQLQESGPGLVKPSQTLSLTCTVSGGSISTSGMGVGWIRQHPGKGLEWIGHIWWDDDKRYNPALKSRVTISVDTSKNQFSLKLSSVTAADTAVYYCARMELWSYYFDYWGQGTLVTVSSTRIQNPDPAVYQLRDSKSSDKSVCLFTDFDSQTNVSQSKDSDVYITDKTVLDMRSMDFKSNSAVAWSNKSDFACANAFNNSIIPEDTFFPSPESSDSTDHVKPKETENTKQPSKSCHKPKAIVHTEKVNMMSLTVLGLRMLFAKTVAVNFLLTAKLFFLLTA

SEQ ID NO: 16475 - protein, 723 aa, synthetic construct
MALPVTALLLPLALLLHAARPDYIHVTQSPSSLSVSIGDRVTINCQTSQGVGSDLHWYQHKPGRAPKLLIHHASSVEDGVPSRFSGTGFHTSFNLTINDLQADDIGTYYCQVLQSFGRGSRLDTKLEDLKNVFPPEVAVFEPSEAEISHTQKATLVCLATGFYPDHVELSWWVNGKEVHSGVSTDPQPLKEQPALNDSRYCLSSRLRVSATFWQNPRNHFRCQVQFYGLSENDEWTQDRAKPVTQIVSAEAWGRADDVIKIHWQEKKSNTILGSQEGNTMKTNDTYMKFSWLTVPEKSLDKEHRCIVRHENNKNGVDQEIIFPPIKTDVITMDPKDNCSKDANDTLLLQLTNTSAYYMYLLLLLKSVVYFAIITCCLLMAMVKRKDSRGRAKRSGSGATNFSLLKQAGDVEENPGPTSMDWIWRILFLVGAATGAHSFERAHLVQSGTAMKKPGASVRVSCQTSGYTFTAHILFWFRQAPGRGLEWVGWIKPQYGAVNFGGGFRDRVTLTRDVYREIAYMDIRGLKPDDTAVYYCARDRSYGDSSWALDAWGQGTTVVVSATRIQNPDPAVYQLRDSKSSDKSVCLFTDFDSQTNVSQSKDSDVYITDKTVLDMRSMDFKSNSAVAWSNKSDFACANAFNNSIIPEDTFFPSPESSDSTDHVKPKETENTKQPSKSCHKPKAIVHTEKVNMMSLTVLGLRMLFAKTVAVNFLLTAKLFFLLTA

SEQ ID NO: 16476 - protein, 733 aa, synthetic construct
MALPVTALLLPLALLLHAARPDVQMIQTPDSLAVSLGQRATISCRASESVDNYGISFMHWYQQKPGQSPKLLIYRASNLESGIPARFSGSGSRTDFTLTINPVETDDVATYYCQQNNKDPPTFGGGTKLEIKLEDLKNVFPPEVAVFEPSEAEISHTQKATLVCLATGFYPDHVELSWWVNGKEVHSGVSTDPQPLKEQPALNDSRYCLSSRLRVSATFWQNPRNHFRCQVQFYGLSENDEWTQDRAKPVTQIVSAEAWGRADDVIKIHWQEKKSNTILGSQEGNTMKTNDTYMKFSWLTVPEKSLDKEHRCIVRHENNKNGVDQEIIFPPIKTDVITMDPKDNCSKDANDTLLLQLTNTSAYYMYLLLLLKSVVYFAIITCCLLMAMVKRKDSRGRAKRSGSGATNFSLLKQAGDVEENPGPTSMDWIWRILFLVGAATGAHSFEGGGGSQVQLQQSGAELVKPGASVKISCKASGYAFSSYWMNWVKQRPGKGLEWIGQIYPGDGDTTYNGKFKGKATLTADKSSSTVYMQLNSLTSEDSAVYFCVRYYYGSSGYFDYWGQGTTLTVSSTRIQNPDPAVYQLRDSKSSDKSVCLFTDFDSQTNVSQSKDSDVYITDKTVLDMRSMDFKSNSAVAWSNKSDFACANAFNNSIIPEDTFFPSPESSDSTDHVKPKETENTKQPSKSCHKPKAIVHTEKVNMMSLTVLGLRMLFAKTVAVNFLLTAKLFFLLTA

SEQ ID NO: 16477 - protein, 724 aa, synthetic construct
MALPVTALLLPLALLLHAARPDVQMIQTPSSLSASLGDRVTISCRASQDIGNYLNWYQQKPDGTVKLLIYYTSRLHSGVPSRFSGSGSGTEYSLTISNLEQEDIATYFCQQGSALPPTFGGGTKLEINLEDLKNVFPPEVAVFEPSEAEISHTQKATLVCLATGFYPDHVELSWWVNGKEVHSGVSTDPQPLKEQPALNDSRYCLSSRLRVSATFWQNPRNHFRCQVQFYGLSENDEWTQDRAKPVTQIVSAEAWGRADDVIKIHWQEKKSNTILGSQEGNTMKTNDTYMKFSWLTVPEKSLDKEHRCIVRHENNKNGVDQEIIFPPIKTDVITMDPKDNCSKDANDTLLLQLTNTSAYYMYLLLLLKSVVYFAIITCCLLMAMVKRKDSRGRAKRSGSGATNFSLLKQAGDVEENPGPTSMDWIWRILFLVGAATGAHSFEALQLQQSGAELVRPGASVTLSCKASGYTFTDYEMHWVKQTPVHGLEWIGAIDPETGGTAYNQKFEGKAILTADKSSSTAYMELRSLTSEDSPVYYCARRRYYGSSSFDYWGQGTTLTVSSTRIQNPDPAVYQLRDSKSSDKSVCLFTDFDSQTNVSQSKDSDVYITDKTVLDMRSMDFKSNSAVAWSNKSDFACANAFNNSIIPEDTFFPSPESSDSTDHVKPKETENTKQPSKSCHKPKAIVHTEKVNMMSLTVLGLRMLFAKTVAVNFLLTAKLFFLLTA

SEQ ID NO: 16478 - protein, 724 aa, synthetic construct
MALPVTALLLPLALLLHAARPDIQMTQSPSSLSASVGDRVTITCKASDHINNWLAWYQQKPGQAPKLLIYGATTLETGVPSRFSGSGSGTDYTLTISSLQPEDFATYYCQQSWNTPWTFGQGTKLEIKRLEDLKNVFPPEVAVFEPSEAEISHTQKATLVCLATGFYPDHVELSWWVNGKEVHSGVSTDPQPLKEQPALNDSRYCLSSRLRVSATFWQNPRNHFRCQVQFYGLSENDEWTQDRAKPVTQIVSAEAWGRADDVIKIHWQEKKSNTILGSQEGNTMKTNDTYMKFSWLTVPEKSLDKEHRCIVRHENNKNGVDQEIIFPPIKTDVITMDPKDNCSKDANDTLLLQLTNTSAYYMYLLLLLKSVVYFAIITCCLLRRTAFCCNGEKSRAKRSGSGATNFSLLKQAGDVEENPGPTSMDWIWRILFLVGAATGAHSFEQVQLQQPGAELVKPGASVKMSCKASGYAFSSYWINWMKQKPGQGLEWIGQIYPGDGDTNYNGKFKGRATLTADTSSSTAYMQLSSLTSEDSAVYFCARSITTVVGCAMDYWGQGTSVTVSSTRIQNPDPAVYQLRDSKSSDKSVCLFTDFDSQTNVSQSKDSDVYITDKTVLDMRSMDFKSNSAVAWSNKSDFACANAFNNSIIPEDTFFPSPESSDSTDHVKPKETENTKQPSKSCHKPKAIVHTEKVNMMSLTVLGLRMLFAKTVAVNFLLTAKLFFL

SEQ ID NO: 16479 - protein, 721 aa, synthetic construct
MALPVTALLLPLALLLHAARPDIQMTQTTSSLSASLGDRVTISCRASQDISKYLNWYQQKPDGTVKLLIYHTSRLHSGVPSRFSGSGSGTDYSLTISNLEQEDIATYFCQQGNTLPYTFGGGTKLEITLEDLKNVFPPEVAVFEPSEAEISHTQKATLVCLATGFYPDHVELSWWVNGKEVHSGVSTDPQPLKEQPALNDSRYCLSSRLRVSATFWQNPRNHFRCQVQFYGLSENDEWTQDRAKPVTQIVSAEAWGRADDVIKIHWQEKKSNTILGSQEGNTMKTNDTYMKFSWLTVPEKSLDKEHRCIVRHENNKNGVDQEIIFPPIKTDVITMDPKDNCSKDANDTLLLQLTNTSAYYMYLLLLLKSVVYFAIITCCLLRRTAFCCNGEKSRAKRSGSGATNFSLLKQAGDVEENPGPTSMDWIWRILFLVGAATGAHSFEVKLQESGPGLVAPSQSLSVTCTVSGVSLPDYGVSWIRQPPRKGLEWLGVIWGSETTYYNSALKSRLTIIKDNSKSQVFLKMNSLQTDDTAIYYCAKHYYYGGSYAMDYWGQGTSVTVSSTRIQNPDPAVYQLRDSKSSDKSVCLFTDFDSQTNVSQSKDSDVYITDKTVLDMRSMDFKSNSAVAWSNKSDFACANAFNNSIIPEDTFFPSPESSDSTDHVKPKETENTKQPSKSCHKPKAIVHTEKVNMMSLTVLGLRMLFAKTVAVNFLLTAKLFFL

SEQ ID NO: 16480 - protein, 722 aa, synthetic construct
MALPVTALLLPLALLLHAARPEIVMTQSPATLSLSPGERATLSCRASQDISKYLNWYQQKPGQAPRLLIYHTSRLHSGIPARFSGSGSGTDYTLTISSLQPEDFAVYFCQQGNTLPYTFGQGTKLEIKLEDLKNVFPPEVAVFEPSEAEISHTQKATLVCLATGFYPDHVELSWWVNGKEVHSGVSTDPQPLKEQPALNDSRYCLSSRLRVSATFWQNPRNHFRCQVQFYGLSENDEWTQDRAKPVTQIVSAEAWGRADDVIKIHWQEKKSNTILGSQEGNTMKTNDTYMKFSWLTVPEKSLDKEHRCIVRHENNKNGVDQEIIFPPIKTDVITMDPKDNCSKDANDTLLLQLTNTSAYYMYLLLLLKSVVYFAIITCCLLRRTAFCCNGEKSRAKRSGSGATNFSLLKQAGDVEENPGPTSMDWIWRILFLVGAATGAHSFEQVQLQESGPGLVKPSETLSLTCTVSGVSLPDYGVSWIRQPPGKGLEWIGVIWGSETTYYNSSLKSRVTISKDNSKNQVSLKLSSVTAADTAVYYCAKHYYYGGSYAMDYWGQGTLVTVSSTRIQNPDPAVYQLRDSKSSDKSVCLFTDFDSQTNVSQSKDSDVYITDKTVLDMRSMDFKSNSAVAWSNKSDFACANAFNNSIIPEDTFFPSPESSDSTDHVKPKETENTKQPSKSCHKPKAIVHTEKVNMMSLTVLGLRMLFAKTVAVNFLLTAKLFFL

SEQ ID NO: 16481 - protein, 723 aa, synthetic construct
MALPVTALLLPLALLLHAARPDEIVLTQSPATLSLSPGERATLSCSASSSVSYMHWYQQKPGQAPRLLIYDTSKLASGIPARFSGSGSGTDFTLTISSLEPEDVAVYYCFQGSVYPFTFGQGTKLEIKRLEDLKNVFPPEVAVFEPSEAEISHTQKATLVCLATGFYPDHVELSWWVNGKEVHSGVSTDPQPLKEQPALNDSRYCLSSRLRVSATFWQNPRNHFRCQVQFYGLSENDEWTQDRAKPVTQIVSAEAWGRADDVIKIHWQEKKSNTILGSQEGNTMKTNDTYMKFSWLTVPEKSLDKEHRCIVRHENNKNGVDQEIIFPPIKTDVITMDPKDNCSKDANDTLLLQLTNTSAYYMYLLLLLKSVVYFAIITCCLLRRTAFCCNGEKSRAKRSGSGATNFSLLKQAGDVEENPGPTSMDWIWRILFLVGAATGAHSFEQVQLQESGPGLVKPSQTLSLTCTVSGGSISTSGMGVGWIRQHPGKGLEWIGHIWWDDDKRYNPALKSRVTISVDTSKNQFSLKLSSVTAADTAVYYCARMELWSYYFDYWGQGTLVTVSSTRIQNPDPAVYQLRDSKSSDKSVCLFTDFDSQTNVSQSKDSDVYITDKTVLDMRSMDFKSNSAVAWSNKSDFACANAFNNSIIPEDTFFPSPESSDSTDHVKPKETENTKQPSKSCHKPKAIVHTEKVNMMSLTVLGLRMLFAKTVAVNFLLTAKLFFL

SEQ ID NO: 16482 - protein, 721 aa, synthetic construct
MALPVTALLLPLALLLHAARPDYIHVTQSPSSLSVSIGDRVTINCQTSQGVGSDLHWYQHKPGRAPKLLIHHASSVEDGVPSRFSGTGFHTSFNLTINDLQADDIGTYYCQVLQSFGRGSRLDTKLEDLKNVFPPEVAVFEPSEAEISHTQKATLVCLATGFYPDHVELSWWVNGKEVHSGVSTDPQPLKEQPALNDSRYCLSSRLRVSATFWQNPRNHFRCQVQFYGLSENDEWTQDRAKPVTQIVSAEAWGRADDVIKIHWQEKKSNTILGSQEGNTMKTNDTYMKFSWLTVPEKSLDKEHRCIVRHENNKNGVDQEIIFPPIKTDVITMDPKDNCSKDANDTLLLQLTNTSAYYMYLLLLLKSVVYFAIITCCLLRRTAFCCNGEKSRAKRSGSGATNFSLLKQAGDVEENPGPTSMDWIWRILFLVGAATGAHSFERAHLVQSGTAMKKPGASVRVSCQTSGYTFTAHILFWFRQAPGRGLEWVGWIKPQYGAVNFGGGFRDRVTLTRDVYREIAYMDIRGLKPDDTAVYYCARDRSYGDSSWALDAWGQGTTVVVSATRIQNPDPAVYQLRDSKSSDKSVCLFTDFDSQTNVSQSKDSDVYITDKTVLDMRSMDFKSNSAVAWSNKSDFACANAFNNSIIPEDTFFPSPESSDSTDHVKPKETENTKQPSKSCHKPKAIVHTEKVNMMSLTVLGLRMLFAKTVAVNFLLTAKLFFL

SEQ ID NO: 16483 - protein, 731 aa, synthetic construct
MALPVTALLLPLALLLHAARPDVQMIQTPDSLAVSLGQRATISCRASESVDNYGISFMHWYQQKPGQSPKLLIYRASNLESGIPARFSGSGSRTDFTLTINPVETDDVATYYCQQNNKDPPTFGGGTKLEIKLEDLKNVFPPEVAVFEPSEAEISHTQKATLVCLATGFYPDHVELSWWVNGKEVHSGVSTDPQPLKEQPALNDSRYCLSSRLRVSATFWQNPRNHFRCQVQFYGLSENDEWTQDRAKPVTQIVSAEAWGRADDVIKIHWQEKKSNTILGSQEGNTMKTNDTYMKFSWLTVPEKSLDKEHRCIVRHENNKNGVDQEIIFPPIKTDVITMDPKDNCSKDANDTLLLQLTNTSAYYMYLLLLLKSVVYFAIITCCLLRRTAFCCNGEKSRAKRSGSGATNFSLLKQAGDVEENPGPTSMDWIWRILFLVGAATGAHSFEGGGGSQVQLQQSGAELVKPGASVKISCKASGYAFSSYWMNWVKQRPGKGLEWIGQIYPGDGDTTYNGKFKGKATLTADKSSSTVYMQLNSLTSEDSAVYFCVRYYYGSSGYFDYWGQGTTLTVSSTRIQNPDPAVYQLRDSKSSDKSVCLFTDFDSQTNVSQSKDSDVYITDKTVLDMRSMDFKSNSAVAWSNKSDFACANAFNNSIIPEDTFFPSPESSDSTDHVKPKETENTKQPSKSCHKPKAIVHTEKVNMMSLTVLGLRMLFAKTVAVNFLLTAKLFFL

SEQ ID NO: 16484 - protein, 722 aa, synthetic construct
MALPVTALLLPLALLLHAARPDVQMIQTPSSLSASLGDRVTISCRASQDIGNYLNWYQQKPDGTVKLLIYYTSRLHSGVPSRFSGSGSGTEYSLTISNLEQEDIATYFCQQGSALPPTFGGGTKLEINLEDLKNVFPPEVAVFEPSEAEISHTQKATLVCLATGFYPDHVELSWWVNGKEVHSGVSTDPQPLKEQPALNDSRYCLSSRLRVSATFWQNPRNHFRCQVQFYGLSENDEWTQDRAKPVTQIVSAEAWGRADDVIKIHWQEKKSNTILGSQEGNTMKTNDTYMKFSWLTVPEKSLDKEHRCIVRHENNKNGVDQEIIFPPIKTDVITMDPKDNCSKDANDTLLLQLTNTSAYYMYLLLLLKSVVYFAIITCCLLRRTAFCCNGEKSRAKRSGSGATNFSLLKQAGDVEENPGPTSMDWIWRILFLVGAATGAHSFEALQLQQSGAELVRPGASVTLSCKASGYTFTDYEMHWVKQTPVHGLEWIGAIDPETGGTAYNQKFEGKAILTADKSSSTAYMELRSLTSEDSPVYYCARRRYYGSSSFDYWGQGTTLTVSSTRIQNPDPAVYQLRDSKSSDKSVCLFTDFDSQTNVSQSKDSDVYITDKTVLDMRSMDFKSNSAVAWSNKSDFACANAFNNSIIPEDTFFPSPESSDSTDHVKPKETENTKQPSKSCHKPKAIVHTEKVNMMSLTVLGLRMLFAKTVAVNFLLTAKLFFL

SEQ ID NO: 16485 - protein, 8 aa, synthetic construct
GGGGGGGG

SEQ ID NO: 16486 - protein, 8 aa, synthetic construct
GGGGGGGG

SEQ ID NO: 16487 - protein, 852 aa, synthetic construct
MALPVTALLLPLALLLHAARPLEEDLKNVFPPEVAVFEPSEAEISHTQKATLVCLATGFYPDHVELSWWVNGKEVHSGVCTDPQPLKEQPALNDSRYCLSSRLRVSATFWQNPRNHFRCQVQFYGLSENDEWTQDRAKPVTQIVSAEAWGRADCDVKLVEKSFETDTNLNFQNLSVIGFRILLLKVAGFNLLMTLRLWSSRAKRSGSGATNFSLLKQAGDVEENPGPTSMALPVTALLLPLALLLHAARPDIQMTQTTSSLSASLGDRVTISCRASQDISKYLNWYQQKPDGTVKLLIYHTSRLHSGVPSRFSGSGSGTDYSLTISNLEQEDIATYFCQQGNTLPYTFGGGTKLEITGGGGSGGGGSGGGGSEVKLQESGPGLVAPSQSLSVTCTVSGVSLPDYGVSWIRQPPRKGLEWLGVIWGSETTYYNSALKSRLTIIKDNSKSQVFLKMNSLQTDDTAIYYCAKHYYYGGSYAMDYWGQGTSVTVSSTRIQNPDPAVYQLRDSKSSDKSVCLFTDFDSQTNVSQSKDSDVYITDKCVLDINKSDCGAWTSRATPPWPGPTSPISPAPTPSTTALSPRTHSSQAPRAAAALPARATSRTASASESCCKWPALTCPCGCGPAAPREADLASRPISTCSWLATWNPTQALLEAIPSTSPRCASPPATTSPGPYAPSPPRSPTTPPRATPSIRTATSSGSPSCKNSSSRASGSTSARCGSRTTAPRWRSGPRRRASKRGRCSPRSARAWPSAVPGWPRSNRWKASWRRTGPRSPRGSWPPSASRPTTRARVWAAPSCSPEWRRPSAPGCPPSWRPPRPATSPSTSGSASPSPPTSRCPKDRAPGAPASPVP

SEQ ID NO: 16488 - protein, 853 aa, synthetic construct
MALPVTALLLPLALLLHAARPLEEDLKNVFPPEVAVFEPSEAEISHTQKATLVCLATGFYPDHVELSWWVNGKEVHSGVCTDPQPLKEQPALNDSRYCLSSRLRVSATFWQNPRNHFRCQVQFYGLSENDEWTQDRAKPVTQIVSAEAWGRADCDVKLVEKSFETDTNLNFQNLSVIGFRILLLKVAGFNLLMTLRLWSSRAKRSGSGATNFSLLKQAGDVEENPGPTSTMALPVTALLLPLALLLHAARPEIVMTQSPATLSLSPGERATLSCRASQDISKYLNWYQQKPGQAPRLLIYHTSRLHSGIPARFSGSGSGTDYTLTISSLQPEDFAVYFCQQGNTLPYTFGQGTKLEIKGGGGSGGGGSGGGGSQVQLQESGPGLVKPSETLSLTCTVSGVSLPDYGVSWIRQPPGKGLEWIGVIWGSETTYYNSSLKSRVTISKDNSKNQVSLKLSSVTAADTAVYYCAKHYYYGGSYAMDYWGQGTLVTVSSTRIQNPDPAVYQLRDSKSSDKSVCLFTDFDSQTNVSQSKDSDVYITDKCVLDINKSDCGAWTSRATPPWPGPTSPISPAPTPSTTALSPRTHSSQAPRAAAALPARATSRTASASESCCKWPALTCPCGCGPAAPREADLASRPISTCSWLATWNPTQALLEAIPSTSPRCASPPATTSPGPYAPSPPRSPTTPPRATPSIRTATSSGSPSCKNSSSRASGSTSARCGSRTTAPRWRSGPRRRASKRGRCSPRSARAWPSAVPGWPRSNRWKASWRRTGPRSPRGSWPPSASRPTTRARVWAAPSCSPEWRRPSAPGCPPSWRPPRPATSPSTSGSASPSPPTSRCPKDRAPGAPASPVP

SEQ ID NO: 16489 - protein, 854 aa, synthetic construct
MALPVTALLLPLALLLHAARPLEEDLKNVFPPEVAVFEPSEAEISHTQKATLVCLATGFYPDHVELSWWVNGKEVHSGVCTDPQPLKEQPALNDSRYCLSSRLRVSATFWQNPRNHFRCQVQFYGLSENDEWTQDRAKPVTQIVSAEAWGRADCDVKLVEKSFETDTNLNFQNLSVIGFRILLLKVAGFNLLMTLRLWSSRAKRSGSGATNFSLLKQAGDVEENPGPTSTMALPVTALLLPLALLLHAARPDEIVLTQSPATLSLSPGERATLSCSASSSVSYMHWYQQKPGQAPRLLIYDTSKLASGIPARFSGSGSGTDFTLTISSLEPEDVAVYYCFQGSVYPFTFGQGTKLEIKRGGGGSGGGGSGGGGSQVQLQESGPGLVKPSQTLSLTCTVSGGSISTSGMGVGWIRQHPGKGLEWIGHIWWDDDKRYNPALKSRVTISVDTSKNQFSLKLSSVTAADTAVYYCARMELWSYYFDYWGQGTLVTVSSTRIQNPDPAVYQLRDSKSSDKSVCLFTDFDSQTNVSQSKDSDVYITDKCVLDINKSDCGAWTSRATPPWPGPTSPISPAPTPSTTALSPRTHSSQAPRAAAALPARATSRTASASESCCKWPALTCPCGCGPAAPREADLASRPISTCSWLATWNPTQALLEAIPSTSPRCASPPATTSPGPYAPSPPRSPTTPPRATPSIRTATSSGSPSCKNSSSRASGSTSARCGSRTTAPRWRSGPRRRASKRGRCSPRSARAWPSAVPGWPRSNRWKASWRRTGPRSPRGSWPPSASRPTTRARVWAAPSCSPEWRRPSAPGCPPSWRPPRPATSPSTSGSASPSPPTSRCPKDRAPGAPASPVP

SEQ ID NO: 16490 - protein, 850 aa, synthetic construct
MALPVTALLLPLALLLHAARPLEEDLKNVFPPEVAVFEPSEAEISHTQKATLVCLATGFYPDHVELSWWVNGKEVHSGVCTDPQPLKEQPALNDSRYCLSSRLRVSATFWQNPRNHFRCQVQFYGLSENDEWTQDRAKPVTQIVSAEAWGRADCDVKLVEKSFETDTNLNFQNLSVIGFRILLLKVAGFNLLMTLRLWSSRAKRSGSGATNFSLLKQAGDVEENPGPTSMALPVTALLLPLALLLHAARPDIQMTQSPSSLSASVGDRVTITCRASQDISNYLNWYQQKPGKAPKLLIYYTSRLHSGVPSRFSGSGSGTDFTLTISSLQPEDFATYYCQQGNTLPYTFGQGTKVEIKRGGGGSGGGGSGGGGSEVQLVESGGGLVQPGGSLRLSCAASGFTFSDYFMSWVRQAPGKGLEWVATISNGGTYTYYPDSVKGRFTISRDNSKNTLYLQMNSLRAEDTAVYYCARFDGYIFDYWGQGTLVTVSSTRIQNPDPAVYQLRDSKSSDKSVCLFTDFDSQTNVSQSKDSDVYITDKCVLDINKSDCGAWTSRATPPWPGPTSPISPAPTPSTTALSPRTHSSQAPRAAAALPARATSRTASASESCCKWPALTCPCGCGPAAPREADLASRPISTCSWLATWNPTQALLEAIPSTSPRCASPPATTSPGPYAPSPPRSPTTPPRATPSIRTATSSGSPSCKNSSSRASGSTSARCGSRTTAPRWRSGPRRRASKRGRCSPRSARAWPSAVPGWPRSNRWKASWRRTGPRSPRGSWPPSASRPTTRARVWAAPSCSPEWRRPSAPGCPPSWRPPRPATSPSTSGSASPSPPTSRCPKDRAPGAPASPVP

SEQ ID NO: 16491 - protein, 854 aa, synthetic construct
MALPVTALLLPLALLLHAARPLEEDLKNVFPPEVAVFEPSEAEISHTQKATLVCLATGFYPDHVELSWWVNGKEVHSGVCTDPQPLKEQPALNDSRYCLSSRLRVSATFWQNPRNHFRCQVQFYGLSENDEWTQDRAKPVTQIVSAEAWGRADCDVKLVEKSFETDTNLNFQNLSVIGFRILLLKVAGFNLLMTLRLWSSRAKRSGSGATNFSLLKQAGDVEENPGPTSMALPVTALLLPLALLLHAARPDIQMTQSPSSLSASVGDRVTITCKASDHINNWLAWYQQKPGQAPKLLIYGATTLETGVPSRFSGSGSGTDYTLTISSLQPEDFATYYCQQSWNTPWTFGQGTKLEIKRGGGGSGGGGSGGGGSQVQLQQPGAELVKPGASVKMSCKASGYAFSSYWINWMKQKPGQGLEWIGQIYPGDGDTNYNGKFKGRATLTADTSSSTAYMQLSSLTSEDSAVYFCARSITTVVGCAMDYWGQGTSVTVSSTRIQNPDPAVYQLRDSKSSDKSVCLFTDFDSQTNVSQSKDSDVYITDKCVLDINKSDCGAWTSRATPPWPGPTSPISPAPTPSTTALSPRTHSSQAPRAAAALPARATSRTASASESCCKWPALTCPCGCGPAAPREADLASRPISTCSWLATWNPTQALLEAIPSTSPRCASPPATTSPGPYAPSPPRSPTTPPRATPSIRTATSSGSPSCKNSSSRASGSTSARCGSRTTAPRWRSGPRRRASKRGRCSPRSARAWPSAVPGWPRSNRWKASWRRTGPRSPRGSWPPSASRPTTRARVWAAPSCSPEWRRPSAPGCPPSWRPPRPATSPSTSGSASPSPPTSRCPKDRAPGAPASPVP

SEQ ID NO: 16492 - protein, 856 aa, synthetic construct
MALPVTALLLPLALLLHAARPLEEDLKNVFPPEVAVFEPSEAEISHTQKATLVCLATGFYPDHVELSWWVNGKEVHSGVCTDPQPLKEQPALNDSRYCLSSRLRVSATFWQNPRNHFRCQVQFYGLSENDEWTQDRAKPVTQIVSAEAWGRADCDVKLVEKSFETDTNLNFQNLSVIGFRILLLKVAGFNLLMTLRLWSSRAKRSGSGATNFSLLKQAGDVEENPGPTSMALPVTALLLPLALLLHAARPQIVLSQSPAILSASPGEKVTMTCRASSSVSYMHWYQQKPGSSPKPWIYATSNLASGVPARFSGSGSGTSYSFTISRVEAEDAATYYCQQWTFNPPTFGGGTRLEIKRTVAAGGGGSGGGGSGGGGSQAYLQQSGAELVRPGASVKMSCKASGYTFTSYNMHWVKQTPRQGLEWIGGIYPGNGDTSYNQKFKGKATLTVGKSSSTAYMQLSSLTSEDSAVYFCARYDYNYAMDYWGQGTSVTVSSASTRIQNPDPAVYQLRDSKSSDKSVCLFTDFDSQTNVSQSKDSDVYITDKCVLDINKSDCGAWTSRATPPWPGPTSPISPAPTPSTTALSPRTHSSQAPRAAAALPARATSRTASASESCCKWPALTCPCGCGPAAPREADLASRPISTCSWLATWNPTQALLEAIPSTSPRCASPPATTSPGPYAPSPPRSPTTPPRATPSIRTATSSGSPSCKNSSSRASGSTSARCGSRTTAPRWRSGPRRRASKRGRCSPRSARAWPSAVPGWPRSNRWKASWRRTGPRSPRGSWPPSASRPTTRARVWAAPSCSPEWRRPSAPGCPPSWRPPRPATSPSTSGSASPSPPTSRCPKDRAPGAPASPVP

SEQ ID NO: 16493 - protein, 854 aa, synthetic construct
MALPVTALLLPLALLLHAARPLEEDLKNVFPPEVAVFEPSEAEISHTQKATLVCLATGFYPDHVELSWWVNGKEVHSGVCTDPQPLKEQPALNDSRYCLSSRLRVSATFWQNPRNHFRCQVQFYGLSENDEWTQDRAKPVTQIVSAEAWGRADCDVKLVEKSFETDTNLNFQNLSVIGFRILLLKVAGFNLLMTLRLWSSRAKRSGSGATNFSLLKQAGDVEENPGPTSMALPVTALLLPLALLLHAARPEIVLTQSPATLSLSPGERATLSCRASQSVSSYLAWYQQKPGQAPRLLIYDASNRATGIPARFSGSGSGTDFTLTISSLEPEDFAVYYCQQRSNWPITFGQGTRLEIKGGGGSGGGGSGGGGSEVQLVESGGGLVQPDRSLRLSCAASGFTFHDYAMHWVRQAPGKGLEWVSTISWNSGTIGYADSVKGRFTISRDNAKNSLYLQMNSLRAEDTALYYCAKDIQYGNYYYGMDVWGQGTTVTVSSTRIQNPDPAVYQLRDSKSSDKSVCLFTDFDSQTNVSQSKDSDVYITDKCVLDINKSDCGAWTSRATPPWPGPTSPISPAPTPSTTALSPRTHSSQAPRAAAALPARATSRTASASESCCKWPALTCPCGCGPAAPREADLASRPISTCSWLATWNPTQALLEAIPSTSPRCASPPATTSPGPYAPSPPRSPTTPPRATPSIRTATSSGSPSCKNSSSRASGSTSARCGSRTTAPRWRSGPRRRASKRGRCSPRSARAWPSAVPGWPRSNRWKASWRRTGPRSPRGSWPPSASRPTTRARVWAAPSCSPEWRRPSAPGCPPSWRPPRPATSPSTSGSASPSPPTSRCPKDRAPGAPASPVP

SEQ ID NO: 16494 - protein, 852 aa, synthetic construct
MALPVTALLLPLALLLHAARPLEEDLKNVFPPEVAVFEPSEAEISHTQKATLVCLATGFYPDHVELSWWVNGKEVHSGVCTDPQPLKEQPALNDSRYCLSSRLRVSATFWQNPRNHFRCQVQFYGLSENDEWTQDRAKPVTQIVSAEAWGRADCDVKLVEKSFETDTNLNFQNLSVIGFRILLLKVAGFNLLMTLRLWSSRAKRSGSGATNFSLLKQAGDVEENPGPTSMALPVTALLLPLALLLHAARPDIQMTQSPSSLSASVGDRVTITCRASQDVNTAVAWYQQKPGKAPKLLIYSASFLESGVPSRFSGSRSGTDFTLTISSLQPEDFATYYCQQHYTTPPTFGQTKVEIKRGGGGSGGGGSGGGGSEVQLVESGGGLVQPGGSLRLSCAASGFNIKDTYIHWVRQAPGKGLEWVARIYPTNGYTRYADSVKGRFTISADTSKNTAYLQMNSLRAEDTAVYYCSRWGGDGFYAMDVWGQGTLVTVSSTRIQNPDPAVYQLRDSKSSDKSVCLFTDFDSQTNVSQSKDSDVYITDKCVLDINKSDCGAWTSRATPPWPGPTSPISPAPTPSTTALSPRTHSSQAPRAAAALPARATSRTASASESCCKWPALTCPCGCGPAAPREADLASRPISTCSWLATWNPTQALLEAIPSTSPRCASPPATTSPGPYAPSPPRSPTTPPRATPSIRTATSSGSPSCKNSSSRASGSTSARCGSRTTAPRWRSGPRRRASKRGRCSPRSARAWPSAVPGWPRSNRWKASWRRTGPRSPRGSWPPSASRPTTRARVWAAPSCSPEWRRPSAPGCPPSWRPPRPATSPSTSGSASPSPPTSRCPKDRAPGAPASPVP

SEQ ID NO: 16495 - protein, 731 aa, synthetic construct
MALPVTALLLPLALLLHAARPLEEDLKNVFPPEVAVFEPSEAEISHTQKATLVCLATGFYPDHVELSWWVNGKEVHSGVCTDPQPLKEQPALNDSRYCLSSRLRVSATFWQNPRNHFRCQVQFYGLSENDEWTQDRAKPVTQIVSAEAWGRADCDVKLVEKSFETDTNLNFQNLSVIGFRILLLKVAGFNLLMTLRLWSSRAKRSGSGATNFSLLKQAGDVEENPGPTSMALPVTALLLPLALLLHAARPDEFEVQLVESGGGLVQAGGSLRLSCAASGITFSINTMGWYRQAPGKQRELVALISSIGDTYYADSVKGRFTISRDNAKNTVYLQMNSLKPEDTAVYYCKRFRTAAQGTDYWGQGTQVTVSSTRIQNPDPAVYQLRDSKSSDKSVCLFTDFDSQTNVSQSKDSDVYITDKCVLDINKSDCGAWTSRATPPWPGPTSPISPAPTPSTTALSPRTHSSQAPRAAAALPARATSRTASASESCCKWPALTCPCGCGPAAPREADLASRPISTCSWLATWNPTQALLEAIPSTSPRCASPPATTSPGPYAPSPPRSPTTPPRATPSIRTATSSGSPSCKNSSSRASGSTSARCGSRTTAPRWRSGPRRRASKRGRCSPRSARAWPSAVPGWPRSNRWKASWRRTGPRSPRGSWPPSASRPTTRARVWAAPSCSPEWRRPSAPGCPPSWRPPRPATSPSTSGSASPSPPTSRCPKDRAPGAPASPVP

SEQ ID NO: 16496 - protein, 731 aa, synthetic construct; identical to SEQ ID NO: 16495

SEQ ID NO: 16497 - protein, 996 aa, synthetic construct
MALPVTALLLPLALLLHAARPLEEDLKNVFPPEVAVFEPSEAEISHTQKATLVCLATGFYPDHVELSWWVNGKEVHSGVCTDPQPLKEQPALNDSRYCLSSRLRVSATFWQNPRNHFRCQVQFYGLSENDEWTQDRAKPVTQIVSAEAWGRADCDVKLVEKSFETDTNLNFQNLSVIGFRILLLKVAGFNLLMTLRLWSSRAKRSGSGATNFSLLKQAGDVEENPGPTSMALPVTALLLPLALLLHAARPQVQLVESGGGLVQAGDSVTLSCTASGRTFSSYALAWFRQRPGKEREFVAGLRWGGPTNYADSVKDRFTISGDSAKHTMYLQMNSLKPEDTAVYYCGYNPGGWAVPSQYEYDSWGQGTQVTVSSGTGGGGSGGGGSGGGGSEFDIQMTQSPSSLSASVGDRVTITCKASDHINNWLAWYQQKPGQAPKLLIYGATTLETGVPSRFSGSGSGTDYTLTISSLQPEDFATYYCQQSWNTPWTFGQGTKLEIKRGGGGSGGGGSGGGGSQVQLQQPGAELVKPGASVKMSCKASGYAFSSYWINWMKQKPGQGLEWIGQIYPGDGDTNYNGKFKGRATLTADTSSSTAYMQLSSLTSEDSAVYFCARSITTVVGCAMDYWGQGTSVTVSSTRIQNPDPAVYQLRDSKSSDKSVCLFTDFDSQTNVSQSKDSDVYITDKCVLDINKSDCGAWTSRATPPWPGPTSPISPAPTPSTTALSPRTHSSQAPRAAAALPARATSRTASASESCCKWPALTCPCGCGPAAPREADLASRPISTCSWLATWNPTQALLEAIPSTSPRCASPPATTSPGPYAPSPPRSPTTPPRATPSIRTATSSGSPSCKNSSSRASGSTSARCGSRTTAPRWRSGPRRRASKRGRCSPRSARAWPSAVPGWPRSNRWKASWRRTGPRSPRGSWPPSASRPTTRARVWAAPSCSPEWRRPSAPGCPPSWRPPRPATSPSTSGSASPSPPTSRCPKDRAPGAPASPVP

SEQ ID NO: 16498 - protein, 1125 aa, synthetic construct
MALPVTALLLPLALLLHAARPLEEDLKNVFPPEVAVFEPSEAEISHTQKATLVCLATGFYPDHVELSWWVNGKEVHSGVCTDPQPLKEQPALNDSRYCLSSRLRVSATFWQNPRNHFRCQVQFYGLSENDEWTQDRAKPVTQIVSAEAWGRADCDVKLVEKSFETDTNLNFQNLSVIGFRILLLKVAGFNLLMTLRLWSSRAKRSGSGATNFSLLKQAGDVEENPGPTSMALPVTALLLPLALLLHAARPEVQLLESGGGLVQPGGSLRLSCAASGFTFSSYAMSWVRQAPGKGLEWVSSISGSGDYIYYADSVKGRFTISRDISKNTLYLQMNSLRAEDTAVYYCAKEGTGANSSLADYRGQGTLVTVSSGGGSGGGSQVQLVESGGGLVQAGDSVTLSCTASGRTFSSYALAWFRQRPGKEREFVAGLRWGGPTNYADSVKDRFTISGDSAKHTMYLQMNSLKPEDTAVYYCGYNPGGWAVPSQYEYDSWGQGTQVTVSSGTGGGGSGGGGSGGGGSEFDIQMTQSPSSLSASVGDRVTITCKASDHINNWLAWYQQKPGQAPKLLIYGATTLETGVPSRFSGSGSGTDYTLTISSLQPEDFATYYCQQSWNTPWTFGQGTKLEIKRGGGGSGGGGSGGGGSQVQLQQPGAELVKPGASVKMSCKASGYAFSSYWINWMKQKPGQGLEWIGQIYPGDGDTNYNGKFKGRATLTADTSSSTAYMQLSSLTSEDSAVYFCARSITTVVGCAMDYWGQGTSVTVSSTRIQNPDPAVYQLRDSKSSDKSVCLFTDFDSQTNVSQSKDSDVYITDKCVLDINKSDCGAWTSRATPPWPGPTSPISPAPTPSTTALSPRTHSSQAPRAAAALPARATSRTASASESCCKWPALTCPCGCGPAAPREADLASRPISTCSWLATWNPTQALLEAIPSTSPRCASPPATTSPGPYAPSPPRSPTTPPRATPSIRTATSSGSPSCKNSSSRASGSTSARCGSRTTAPRWRSGPRRRASKRGRCSPRSARAWPSAVPGWPRSNRWKASWRRTGPRSPRGSWPPSASRPTTRARVWAAPSCSPEWRRPSAPGCPPSWRPPRPATSPSTSGSASPSPPTSRCPKDRAPGAPASPVP

SEQ ID NO: 16499 - protein, 1125 aa, synthetic construct; identical to SEQ ID NO: 16498

SEQ ID NO: 16500 - protein, 737 aa, synthetic construct
MALPVTALLLPLALLLHAARPLEEDLKNVFPPEVAVFEPSEAEISHTQKATLVCLATGFYPDHVELSWWVNGKEVHSGVCTDPQPLKEQPALNDSRYCLSSRLRVSATFWQNPRNHFRCQVQFYGLSENDEWTQDRAKPVTQIVSAEAWGRADCDVKLVEKSFETDTNLNFQNLSVIGFRILLLKVAGFNLLMTLRLWSSRAKRSGSGATNFSLLKQAGDVEENPGPTSMALPVTALLLPLALLLHAARPDEFGSDLGIKLLFAAAKGQDDEVRILLAAGADVNAKDFEGYTPLHVAAYDGHLEIVEVLLKAGADVNAKDSQGRTPLHEAAYSGHLEIVEVLLKAGADVNAQDDAGETPADLAAAWGHEDIAEVLQKTRIQNPDPAVYQLRDSKSSDKSVCLFTDFDSQTNVSQSKDSDVYITDKCVLDINKSDCGAWTSRATPPWPGPTSPISPAPTPSTTALSPRTHSSQAPRAAAALPARATSRTASASESCCKWPALTCPCGCGPAAPREADLASRPISTCSWLATWNPTQALLEAIPSTSPRCASPPATTSPGPYAPSPPRSPTTPPRATPSIRTATSSGSPSCKNSSSRASGSTSARCGSRTTAPRWRSGPRRRASKRGRCSPRSARAWPSAVPGWPRSNRWKASWRRTGPRSPRGSWPPSASRPTTRARVWAAPSCSPEWRRPSAPGCPPSWRPPRPATSPSTSGSASPSPPTSRCPKDRAPGAPASPVP

SEQ ID NO: 16501 - protein, 666 aa, synthetic construct
MALPVTALLLPLALLLHAARPLEEDLKNVFPPEVAVFEPSEAEISHTQKATLVCLATGFYPDHVELSWWVNGKEVHSGVCTDPQPLKEQPALNDSRYCLSSRLRVSATFWQNPRNHFRCQVQFYGLSENDEWTQDRAKPVTQIVSAEAWGRADCDVKLVEKSFETDTNLNFQNLSVIGFRILLLKVAGFNLLMTLRLWSSRAKRSGSGATNFSLLKQAGDVEENPGPTSMDWIWRILFLVGAATGAHSFEGSGFEYAKEMRNAYWEIALLPNLTNQQKRAPIRKLYDDPSQSSELLSEAKKLNDSQTRIQNPDPAVYQLRDSKSSDKSVCLFTDFDSQTNVSQSKDSDVYITDKCVLDINKSDCGAWTSRATPPWPGPTSPISPAPTPSTTALSPRTHSSQAPRAAAALPARATSRTASASESCCKWPALTCPCGCGPAAPREADLASRPISTCSWLATWNPTQALLEAIPSTSPRCASPPATTSPGPYAPSPPRSPTTPPRATPSIRTATSSGSPSCKNSSSRASGSTSARCGSRTTAPRWRSGPRRRASKRGRCSPRSARAWPSAVPGWPRSNRWKASWRRTGPRSPRGSWPPSASRPTTRARVWAAPSCSPEWRRPSAPGCPPSWRPPRPATSPSTSGSASPSPPTSRCPKDRAPGAPASPVP

SEQ ID NO: 16502 - protein, 888 aa, synthetic construct
MALPVTALLLPLALLLHAARPLEEDLKNVFPPEVAVFEPSEAEISHTQKATLVCLATGFYPDHVELSWWVNGKEVHSGVCTDPQPLKEQPALNDSRYCLSSRLRVSATFWQNPRNHFRCQVQFYGLSENDEWTQDRAKPVTQIVSAEAWGRADCDVKLVEKSFETDTNLNFQNLSVIGFRILLLKVAGFNLLMTLRLWSSRAKRSGSGATNFSLLKQAGDVEENPGPTSMALPVTALLLPLALLLHAARPDEFEVQLVESGGGLVQAGGSLRLSCAASGITFSINTMGWYRQAPGKQRELVALISSIGDTYYADSVKGRFTISRDNAKNTVYLQMNSLKPEDTAVYYCKRFRTAAQGTDYWGQGTQVTVSSLEGGGGSGGGGSGGGGSGSGGSGSGGSGSGGSGSGGSFEVQLVESGGGLVQPGGSLRLSCAASGSIFGFNDMAWYRQAPGKQRELVALISRVGVTSSADSVKGRFTISRVNAKDTVYLQMNSLKPEDTAVYYCYMDQRLDGSTLAYWGQGTQVTVSSTRIQNPDPAVYQLRDSKSSDKSVCLFTDFDSQTNVSQSKDSDVYITDKCVLDINKSDCGAWTSRATPPWPGPTSPISPAPTPSTTALSPRTHSSQAPRAAAALPARATSRTASASESCCKWPALTCPCGCGPAAPREADLASRPISTCSWLATWNPTQALLEAIPSTSPRCASPPATTSPGPYAPSPPRSPTTPPRATPSIRTATSSGSPSCKNSSSRASGSTSARCGSRTTAPRWRSGPRRRASKRGRCSPRSARAWPSAVPGWPRSNRWKASWRRTGPRSPRGSWPPSASRPTTRARVWAAPSCSPEWRRPSAPGCPPSWRPPRPATSPSTSGSASPSPPTSRCPKDRAPGAPASPVP

SEQ ID NO: 16503 - protein, 802 aa, synthetic construct
MALPVTALLLPLALLLHAARPLEEDLKNVFPPEVAVFEPSEAEISHTQKATLVCLATGFYPDHVELSWWVNGKEVHSGVCTDPQPLKEQPALNDSRYCLSSRLRVSATFWQNPRNHFRCQVQFYGLSENDEWTQDRAKPVTQIVSAEAWGRADCDVKLVEKSFETDTNLNFQNLSVIGFRILLLKVAGFNLLMTLRLWSSRAKRSGSGATNFSLLKQAGDVEENPGPTSMALPVTALLLPLALLLHAARPGMRTEDLPKAVVFLEPQWYRVLEKDSVTLKCQGAYSPEDNSTQWFHNESLISSQASSYFIDAATVDDSGEYRCQTNLSTLSDPVQLEVHIGWLLLQAPRWVFKEEDPIHLRCHSWKNTALHKVTYLQNGKGRKYFHHNSDFYIPKATLKDSGSYFCRGLVGSKNVSSETVNITITQGLAVSTISSFFPPGYQTRIQNPDPAVYQLRDSKSSDKSVCLFTDFDSQTNVSQSKDSDVYITDKCVLDINKSDCGAWTSRATPPWPGPTSPISPAPTPSTTALSPRTHSSQAPRAAAALPARATSRTASASESCCKWPALTCPCGCGPAAPREADLASRPISTCSWLATWNPTQALLEAIPSTSPRCASPPATTSPGPYAPSPPRSPTTPPRATPSIRTATSSGSPSCKNSSSRASGSTSARCGSRTTAPRWRSGPRRRASKRGRCSPRSARAWPSAVPGWPRSNRWKASWRRTGPRSPRGSWPPSASRPTTRARVWAAPSCSPEWRRPSAPGCPPSWRPPRPATSPSTSGSASPSPPTSRCPKDRAPGAPASPVP

SEQ ID NO: 16504 - protein, 804 aa, synthetic construct
MALPVTALLLPLALLLHAARPLEEDLKNVFPPEVAVFEPSEAEISHTQKATLVCLATGFYPDHVELSWWVNGKEVHSGVCTDPQPLKEQPALNDSRYCLSSRLRVSATFWQNPRNHFRCQVQFYGLSENDEWTQDRAKPVTQIVSAEAWGRADCDVKLVEKSFETDTNLNFQNLSVIGFRILLLKVAGFNLLMTLRLWSSRAKRSGSGATNFSLLKQAGDVEENPGPTSATMALPVTALLLPLALLLHAARPGMRTEDLPKAVVFLEPQWYRVLEKDSVTLKCQGAYSPEDNSTQWFHNESLISSQASSYFIDAATVDDSGEYRCQTNLSTLSDPVQLEVHIGWLLLQAPRWVFKEEDPIHLRCHSWKNTALHKVTYLQNGKGRKYFHHNSDFYIPKATLKDSGSYFCRGLVGSKNVSSETVNITITQGLAVSTISSFFPPGYQTRIQNPDPAVYQLRDSKSSDKSVCLFTDFDSQTNVSQSKDSDVYITDKCVLDINKSDCGAWTSRATPPWPGPTSPISPAPTPSTTALSPRTHSSQAPRAAAALPARATSRTASASESCCKWPALTCPCGCGPAAPREADLASRPISTCSWLATWNPTQALLEAIPSTSPRCASPPATTSPGPYAPSPPRSPTTPPRATPSIRTATSSGSPSCKNSSSRASGSTSARCGSRTTAPRWRSGPRRRASKRGRCSPRSARAWPSAVPGWPRSNRWKASWRRTGPRSPRGSWPPSASRPTTRARVWAAPSCSPEWRRPSAPGCPPSWRPPRPATSPSTSGSASPSPPTSRCPKDRAPGAPASPVP

SEQ ID NO: 16505 - protein, 828 aa, synthetic construct
MALPVTALLLPLALLLHAARPLEIQNPDPAVYQLRDSKSSDKSVCLFTDFDSQTNVSQSKDSDVYITDKCVLDINKSDCGAWTSRATPPWPGPTSPISPAPTPSTTALSPRTHSSQAPRAAAALPARATSRTASASESCCKWPALTCPCGCGPAGPSDLDLEQQTSHYSNKQVTWRRIPGLLAWPYQPPCSCRWPCCSTPPGRTSRHRLHPPCLPLWETESPSVAGQVRTLVNIIGISRNQMELLNSSTIHQDYTQESHQGSVAVGLEQIILSPLATWSKKILPLTFANRVIRFRTRSEGGPSWRSQVAVARAVVGRVAADLRNCRSQDLAWWRPHRACPSHALSQGSHYPTMVAGFASLHERVWSGWEYGVVKPHTIIQLSNPDPSSRTTPRAKFSKTVCKLMTQPFTTVPNIITTVVAMLWTTGVKEPQSPSPQRVRTRTCSHLRWPCSSLARPRSATPRKPPSCAWLPASTPTMWNCLGGSTAKRCTAACVPTPSHKNSPPTTAGTAAADECPPPSGRTPGTTSDARCSSTAARTTSGPRTEPSPPRSCLPKPGAEPIATSWWKRASRQTPTTSRTASASESCCKWPALTCPCGCGPAAPREADLASRPISTCSWLATWNPTQALLEAIPSTSPRCASPPATTSPGPYAPSPPRSPTTPPRATPSIRTATSSGSPSCKNSSSRASGSTSARCGSRTTAPRWRSGPRRRASKRGRCSPRSARAWPSAVPGWPRSNRWKASWRRTGPRSPRGSWPPSASRPTTRARVWAAPSCSPEWRRPSAPGCPPSWRPPRPATSPSTSGSASPSPPTSRCPKDRAPGAPASPVP

SEQ ID NO: 16506 - protein, 821 aa, synthetic construct
MALPVTALLLPLALLLHAARPLEIQNPDPAVYQLRDSKSSDKSVCLFTDFDSQTNVSQSKDSDVYITDKCVLDINKSDCGAWTSRATPPWPGPTSPISPAPTPSTTALSPRTHSSQAPRAAAALPARATSRTASASESCCKWPALTCPCGCGPAGPSDLDLEQQTSHYSNKQVTWRRIPGLLAPWPYQPPCSCRWPCCSTPPGRRSPRALPPCLALAKEPPAVEPARTSASTTGISRSPARPPDCSTTPADCTAASPPDFLALAAAPTTPQSAASSPRTSPCTSVSKATPCPTPSARAPSWKSRAEAEVEAEDLAAEALRCNSRNLALASSPARHAPVPCPACPCLTMACPGSDSPLARAWNGSEFGAAKPPTTTAPSPEPSPRTTPRTRCPSAAQPPTPPCITAPSTTTTAAATLWTTGAREPSPCLVRVRTRTCSHLRWPCSSLARPRSATPRKPPSCAWLPASTPTMWNCLGGSTAKRCTAACVPTPSHKNSPPTTAGTAAADECPPPSGRTPGTTSDARCSSTAARTTSGPRTEPSPPRSCLPKPGAEPIATSWWKRASRQTPTTSRTASASESCCKWPALTCPCGCGPAAPREADLASRPISTCSWLATWNPTQALLEAIPSTSPRCASPPATTSPGPYAPSPPRSPTTPPRATPSIRTATSSGSPSCKNSSSRASGSTSARCGSRTTAPRWRSGPRRRASKRGRCSPRSARAWPSAVPGWPRSNRWKASWRRTGPRSPRGSWPPSASRPTTRARVWAAPSCSPEWRRPSAPGCPPSWRPPRPATSPSTSGSASPSPPTSRCPKDRAPGAPASPVP

SEQ ID NO: 16507 - protein, 826 aa, synthetic construct
MALPVTALLLPLALLLHAARPLEIQNPDPAVYQLRDSKSSDKSVCLFTDFDSQTNVSQSKDSDVYITDKCVLDINKSDCGAWTSRATPPWPGPTSPISPAPTPSTTALSPRTHSSQAPRAAAALPARATSRTASASESCCKWPALTCPCGCGPAGPSDLDLEQQTSHYSNKQVTWRRIPGLLAPWPYQPPCSCRWPCCSTPPGRTRSCHRAPPPCHCLQAKEPPAVAPAAACPTCTGISRSPARPPDCSTIPASWPPASPPDFLAAAPAPTSPQSAAWNPRTWPCTTVFKAACTPSPSARAPSWKSREVAVARAVVGRVAADLRCSSRNLALASSLARPAPVPCLAAASAQAAWAWAGSDSTLARAWNGSATFGGTTTSGTTPPSPEPSAWTPARTSSASAAQPPIPPCIIAPGWNCGPTTSTTGAREPSPCLVRVRTRTCSHLRWPCSSLARPRSATPRKPPSCAWLPASTPTMWNCLGGSTAKRCTAACVPTPSHKNSPPTTAGTAAADECPPPSGRTPGTTSDARCSSTAARTTSGPRTEPSPPRSCLPKPGAEPIATSWWKRASRQTPTTSRTASASESCCKWPALTCPCGCGPAAPREADLASRPISTCSWLATWNPTQALLEAIPSTSPRCASPPATTSPGPYAPSPPRSPTTPPRATPSIRTATSSGSPSCKNSSSRASGSTSARCGSRTTAPRWRSGPRRRASKRGRCSPRSARAWPSAVPGWPRSNRWKASWRRTGPRSPRGSWPPSASRPTTRARVWAAPSCSPEWRRPSAPGCPPSWRPPRPATSPSTSGSASPSPPTSRCPKDRAPGAPASPVP

SEQ ID NO: 16508 - protein, 824 aa, synthetic construct
MALPVTALLLPLALLLHAARPLEIQNPDPAVYQLRDSKSSDKSVCLFTDFDSQTNVSQSKDSDVYITDKCVLDINKSDCGAWTSRATPPWPGPTSPISPAPTPSTTALSPRTHSSQAPRAAAALPARATSRTASASESCCKWPALTCPCGCGPAGPSDLDLEQQTSHYSNKQVTWRRIPGLLAWPYQPPCSCRWPCCSTPPGRTSRHRALAACLPAWETEPSPVEPARTSATTTGISRSPARPLSCSTTPADCTAACPADFLALAAAPTSPQYLASSLRTSPPTIASRATPCLTHLDRAPRWKSREAEAEVEAEDLAAEALKCSWLNQVAAWFNLADLDAVPPAASPSATTLAGSDRPLAKDLNGSPPSAMAAPTLTTPTARADSPSPETTARTPCTSRTPEPRTPPCTTAPDSTATSSTIGARAPWSQSLLRVRTRTCSHLRWPCSSLARPRSATPRKPPSCAWLPASTPTMWNCLGGSTAKRCTAACVPTPSHKNSPPTTAGTAAADECPPPSGRTPGTTSDARCSSTAARTTSGPRTEPSPPRSCLPKPGAEPIATSWWKRASRQTPTTSRTASASESCCKWPALTCPCGCGPAAPREADLASRPISTCSWLATWNPTQALLEAIPSTSPRCASPPATTSPGPYAPSPPRSPTTPPRATPSIRTATSSGSPSCKNSSSRASGSTSARCGSRTTAPRWRSGPRRRASKRGRCSPRSARAWPSAVPGWPRSNRWKASWRRTGPRSPRGSWPPSASRPTTRARVWAAPSCSPEWRRPSAPGCPPSWRPPRPATSPSTSGSASPSPPTSRCPKDRAPGAPASPVP

SEQ ID NO: 16509 - protein, 828 aa, synthetic construct
MALPVTALLLPLALLLHAARPLEIQNPDPAVYQLRDSKSSDKSVCLFTDFDSQTNVSQSKDSDVYITDKCVLDINKSDCGAWTSRATPPWPGPTSPISPAPTPSTTALSPRTHSSQAPRAAAALPARATSRTASASESCCKWPALTCPCGCGPAGPSDLDLEQQTSHYSNKQVTWRRIPGLLAWPYQPPCSCRWPCCSTPPGRTSRHRALAACLPAWETEPSHARPATTSTTGWPGISRSLDRPLSCSTALPHWKQACPADFLAAALAPTTPQYPASSLRTSPPTTVSRAGTPLGHSARAPSWKSREAEAEVEAEDLAAEALKFSFNSLALSWSNLALLRAAKPAATPSAATGSTGSRNPARDSNGSAKSIPATATPTTTASSRAEPHPPIPLAAQPTCSAAPAKIAPCTSVPGPSQQSWAALWTIGAREQAPCLVRVRTRTCSHLRWPCSSLARPRSATPRKPPSCAWLPASTPTMWNCLGGSTAKRCTAACVPTPSHKNSPPTTAGTAAADECPPPSGRTPGTTSDARCSSTAARTTSGPRTEPSPPRSCLPKPGAEPIATSWWKRASRQTPTTSRTASASESCCKWPALTCPCGCGPAAPREADLASRPISTCSWLATWNPTQALLEAIPSTSPRCASPPATTSPGPYAPSPPRSPTTPPRATPSIRTATSSGSPSCKNSSSRASGSTSARCGSRTTAPRWRSGPRRRASKRGRCSPRSARAWPSAVPGWPRSNRWKASWRRTGPRSPRGSWPPSASRPTTRARVWAAPSCSPEWRRPSAPGCPPSWRPPRPATSPSTSGSASPSPPTSRCPKDRAPGAPASPVP

SEQ ID NO: 16510 - protein, 833 aa, synthetic construct
MALPVTALLLPLALLLHAARPLEIQNPDPAVYQLRDSKSSDKSVCLFTDFDSQTNVSQSKDSDVYITDKCVLDINKSDCGAWTSRATPPWPGPTSPISPAPTPSTTALSPRTHSSQAPRAAAALPARATSRTASASESCCKWPALTCPCGCGPAGPSDLDLEQQTSHYSNKQVTWRRIPGLLAWPYQPPCSCRWPCCSTPPGRRSCCLSLLPSALPQARKPPVEPAAACPTCTGISRSPAAALSLGSTPPAIWPLACQPDFLALAAAPATASQSAEWKPRTPPPTIVSSGPSILLPSAEAPGWKSKEQWLLAEAEVEAEDLAAEALRLICNRAEPNSSDLALLRAARPAATPSPAIICTGSSRPLGRDSNGSAESIPATATPPTTRSSRAKPHPWARAAAPPICSSAAPARTAPCTSAPDTTTTTLWTTGARAPAQLALPARVRTRTCSHLRWPCSSLARPRSATPRKPPSCAWLPASTPTMWNCLGGSTAKRCTAACVPTPSHKNSPPTTAGTAAADECPPPSGRTPGTTSDARCSSTAARTTSGPRTEPSPPRSCLPKPGAEPIATSWWKRASRQTPTTSRTASASESCCKWPALTCPCGCGPAAPREADLASRPISTCSWLATWNPTQALLEAIPSTSPRCASPPATTSPGPYAPSPPRSPTTPPRATPSIRTATSSGSPSCKNSSSRASGSTSARCGSRTTAPRWRSGPRRRASKRGRCSPRSARAWPSAVPGWPRSNRWKASWRRTGPRSPRGSWPPSASRPTTRARVWAAPSCSPEWRRPSAPGCPPSWRPPRPATSPSTSGSASPSPPTSRCPKDRAPGAPASPVP

SEQ ID NO: 16511 - protein, 829 aa, synthetic construct
MALPVTALLLPLALLLHAARPLEIQNPDPAVYQLRDSKSSDKSVCLFTDFDSQTNVSQSKDSDVYITDKCVLDINKSDCGAWTSRATPPWPGPTSPISPAPTPSTTALSPRTHSSQAPRAAAALPARATSRTASASESCCKWPALTCPCGCGPAGPSDLDLEQQTSHYSNKQVTWRRIPGLLAWPYQPPCSCRWPCCSTPPGRRSCHRALPPCLALAKEPPAVEPARACPATWPGISRSPARLPGCSTMPAIEPPASPPDFPALAAAPTSPPSAPWNPRTSPCTTASSGATGPSHSARAPGWKSKAEAEVEAEDLAAEALRCSLLSLAEDWCSPIEADCLVPPAASPSTIMPCTGSDRPLAKDLNGCPPSLGTAAQSATPTLRADSPSAGTTPRTACTSRTPEPRTQPCTTAPRTSSTATTTTAWTCGARAQQQSLLRVRTRTCSHLRWPCSSLARPRSATPRKPPSCAWLPASTPTMWNCLGGSTAKRCTAACVPTPSHKNSPPTTAGTAAADECPPPSGRTPGTTSDARCSSTAARTTSGPRTEPSPPRSCLPKPGAEPIATSWWKRASRQTPTTSRTASASESCCKWPALTCPCGCGPAAPREADLASRPISTCSWLATWNPTQALLEAIPSTSPRCASPPATTSPGPYAPSPPRSPTTPPRATPSIRTATSSGSPSCKNSSSRASGSTSARCGSRTTAPRWRSGPRRRASKRGRCSPRSARAWPSAVPGWPRSNRWKASWRRTGPRSPRGSWPPSASRPTTRARVWAAPSCSPEWRRPSAPGCPPSWRPPRPATSPSTSGSASPSPPTSRCPKDRAPGAPASPVP

SEQ ID NO: 16512 - protein, 827 aa, synthetic construct
MALPVTALLLPLALLLHAARPLEIQNPDPAVYQLRDSKSSDKSVCLFTDFDSQTNVSQSKDSDVYITDKCVLDINKSDCGAWTSRATPPWPGPTSPISPAPTPSTTALSPRTHSSQAPRAAAALPARATSRTASASESCCKWPALTCPCGCGPAGPSDLDLEQQTSHYSNKQVTWRRIPGLLAWPYQPPCSCRWPCCSTPPGRTSRPRAPAACLPAWATEPSPVEPARTTPPWPGISRSLARPPSCSTAPASWKAACPADSAEAEAAPTSPPSAPSSPRTSPPTTASSTTPPLPPSARPRWKSREAEAEVEAEDLAAEALKCNWWNLAADWCSLADLDAVPPAASTSRTPTSTGCARPLERDWNGWPGSTPPTATPDTPTARAGSPSAPTPARIPPTSRTACGPRIPPCTTAQDGEATASTLWTCGARAPLPCHLRVRTRTCSHLRWPCSSLARPRSATPRKPPSCAWLPASTPTMWNCLGGSTAKRCTAACVPTPSHKNSPPTTAGTAAADECPPPSGRTPGTTSDARCSSTAARTTSGPRTEPSPPRSCLPKPGAEPIATSWWKRASRQTPTTSRTASASESCCKWPALTCPCGCGPAAPREADLASRPISTCSWLATWNPTQALLEAIPSTSPRCASPPATTSPGPYAPSPPRSPTTPPRATPSIRTATSSGSPSCKNSSSRASGSTSARCGSRTTAPRWRSGPRRRASKRGRCSPRSARAWPSAVPGWPRSNRWKASWRRTGPRSPRGSWPPSASRPTTRARVWAAPSCSPEWRRPSAPGCPPSWRPPRPATSPSTSGSASPSPPTSRCPKDRAPGAPASPVP

SEQ ID NO: 16513 - protein, 709 aa, synthetic construct
MALPVTALLLPLALLLHAARPLEIQNPDPAVYQLRDSKSSDKSVCLFTDFDSQTNVSQSKDSDVYITDKCVLDINKSDCGAWTSRATPPWPGPTSPISPAPTPSTTALSPRTHSSQAPRAAAALPARATSRTASASESCCKWPALTCPCGCGPAGPSDLDLEQQTSHYSNKQVTWRRIPGLLAWPCPQPCCCLWLCCCTPPDPMNSRCNWWKAAEAWCRLADLDAVPPAASPSASTQWAGTDRPLASRGNWWPSPASATPTTPTARAGSPSAGTTPRTPCTSRTASPRTPPCTTASGSEQPPRAPIIGAREHKPCPLRVRTRTCSHLRWPCSSLARPRSATPRKPPSCAWLPASTPTMWNCLGGSTAKRCTAACVPTPSHKNSPPTTAGTAAADECPPPSGRTPGTTSDARCSSTAARTTSGPRTEPSPPRSCLPKPGAEPIATSWWKRASRQTPTTSRTASASESCCKWPALTCPCGCGPAAPREADLASRPISTCSWLATWNPTQALLEAIPSTSPRCASPPATTSPGPYAPSPPRSPTTPPRATPSIRTATSSGSPSCKNSSSRASGSTSARCGSRTTAPRWRSGPRRRASKRGRCSPRSARAWPSAVPGWPRSNRWKASWRRTGPRSPRGSWPPSASRPTTRARVWAAPSCSPEWRRPSAPGCPPSWRPPRPATSPSTSGSASPSPPTSRCPKDRAPGAPASPVP

SEQ ID NO: 16514 - protein, 709 aa, synthetic construct; identical to SEQ ID NO: 16513

SEQ ID NO: 16515 - protein, 969 aa, synthetic construct
MALPVTALLLPLALLLHAARPLEIQNPDPAVYQLRDSKSSDKSVCLFTDFDSQTNVSQSKDSDVYITDKCVLDINKSDCGAWTSRATPPWPGPTSPISPAPTPSTTALSPRTHSSQAPRAAAALPARATSRTASASESCCKWPALTCPCGCGPAGPSDLDLEQQTSHYSNKQVTWRRIPGLLAWPYQPPCSCRWPCCSTPPGRRSSSSSPAAASSRPATPSPSPAPPPAAPSPPTPSPGSASAPARSASSSPASAGAAPPTTPTPSRTASPSPATPPSTPCTSRTPSSPRTPPSTTAATTPAAGPSPPSTSTTPGARAPRSPSPPVPAEADLAAEVAVAEDLNSTSRHRALAACLPAWETEPSHARPATTSTTGWPGISRSLDRPLSCSTALPHWKQACPADFLAAALAPTTPQYPASSLRTSPPTTVSRAGTPLGHSARAPSWKSREAEAEVEAEDLAAEALKFSFNSLALSWSNLALLRAAKPAATPSAATGSTGSRNPARDSNGSAKSIPATATPTTTASSRAEPHPPIPLAAQPTCSAAPAKIAPCTSVPGPSQQSWAALWTIGAREQAPCLVRVRTRTCSHLRWPCSSLARPRSATPRKPPSCAWLPASTPTMWNCLGGSTAKRCTAACVPTPSHKNSPPTTAGTAAADECPPPSGRTPGTTSDARCSSTAARTTSGPRTEPSPPRSCLPKPGAEPIATSWWKRASRQTPTTSRTASASESCCKWPALTCPCGCGPAAPREADLASRPISTCSWLATWNPTQALLEAIPSTSPRCASPPATTSPGPYAPSPPRSPTTPPRATPSIRTATSSGSPSCKNSSSRASGSTSARCGSRTTAPRWRSGPRRRASKRGRCSPRSARAWPSAVPGWPRSNRWKASWRRTGPRSPRGSWPPSASRPTTRARVWAAPSCSPEWRRPSAPGCPPSWRPPRPATSPSTSGSASPSPPTSRCPKDRAPGAPASPVP

SEQ ID NO: 16516 - protein, 1093 aa, synthetic construct
MALPVTALLLPLALLLHAARPLEIQNPDPAVYQLRDSKSSDKSVCLFTDFDSQTNVSQSKDSDVYITDKCVLDINKSDCGAWTSRATPPWPGPTSPISPAPTPSTTALSPRTHSSQAPRAAAALPARATSRTASASESCCKWPALTCPCGCGPAGPSDLDLEQQTSHYSNKQVTWRRIPGLLAWPYQPPCSCRWPCCSTPPGRRFSCLSLAEDWFNLAEADCLVPPAASPLAATPAGSDRLLAKDWNGCPASAAAATTSTTPIARADSPSAGTSARTPCTSRTAEPRTPPCTTVPKKAPALTAAWPIIEARAHWSPCLVAEEAAEDLRSSSSSPAAASSRPATPSPSPAPPPAAPSPPTPSPGSASAPARSASSSPASAGAAPPTTPTPSRTASPSPATPPSTPCTSRTPSSPRTPPSTTAATTPAAGPSPPSTSTTPGARAPRSPSPPVPAEADLAAEVAVAEDLNSTSRHRALAACLPAWETEPSHARPATTSTTGWPGISRSLDRPLSCSTALPHWKQACPADFLAAALAPTTPQYPASSLRTSPPTTVSRAGTPLGHSARAPSWKSREAEAEVEAEDLAAEALKFSFNSLALSWSNLALLRAAKPAATPSAATGSTGSRNPARDSNGSAKSIPATATPTTTASSRAEPHPPIPLAAQPTCSAAPAKIAPCTSVPGPSQQSWAALWTIGAREQAPCLVRVRTRTCSHLRWPCSSLARPRSATPRKPPSCAWLPASTPTMWNCLGGSTAKRCTAACVPTPSHKNSPPTTAGTAAADECPPPSGRTPGTTSDARCSSTAARTTSGPRTEPSPPRSCLPKPGAEPIATSWWKRASRQTPTTSRTASASESCCKWPALTCPCGCGPAAPREADLASRPISTCSWLATWNPTQALLEAIPSTSPRCASPPATTSPGPYAPSPPRSPTTPPRATPSIRTATSSGSPSCKNSSSRASGSTSARCGSRTTAPRWRSGPRRRASKRGRCSPRSARAWPSAVPGWPRSNRWKASWRRTGPRSPRGSWPPSASRPTTRARVWAAPSCSPEWRRPSAPGCPPSWRPPRPATSPSTSGSASPSPPTSRCPKDRAPGAPASPVP

SEQ ID NO: 16517 - protein, 1093 aa, synthetic construct; identical to SEQ ID NO: 16516

SEQ ID NO: 16518 - protein, 717 aa, synthetic construct
MALPVTALLLPLALLLHAARPLEIQNPDPAVYQLRDSKSSDKSVCLFTDFDSQTNVSQSKDSDVYITDKCVLDINKSDCGAWTSRATPPWPGPTSPISPAPTPSTTALSPRTHSSQAPRAAAALPARATSRTASASESCCKWPALTCPCGCGPAGPSDLDLEQQTSHYSNKQVTWRRIPGLLAWPCPQPCCCLWLCCCTPPDPMNSALTWASSCCSPLPRARTTKCGFCWLLGPTTPRISRATPPCTWPPMMDTWKSWKCCRLALMMPKTARAGPLCMKPPTAAIWKLWKCCKPGQTTLRTTLARHQPIWLQLGATKISPRCCRRRVRTRTCSHLRWPCSSLARPRSATPRKPPSCAWLPASTPTMWNCLGGSTAKRCTAACVPTPSHKNSPPTTAGTAAADECPPPSGRTPGTTSDARCSSTAARTTSGPRTEPSPPRSCLPKPGAEPIATSWWKRASRQTPTTSRTASASESCCKWPALTCPCGCGPAAPREADLASRPISTCSWLATWNPTQALLEAIPSTSPRCASPPATTSPGPYAPSPPRSPTTPPRATPSIRTATSSGSPSCKNSSSRASGSTSARCGSRTTAPRWRSGPRRRASKRGRCSPRSARAWPSAVPGWPRSNRWKASWRRTGPRSPRGSWPPSASRPTTRARVWAAPSCSPEWRRPSAPGCPPSWRPPRPATSPSTSGSASPSPPTSRCPKDRAPGAPASPVP

SEQ ID NO: 16519 - protein, 650 aa, synthetic construct
MALPVTALLLPLALLLHAARPLEIQNPDPAVYQLRDSKSSDKSVCLFTDFDSQTNVSQSKDSDVYITDKCVLDINKSDCGAWTSRATPPWPGPTSPISPAPTPSTTALSPRTHSSQAPRAAAALPARATSRTASASESCCKWPALTCPCGCGPAGPSDLDLEQQTSHYSNKQVTWRRIPGLLAWTGFGASFSLSALLPAPIPSKAADSNTPKRCGTPTGRSPCCPIPTSRREPPSESCTTTPPRAASCCLRLKNTIARRVRTRTCSHLRWPCSSLARPRSATPRKPPSCAWLPASTPTMWNCLGGSTAKRCTAACVPTPSHKNSPPTTAGTAAADECPPPSGRTPGTTSDARCSSTAARTTSGPRTEPSPPRSCLPKPGAEPIATSWWKRASRQTPTTSRTASASESCCKWPALTCPCGCGPAAPREADLASRPISTCSWLATWNPTQALLEAIPSTSPRCASPPATTSPGPYAPSPPRSPTTPPRATPSIRTATSSGSPSCKNSSSRASGSTSARCGSRTTAPRWRSGPRRRASKRGRCSPRSARAWPSAVPGWPRSNRWKASWRRTGPRSPRGSWPPSASRPTTRARVWAAPSCSPEWRRPSAPGCPPSWRPPRPATSPSTSGSASPSPPTSRCPKDRAPGAPASPVP

SEQ ID NO: 16520 - protein, 858 aa, synthetic construct
MALPVTALLLPLALLLHAARPLEIQNPDPAVYQLRDSKSSDKSVCLFTDFDSQTNVSQSKDSDVYITDKCVLDINKSDCGAWTSRATPPWPGPTSPISPAPTPSTTALSPRTHSSQAPRAAAALPARATSRTASASESCCKWPALTCPCGCGPAGPSDLDLEQQTSHYSNKQVTWRRIPGLLAWPCPQPCCCLWLCCCTPPDPMNSRCNWWKAAEAWCRLADLDAVPPAASPSASTQWAGTDRPLASRGNWWPSPASATPTTPTARAGSPSAGTTPRTPCTSRTASPRTPPCTTASGSEQPPRAPIIGAREHKPCPLSREEAAPGEAEVEAEDLGLEEADLEAQGQGAQAVEALSKCNWWNLGADWCSQAEVGCLVPPPAASSASTTWPGIGRLPENSASWWLLAEWAPAAPTLRADSQSPETPRIQCTSRTLNLRIQQCTIATWTSGWTAAHWPTGDRELKQCLARVRTRTCSHLRWPCSSLARPRSATPRKPPSCAWLPASTPTMWNCLGGSTAKRCTAACVPTPSHKNSPPTTAGTAAADECPPPSGRTPGTTSDARCSSTAARTTSGPRTEPSPPRSCLPKPGAEPIATSWWKRASRQTPTTSRTASASESCCKWPALTCPCGCGPAAPREADLASRPISTCSWLATWNPTQALLEAIPSTSPRCASPPATTSPGPYAPSPPRSPTTPPRATPSIRTATSSGSPSCKNSSSRASGSTSARCGSRTTAPRWRSGPRRRASKRGRCSPRSARAWPSAVPGWPRSNRWKASWRRTGPRSPRGSWPPSASRPTTRARVWAAPSCSPEWRRPSAPGCPPSWRPPRPATSPSTSGSASPSPPTSRCPKDRAPGAPASPVP

SEQ ID NO: 16521 - protein, 778 aa, synthetic construct
MALPVTALLLPLALLLHAARPLEIQNPDPAVYQLRDSKSSDKSVCLFTDFDSQTNVSQSKDSDVYITDKCVLDINKSDCGAWTSRATPPWPGPTSPISPAPTPSTTALSPRTHSSQAPRAAAALPARATSRTASASESCCKWPALTCPCGCGPAGPSDLDLEQQTSHYSNKQVTWRRIPGLLAWPFQSLPCCCLWRSCSTPLDRAEPRTCLRPWCSWNPSGTECWKRTAPSARAPTAPRTIAPSGSTTRASPARPAATSSTPPPWTTAASIDARPTAPATPCSWKCTSDGCCCRPPDGCSKKRTPSTDATLGRTPPCTKPTCRTARAESTSTTTATSTSPRPPRTPAPTSAEASWAARTCPARQTSPSPRAWPCLPSAAFSHPATRRVRTRTCSHLRWPCSSLARPRSATPRKPPSCAWLPASTPTMWNCLGGSTAKRCTAACVPTPSHKNSPPTTAGTAAADECPPPSGRTPGTTSDARCSSTAARTTSGPRTEPSPPRSCLPKPGAEPIATSWWKRASRQTPTTSRTASASESCCKWPALTCPCGCGPAAPREADLASRPISTCSWLATWNPTQALLEAIPSTSPRCASPPATTSPGPYAPSPPRSPTTPPRATPSIRTATSSGSPSCKNSSSRASGSTSARCGSRTTAPRWRSGPRRRASKRGRCSPRSARAWPSAVPGWPRSNRWKASWRRTGPRSPRGSWPPSASRPTTRARVWAAPSCSPEWRRPSAPGCPPSWRPPRPATSPSTSGSASPSPPTSRCPKDRAPGAPASPVP

SEQ ID NO: 16522 - protein, 784 aa, synthetic construct
MALPVTALLLPLALLLHAARPLEIQNPDPAVYQLRDSKSSDKSVCLFTDFDSQTNVSQSKDSDVYITDKCVLDINKSDCGAWTSRATPPWPGPTSPISPAPTPSTTALSPRTHSSQAPRAAAALPARATSRTASASESCCKWPALTCPCGCGPAGPSDLDLEQQTSHYSNKQVTWRRIPGLLAPPWPYQPPCSCRWPCCSTPPGRACGLKTSQRLWCSWSLNGTGCWRRTVLSAREPTPLRTIPHSGFTMRASSQARPPATSLTLPQWTTVESTGARQTSPPSVTRCSKSISAGCCSRPLGGCSRRKTLFTGVTAGRTLLCIRSHIYRMAKAGSIFIIILTSTFQKPHSKTAAPTSAGGLLGVKMCLQRLTSPSLKVWQCQPSHHSFHLATKRVRTRTCSHLRWPCSSLARPRSATPRKPPSCAWLPASTPTMWNCLGGSTAKRCTAACVPTPSHKNSPPTTAGTAAADECPPPSGRTPGTTSDARCSSTAARTTSGPRTEPSPPRSCLPKPGAEPIATSWWKRASRQTPTTSRTASASESCCKWPALTCPCGCGPAAPREADLASRPISTCSWLATWNPTQALLEAIPSTSPRCASPPATTSPGPYAPSPPRSPTTPPRATPSIRTATSSGSPSCKNSSSRASGSTSARCGSRTTAPRWRSGPRRRASKRGRCSPRSARAWPSAVPGWPRSNRWKASWRRTGPRSPRGSWPPSASRPTTRARVWAAPSCSPEWRRPSAPGCPPSWRPPRPATSPSTSGSASPSPPTSRCPKDRAPGAPASPVP

SEQ ID NO: 16523 - protein, 865 aa, synthetic construct
MALPVTALLLPLALLLHAARPLEEDLKNVFPPEVAVFEPSEAEISHTQKATLVCLATGFYPDHVELSWWVNGKEVHSGVCTDPQPLKEQPALNDSRYCLSSRLRVSATFWQNPRNHFRCQVQFYGLSENDEWTQDRAKPVTQIVSAEAWGRADCGFTSESYQQGVLSATNLSVIGFRILLLKVAGFNLLMTLRLWSSRAKRSGSGATNFSLLKQAGDVEENPGPTSMALPVTALLLPLALLLHAARPDIQMTQTTSSLSASLGDRVTISCRASQDISKYLNWYQQKPDGTVKLLIYHTSRLHSGVPSRFSGSGSGTDYSLTISNLEQEDIATYFCQQGNTLPYTFGGGTKLEITGGGGSGGGGSGGGGSEVKLQESGPGLVAPSQSLSVTCTVSGVSLPDYGVSWIRQPPRKGLEWLGVIWGSETTYYNSALKSRLTIIKDNSKSQVFLKMNSLQTDDTAIYYCAKHYYYGGSYAMDYWGQGTSVTVSSTRIQNPDPAVYQLRDSKSSDKSVCLFTDFDSQTNVSQSKDSDVYITDKCVLDMRSMDFKSNSAVAWSNKSDFACANAFNNSIIPEDTFFPSPESSCDVKLVEKSFETDTNLNFQILYEVIGFRILLLKVAGFNLLMTLRLWSSRAKRSGSGVKQTLNFDLLKLAGDVESNPGPSRGHMTEYKPTVRLATRDDVPRAVRTLAAAFADYPATRHTVDPDRHIERVTELQELFLTRVGLDIGKVWVADDGAAVAVWTTPESVEAGAVFAEIGPRMAELSGSRLAAQQQMEGLLAPHRPKEPAWFLATVGVSPDHQGKGLGSAVVLPGVEAAERAGVPAFLETSAPRNLPFYERLGFTVTADVEVPEGPRTWCMTRKPGA

SEQ ID NO: 16524 - protein, 866 aa, synthetic construct
MALPVTALLLPLALLLHAARPLEEDLKNVFPPEVAVFEPSEAEISHTQKATLVCLATGFYPDHVELSWWVNGKEVHSGVCTDPQPLKEQPALNDSRYCLSSRLRVSATFWQNPRNHFRCQVQFYGLSENDEWTQDRAKPVTQIVSAEAWGRADCGFTSESYQQGVLSATNLSVIGFRILLLKVAGFNLLMTLRLWSSRAKRSGSGATNFSLLKQAGDVEENPGPTSTMALPVTALLLPLALLLHAARPEIVMTQSPATLSLSPGERATLSCRASQDISKYLNWYQQKPGQAPRLLIYHTSRLHSGIPARFSGSGSGTDYTLTISSLQPEDFAVYFCQQGNTLPYTFGQGTKLEIKGGGGSGGGGSGGGGSQVQLQESGPGLVKPSETLSLTCTVSGVSLPDYGVSWIRQPPGKGLEWIGVIWGSETTYYNSSLKSRVTISKDNSKNQVSLKLSSVTAADTAVYYCAKHYYYGGSYAMDYWGQGTLVTVSSTRIQNPDPAVYQLRDSKSSDKSVCLFTDFDSQTNVSQSKDSDVYITDKCVLDMRSMDFKSNSAVAWSNKSDFACANAFNNSIIPEDTFFPSPESSCDVKLVEKSFETDTNLNFQILYEVIGFRILLLKVAGFNLLMTLRLWSSRAKRSGSGVKQTLNFDLLKLAGDVESNPGPSRGHMTEYKPTVRLATRDDVPRAVRTLAAAFADYPATRHTVDPDRHIERVTELQELFLTRVGLDIGKVWVADDGAAVAVWTTPESVEAGAVFAEIGPRMAELSGSRLAAQQQMEGLLAPHRPKEPAWFLATVGVSPDHQGKGLGSAVVLPGVEAAERAGVPAFLETSAPRNLPFYERLGFTVTADVEVPEGPRTWCMTRKPGA

SEQ ID NO: 16525 - protein, 867 aa, synthetic construct
MALPVTALLLPLALLLHAARPLEEDLKNVFPPEVAVFEPSEAEISHTQKATLVCLATGFYPDHVELSWWVNGKEVHSGVCTDPQPLKEQPALNDSRYCLSSRLRVSATFWQNPRNHFRCQVQFYGLSENDEWTQDRAKPVTQIVSAEAWGRADCGFTSESYQQGVLSATNLSVIGFRILLLKVAGFNLLMTLRLWSSRAKRSGSGATNFSLLKQAGDVEENPGPTSTMALPVTALLLPLALLLHAARPDEIVLTQSPATLSLSPGERATLSCSASSSVSYMHWYQQKPGQAPRLLIYDTSKLASGIPARFSGSGSGTDFTLTISSLEPEDVAVYYCFQGSVYPFTFGQGTKLEIKRGGGGSGGGGSGGGGSQVQLQESGPGLVKPSQTLSLTCTVSGGSISTSGMGVGWIRQHPGKGLEWIGHIWWDDDKRYNPALKSRVTISVDTSKNQFSLKLSSVTAADTAVYYCARMELWSYYFDYWGQGTLVTVSSTRIQNPDPAVYQLRDSKSSDKSVCLFTDFDSQTNVSQSKDSDVYITDKCVLDMRSMDFKSNSAVAWSNKSDFACANAFNNSIIPEDTFFPSPESSCDVKLVEKSFETDTNLNFQILYEVIGFRILLLKVAGFNLLMTLRLWSSRAKRSGSGVKQTLNFDLLKLAGDVESNPGPSRGHMTEYKPTVRLATRDDVPRAVRTLAAAFADYPATRHTVDPDRHIERVTELQELFLTRVGLDIGKVWVADDGAAVAVWTTPESVEAGAVFAEIGPRMAELSGSRLAAQQQMEGLLAPHRPKEPAWFLATVGVSPDHQGKGLGSAVVLPGVEAAERAGVPAFLETSAPRNLPFYERLGFTVTADVEVPEGPRTWCMTRKPGA

SEQ ID NO: 16526 - protein, 863 aa, synthetic construct
MALPVTALLLPLALLLHAARPLEEDLKNVFPPEVAVFEPSEAEISHTQKATLVCLATGFYPDHVELSWWVNGKEVHSGVCTDPQPLKEQPALNDSRYCLSSRLRVSATFWQNPRNHFRCQVQFYGLSENDEWTQDRAKPVTQIVSAEAWGRADCGFTSESYQQGVLSATNLSVIGFRILLLKVAGFNLLMTLRLWSSRAKRSGSGATNFSLLKQAGDVEENPGPTSMALPVTALLLPLALLLHAARPDIQMTQSPSSLSASVGDRVTITCRASQDISNYLNWYQQKPGKAPKLLIYYTSRLHSGVPSRFSGSGSGTDFTLTISSLQPEDFATYYCQQGNTLPYTFGQGTKVEIKRGGGGSGGGGSGGGGSEVQLVESGGGLVQPGGSLRLSCAASGFTFSDYFMSWVRQAPGKGLEWVATISNGGTYTYYPDSVKGRFTISRDNSKNTLYLQMNSLRAEDTAVYYCARFDGYIFDYWGQGTLVTVSSTRIQNPDPAVYQLRDSKSSDKSVCLFTDFDSQTNVSQSKDSDVYITDKCVLDMRSMDFKSNSAVAWSNKSDFACANAFNNSIIPEDTFFPSPESSCDVKLVEKSFETDTNLNFQILYEVIGFRILLLKVAGFNLLMTLRLWSSRAKRSGSGVKQTLNFDLLKLAGDVESNPGPSRGHMTEYKPTVRLATRDDVPRAVRTLAAAFADYPATRHTVDPDRHIERVTELQELFLTRVGLDIGKVWVADDGAAVAVWTTPESVEAGAVFAEIGPRMAELSGSRLAAQQQMEGLLAPHRPKEPAWFLATVGVSPDHQGKGLGSAVVLPGVEAAERAGVPAFLETSAPRNLPFYERLGFTVTADVEVPEGPRTWCMTRKPGA

SEQ ID NO: 16527 - protein, 867 aa, synthetic construct
MALPVTALLLPLALLLHAARPLEEDLKNVFPPEVAVFEPSEAEISHTQKATLVCLATGFYPDHVELSWWVNGKEVHSGVCTDPQPLKEQPALNDSRYCLSSRLRVSATFWQNPRNHFRCQVQFYGLSENDEWTQDRAKPVTQIVSAEAWGRADCGFTSESYQQGVLSATNLSVIGFRILLLKVAGFNLLMTLRLWSSRAKRSGSGATNFSLLKQAGDVEENPGPTSMALPVTALLLPLALLLHAARPDIQMTQSPSSLSASVGDRVTITCKASDHINNWLAWYQQKPGQAPKLLIYGATTLETGVPSRFSGSGSGTDYTLTISSLQPEDFATYYCQQSWNTPWTFGQGTKLEIKRGGGGSGGGGSGGGGSQVQLQQPGAELVKPGASVKMSCKASGYAFSSYWINWMKQKPGQGLEWIGQIYPGDGDTNYNGKFKGRATLTADTSSSTAYMQLSSLTSEDSAVYFCARSITTVVGCAMDYWGQGTSVTVSSTRIQNPDPAVYQLRDSKSSDKSVCLFTDFDSQTNVSQSKDSDVYITDKCVLDMRSMDFKSNSAVAWSNKSDFACANAFNNSIIPEDTFFPSPESSCDVKLVEKSFETDTNLNFQILYEVIGFRILLLKVAGFNLLMTLRLWSSRAKRSGSGVKQTLNFDLLKLAGDVESNPGPSRGHMTEYKPTVRLATRDDVPRAVRTLAAAFADYPATRHTVDPDRHIERVTELQELFLTRVGLDIGKVWVADDGAAVAVWTTPESVEAGAVFAEIGPRMAELSGSRLAAQQQMEGLLAPHRPKEPAWFLATVGVSPDHQGKGLGSAVVLPGVEAAERAGVPAFLETSAPRNLPFYERLGFTVTADVEVPEGPRTWCMTRKPGA

SEQ ID NO: 16528 - protein, 869 aa, synthetic construct
MALPVTALLLPLALLLHAARPLEEDLKNVFPPEVAVFEPSEAEISHTQKATLVCLATGFYPDHVELSWWVNGKEVHSGVCTDPQPLKEQPALNDSRYCLSSRLRVSATFWQNPRNHFRCQVQFYGLSENDEWTQDRAKPVTQIVSAEAWGRADCGFTSESYQQGVLSATNLSVIGFRILLLKVAGFNLLMTLRLWSSRAKRSGSGATNFSLLKQAGDVEENPGPTSMALPVTALLLPLALLLHAARPQIVLSQSPAILSASPGEKVTMTCRASSSVSYMHWYQQKPGSSPKPWIYATSNLASGVPARFSGSGSGTSYSFTISRVEAEDAATYYCQQWTFNPPTFGGGTRLEIKRTVAAGGGGSGGGGSGGGGSQAYLQQSGAELVRPGASVKMSCKASGYTFTSYNMHWVKQTPRQGLEWIGGIYPGNGDTSYNQKFKGKATLTVGKSSSTAYMQLSSLTSEDSAVYFCARYDYNYAMDYWGQGTSVTVSSASTRIQNPDPAVYQLRDSKSSDKSVCLFTDFDSQTNVSQSKDSDVYITDKCVLDMRSMDFKSNSAVAWSNKSDFACANAFNNSIIPEDTFFPSPESSCDVKLVEKSFETDTNLNFQILYEVIGFRILLLKVAGFNLLMTLRLWSSRAKRSGSGVKQTLNFDLLKLAGDVESNPGPSRGHMTEYKPTVRLATRDDVPRAVRTLAAAFADYPATRHTVDPDRHIERVTELQELFLTRVGLDIGKVWVADDGAAVAVWTTPESVEAGAVFAEIGPRMAELSGSRLAAQQQMEGLLAPHRPKEPAWFLATVGVSPDHQGKGLGSAVVLPGVEAAERAGVPAFLETSAPRNLPFYERLGFTVTADVEVPEGPRTWCMTRKPGA

SEQ ID NO: 16529 - protein, 867 aa, synthetic construct
MALPVTALLLPLALLLHAARPLEEDLKNVFPPEVAVFEPSEAEISHTQKATLVCLATGFYPDHVELSWWVNGKEVHSGVCTDPQPLKEQPALNDSRYCLSSRLRVSATFWQNPRNHFRCQVQFYGLSENDEWTQDRAKPVTQIVSAEAWGRADCGFTSESYQQGVLSATNLSVIGFRILLLKVAGFNLLMTLRLWSSRAKRSGSGATNFSLLKQAGDVEENPGPTSMALPVTALLLPLALLLHAARPEIVLTQSPATLSLSPGERATLSCRASQSVSSYLAWYQQKPGQAPRLLIYDASNRATGIPARFSGSGSGTDFTLTISSLEPEDFAVYYCQQRSNWPITFGQGTRLEIKGGGGSGGGGSGGGGSEVQLVESGGGLVQPDRSLRLSCAASGFTFHDYAMHWVRQAPGKGLEWVSTISWNSGTIGYADSVKGRFTISRDNAKNSLYLQMNSLRAEDTALYYCAKDIQYGNYYYGMDVWGQGTTVTVSSTRIQNPDPAVYQLRDSKSSDKSVCLFTDFDSQTNVSQSKDSDVYITDKCVLDMRSMDFKSNSAVAWSNKSDFACANAFNNSIIPEDTFFPSPESSCDVKLVEKSFETDTNLNFQILYEVIGFRILLLKVAGFNLLMTLRLWSSRAKRSGSGVKQTLNFDLLKLAGDVESNPGPSRGHMTEYKPTVRLATRDDVPRAVRTLAAAFADYPATRHTVDPDRHIERVTELQELFLTRVGLDIGKVWVADDGAAVAVWTTPESVEAGAVFAEIGPRMAELSGSRLAAQQQMEGLLAPHRPKEPAWFLATVGVSPDHQGKGLGSAVVLPGVEAAERAGVPAFLETSAPRNLPFYERLGFTVTADVEVPEGPRTWCMTRKPGA

SEQ ID NO: 16530 - protein, 865 aa, synthetic construct
MALPVTALLLPLALLLHAARPLEEDLKNVFPPEVAVFEPSEAEISHTQKATLVCLATGFYPDHVELSWWVNGKEVHSGVCTDPQPLKEQPALNDSRYCLSSRLRVSATFWQNPRNHFRCQVQFYGLSENDEWTQDRAKPVTQIVSAEAWGRADCGFTSESYQQGVLSATNLSVIGFRILLLKVAGFNLLMTLRLWSSRAKRSGSGATNFSLLKQAGDVEENPGPTSMALPVTALLLPLALLLHAARPDIQMTQSPSSLSASVGDRVTITCRASQDVNTAVAWYQQKPGKAPKLLIYSASFLESGVPSRFSGSRSGTDFTLTISSLQPEDFATYYCQQHYTTPPTFGQTKVEIKRGGGGSGGGGSGGGGSEVQLVESGGGLVQPGGSLRLSCAASGFNIKDTYIHWVRQAPGKGLEWVARIYPTNGYTRYADSVKGRFTISADTSKNTAYLQMNSLRAEDTAVYYCSRWGGDGFYAMDVWGQGTLVTVSSTRIQNPDPAVYQLRDSKSSDKSVCLFTDFDSQTNVSQSKDSDVYITDKCVLDMRSMDFKSNSAVAWSNKSDFACANAFNNSIIPEDTFFPSPESSCDVKLVEKSFETDTNLNFQILYEVIGFRILLLKVAGFNLLMTLRLWSSRAKRSGSGVKQTLNFDLLKLAGDVESNPGPSRGHMTEYKPTVRLATRDDVPRAVRTLAAAFADYPATRHTVDPDRHIERVTELQELFLTRVGLDIGKVWVADDGAAVAVWTTPESVEAGAVFAEIGPRMAELSGSRLAAQQQMEGLLAPHRPKEPAWFLATVGVSPDHQGKGLGSAVVLPGVEAAERAGVPAFLETSAPRNLPFYERLGFTVTADVEVPEGPRTWCMTRKPGA

SEQ ID NO: 16531 - protein, 744 aa, synthetic construct
MALPVTALLLPLALLLHAARPLEEDLKNVFPPEVAVFEPSEAEISHTQKATLVCLATGFYPDHVELSWWVNGKEVHSGVCTDPQPLKEQPALNDSRYCLSSRLRVSATFWQNPRNHFRCQVQFYGLSENDEWTQDRAKPVTQIVSAEAWGRADCGFTSESYQQGVLSATNLSVIGFRILLLKVAGFNLLMTLRLWSSRAKRSGSGATNFSLLKQAGDVEENPGPTSMALPVTALLLPLALLLHAARPDEFEVQLVESGGGLVQAGGSLRLSCAASGITFSINTMGWYRQAPGKQRELVALISSIGDTYYADSVKGRFTISRDNAKNTVYLQMNSLKPEDTAVYYCKRFRTAAQGTDYWGQGTQVTVSSTRIQNPDPAVYQLRDSKSSDKSVCLFTDFDSQTNVSQSKDSDVYITDKCVLDMRSMDFKSNSAVAWSNKSDFACANAFNNSIIPEDTFFPSPESSCDVKLVEKSFETDTNLNFQILYEVIGFRILLLKVAGFNLLMTLRLWSSRAKRSGSGVKQTLNFDLLKLAGDVESNPGPSRGHMTEYKPTVRLATRDDVPRAVRTLAAAFADYPATRHTVDPDRHIERVTELQELFLTRVGLDIGKVWVADDGAAVAVWTTPESVEAGAVFAEIGPRMAELSGSRLAAQQQMEGLLAPHRPKEPAWFLATVGVSPDHQGKGLGSAVVLPGVEAAERAGVPAFLETSAPRNLPFYERLGFTVTADVEVPEGPRTWCMTRKPGA

SEQ ID NO: 16532 - protein, 744 aa, synthetic construct; identical to SEQ ID NO: 16531

SEQ ID NO: 16533 - protein, 1009 aa, synthetic construct
MALPVTALLLPLALLLHAARPLEEDLKNVFPPEVAVFEPSEAEISHTQKATLVCLATGFYPDHVELSWWVNGKEVHSGVCTDPQPLKEQPALNDSRYCLSSRLRVSATFWQNPRNHFRCQVQFYGLSENDEWTQDRAKPVTQIVSAEAWGRADCGFTSESYQQGVLSATNLSVIGFRILLLKVAGFNLLMTLRLWSSRAKRSGSGATNFSLLKQAGDVEENPGPTSMALPVTALLLPLALLLHAARPQVQLVESGGGLVQAGDSVTLSCTASGRTFSSYALAWFRQRPGKEREFVAGLRWGGPTNYADSVKDRFTISGDSAKHTMYLQMNSLKPEDTAVYYCGYNPGGWAVPSQYEYDSWGQGTQVTVSSGTGGGGSGGGGSGGGGSEFDIQMTQSPSSLSASVGDRVTITCKASDHINNWLAWYQQKPGQAPKLLIYGATTLETGVPSRFSGSGSGTDYTLTISSLQPEDFATYYCQQSWNTPWTFGQGTKLEIKRGGGGSGGGGSGGGGSQVQLQQPGAELVKPGASVKMSCKASGYAFSSYWINWMKQKPGQGLEWIGQIYPGDGDTNYNGKFKGRATLTADTSSSTAYMQLSSLTSEDSAVYFCARSITTVVGCAMDYWGQGTSVTVSSTRIQNPDPAVYQLRDSKSSDKSVCLFTDFDSQTNVSQSKDSDVYITDKCVLDMRSMDFKSNSAVAWSNKSDFACANAFNNSIIPEDTFFPSPESSCDVKLVEKSFETDTNLNFQILYEVIGFRILLLKVAGFNLLMTLRLWSSRAKRSGSGVKQTLNFDLLKLAGDVESNPGPSRGHMTEYKPTVRLATRDDVPRAVRTLAAAFADYPATRHTVDPDRHIERVTELQELFLTRVGLDIGKVWVADDGAAVAVWTTPESVEAGAVFAEIGPRMAELSGSRLAAQQQMEGLLAPHRPKEPAWFLATVGVSPDHQGKGLGSAVVLPGVEAAERAGVPAFLETSAPRNLPFYERLGFTVTADVEVPEGPRTWCMTRKPGA

SEQ ID NO: 16534 - protein, 1138 aa, synthetic construct
MALPVTALLLPLALLLHAARPLEEDLKNVFPPEVAVFEPSEAEISHTQKATLVCLATGFYPDHVELSWWVNGKEVHSGVCTDPQPLKEQPALNDSRYCLSSRLRVSATFWQNPRNHFRCQVQFYGLSENDEWTQDRAKPVTQIVSAEAWGRADCGFTSESYQQGVLSATNLSVIGFRILLLKVAGFNLLMTLRLWSSRAKRSGSGATNFSLLKQAGDVEENPGPTSMALPVTALLLPLALLLHAARPEVQLLESGGGLVQPGGSLRLSCAASGFTFSSYAMSWVRQAPGKGLEWVSSISGSGDYIYYADSVKGRFTISRDISKNTLYLQMNSLRAEDTAVYYCAKEGTGANSSLADYRGQGTLVTVSSGGGSGGGSQVQLVESGGGLVQAGDSVTLSCTASGRTFSSYALAWFRQRPGKEREFVAGLRWGGPTNYADSVKDRFTISGDSAKHTMYLQMNSLKPEDTAVYYCGYNPGGWAVPSQYEYDSWGQGTQVTVSSGTGGGGSGGGGSGGGGSEFDIQMTQSPSSLSASVGDRVTITCKASDHINNWLAWYQQKPGQAPKLLIYGATTLETGVPSRFSGSGSGTDYTLTISSLQPEDFATYYCQQSWNTPWTFGQGTKLEIKRGGGGSGGGGSGGGGSQVQLQQPGAELVKPGASVKMSCKASGYAFSSYWINWMKQKPGQGLEWIGQIYPGDGDTNYNGKFKGRATLTADTSSSTAYMQLSSLTSEDSAVYFCARSITTVVGCAMDYWGQGTSVTVSSTRIQNPDPAVYQLRDSKSSDKSVCLFTDFDSQTNVSQSKDSDVYITDKCVLDMRSMDFKSNSAVAWSNKSDFACANAFNNSIIPEDTFFPSPESSCDVKLVEKSFETDTNLNFQILYEVIGFRILLLKVAGFNLLMTLRLWSSRAKRSGSGVKQTLNFDLLKLAGDVESNPGPSRGHMTEYKPTVRLATRDDVPRAVRTLAAAFADYPATRHTVDPDRHIERVTELQELFLTRVGLDIGKVWVADDGAAVAVWTTPESVEAGAVFAEIGPRMAELSGSRLAAQQQMEGLLAPHRPKEPAWFLATVGVSPDHQGKGLGSAVVLPGVEAAERAGVPAFLETSAPRNLPFYERLGFTVTADVEVPEGPRTWCMTRKPGA

SEQ ID NO: 16535 - protein, 1138 aa, synthetic construct; identical to SEQ ID NO: 16534

SEQ ID NO: 16536 - protein, 750 aa, synthetic construct
MALPVTALLLPLALLLHAARPLEEDLKNVFPPEVAVFEPSEAEISHTQKATLVCLATGFYPDHVELSWWVNGKEVHSGVCTDPQPLKEQPALNDSRYCLSSRLRVSATFWQNPRNHFRCQVQFYGLSENDEWTQDRAKPVTQIVSAEAWGRADCGFTSESYQQGVLSATNLSVIGFRILLLKVAGFNLLMTLRLWSSRAKRSGSGATNFSLLKQAGDVEENPGPTSMALPVTALLLPLALLLHAARPDEFGSDLGIKLLFAAAKGQDDEVRILLAAGADVNAKDFEGYTPLHVAAYDGHLEIVEVLLKAGADVNAKDSQGRTPLHEAAYSGHLEIVEVLLKAGADVNAQDDAGETPADLAAAWGHEDIAEVLQKTRIQNPDPAVYQLRDSKSSDKSVCLFTDFDSQTNVSQSKDSDVYITDKCVLDMRSMDFKSNSAVAWSNKSDFACANAFNNSIIPEDTFFPSPESSCDVKLVEKSFETDTNLNFQILYEVIGFRILLLKVAGFNLLMTLRLWSSRAKRSGSGVKQTLNFDLLKLAGDVESNPGPSRGHMTEYKPTVRLATRDDVPRAVRTLAAAFADYPATRHTVDPDRHIERVTELQELFLTRVGLDIGKVWVADDGAAVAVWTTPESVEAGAVFAEIGPRMAELSGSRLAAQQQMEGLLAPHRPKEPAWFLATVGVSPDHQGKGLGSAVVLPGVEAAERAGVPAFLETSAPRNLPFYERLGFTVTADVEVPEGPRTWCMTRKPGA

SEQ ID NO: 16537 - protein, 679 aa, synthetic construct
MALPVTALLLPLALLLHAARPLEEDLKNVFPPEVAVFEPSEAEISHTQKATLVCLATGFYPDHVELSWWVNGKEVHSGVCTDPQPLKEQPALNDSRYCLSSRLRVSATFWQNPRNHFRCQVQFYGLSENDEWTQDRAKPVTQIVSAEAWGRADCGFTSESYQQGVLSATNLSVIGFRILLLKVAGFNLLMTLRLWSSRAKRSGSGATNFSLLKQAGDVEENPGPTSMDWIWRILFLVGAATGAHSFEGSGFEYAKEMRNAYWEIALLPNLTNQQKRAPIRKLYDDPSQSSELLSEAKKLNDSQTRIQNPDPAVYQLRDSKSSDKSVCLFTDFDSQTNVSQSKDSDVYITDKCVLDMRSMDFKSNSAVAWSNKSDFACANAFNNSIIPEDTFFPSPESSCDVKLVEKSFETDTNLNFQILYEVIGFRILLLKVAGFNLLMTLRLWSSRAKRSGSGVKQTLNFDLLKLAGDVESNPGPSRGHMTEYKPTVRLATRDDVPRAVRTLAAAFADYPATRHTVDPDRHIERVTELQELFLTRVGLDIGKVWVADDGAAVAVWTTPESVEAGAVFAEIGPRMAELSGSRLAAQQQMEGLLAPHRPKEPAWFLATVGVSPDHQGKGLGSAVVLPGVEAAERAGVPAFLETSAPRNLPFYERLGFTVTADVEVPEGPRTWCMTRKPGA

SEQ ID NO: 16538 - protein, 901 aa, synthetic construct
MALPVTALLLPLALLLHAARPLEEDLKNVFPPEVAVFEPSEAEISHTQKATLVCLATGFYPDHVELSWWVNGKEVHSGVCTDPQPLKEQPALNDSRYCLSSRLRVSATFWQNPRNHFRCQVQFYGLSENDEWTQDRAKPVTQIVSAEAWGRADCGFTSESYQQGVLSATNLSVIGFRILLLKVAGFNLLMTLRLWSSRAKRSGSGATNFSLLKQAGDVEENPGPTSMALPVTALLLPLALLLHAARPDEFEVQLVESGGGLVQAGGSLRLSCAASGITFSINTMGWYRQAPGKQRELVALISSIGDTYYADSVKGRFTISRDNAKNTVYLQMNSLKPEDTAVYYCKRFRTAAQGTDYWGQGTQVTVSSLEGGGGSGGGGSGGGGSGSGGSGSGGSGSGGSGSGGSFEVQLVESGGGLVQPGGSLRLSCAASGSIFGFNDMAWYRQAPGKQRELVALISRVGVTSSADSVKGRFTISRVNAKDTVYLQMNSLKPEDTAVYYCYMDQRLDGSTLAYWGQGTQVTVSSTRIQNPDPAVYQLRDSKSSDKSVCLFTDFDSQTNVSQSKDSDVYITDKCVLDMRSMDFKSNSAVAWSNKSDFACANAFNNSIIPEDTFFPSPESSCDVKLVEKSFETDTNLNFQILYEVIGFRILLLKVAGFNLLMTLRLWSSRAKRSGSGVKQTLNFDLLKLAGDVESNPGPSRGHMTEYKPTVRLATRDDVPRAVRTLAAAFADYPATRHTVDPDRHIERVTELQELFLTRVGLDIGKVWVADDGAAVAVWTTPESVEAGAVFAEIGPRMAELSGSRLAAQQQMEGLLAPHRPKEPAWFLATVGVSPDHQGKGLGSAVVLPGVEAAERAGVPAFLETSAPRNLPFYERLGFTVTADVEVPEGPRTWCMTRKPGA

SEQ ID NO: 16539 - protein, 815 aa, synthetic construct
MALPVTALLLPLALLLHAARPLEEDLKNVFPPEVAVFEPSEAEISHTQKATLVCLATGFYPDHVELSWWVNGKEVHSGVCTDPQPLKEQPALNDSRYCLSSRLRVSATFWQNPRNHFRCQVQFYGLSENDEWTQDRAKPVTQIVSAEAWGRADCGFTSESYQQGVLSATNLSVIGFRILLLKVAGFNLLMTLRLWSSRAKRSGSGATNFSLLKQAGDVEENPGPTSMALPVTALLLPLALLLHAARPGMRTEDLPKAVVFLEPQWYRVLEKDSVTLKCQGAYSPEDNSTQWFHNESLISSQASSYFIDAATVDDSGEYRCQTNLSTLSDPVQLEVHIGWLLLQAPRWVFKEEDPIHLRCHSWKNTALHKVTYLQNGKGRKYFHHNSDFYIPKATLKDSGSYFCRGLVGSKNVSSETVNITITQGLAVSTISSFFPPGYQTRIQNPDPAVYQLRDSKSSDKSVCLFTDFDSQTNVSQSKDSDVYITDKCVLDMRSMDFKSNSAVAWSNKSDFACANAFNNSIIPEDTFFPSPESSCDVKLVEKSFETDTNLNFQILYEVIGFRILLLKVAGFNLLMTLRLWSSRAKRSGSGVKQTLNFDLLKLAGDVESNPGPSRGHMTEYKPTVRLATRDDVPRAVRTLAAAFADYPATRHTVDPDRHIERVTELQELFLTRVGLDIGKVWVADDGAAVAVWTTPESVEAGAVFAEIGPRMAELSGSRLAAQQQMEGLLAPHRPKEPAWFLATVGVSPDHQGKGLGSAVVLPGVEAAERAGVPAFLETSAPRNLPFYERLGFTVTADVEVPEGPRTWCMTRKPGA

SEQ ID NO: 16540 - protein, 817 aa, synthetic construct
MALPVTALLLPLALLLHAARPLEEDLKNVFPPEVAVFEPSEAEISHTQKATLVCLATGFYPDHVELSWWVNGKEVHSGVCTDPQPLKEQPALNDSRYCLSSRLRVSATFWQNPRNHFRCQVQFYGLSENDEWTQDRAKPVTQIVSAEAWGRADCGFTSESYQQGVLSATNLSVIGFRILLLKVAGFNLLMTLRLWSSRAKRSGSGATNFSLLKQAGDVEENPGPTSATMALPVTALLLPLALLLHAARPGMRTEDLPKAVVFLEPQWYRVLEKDSVTLKCQGAYSPEDNSTQWFHNESLISSQASSYFIDAATVDDSGEYRCQTNLSTLSDPVQLEVHIGWLLLQAPRWVFKEEDPIHLRCHSWKNTALHKVTYLQNGKGRKYFHHNSDFYIPKATLKDSGSYFCRGLVGSKNVSSETVNITITQGLAVSTISSFFPPGYQTRIQNPDPAVYQLRDSKSSDKSVCLFTDFDSQTNVSQSKDSDVYITDKCVLDMRSMDFKSNSAVAWSNKSDFACANAFNNSIIPEDTFFPSPESSCDVKLVEKSFETDTNLNFQILYEVIGFRILLLKVAGFNLLMTLRLWSSRAKRSGSGVKQTLNFDLLKLAGDVESNPGPSRGHMTEYKPTVRLATRDDVPRAVRTLAAAFADYPATRHTVDPDRHIERVTELQELFLTRVGLDIGKVWVADDGAAVAVWTTPESVEAGAVFAEIGPRMAELSGSRLAAQQQMEGLLAPHRPKEPAWFLATVGVSPDHQGKGLGSAVVLPGVEAAERAGVPAFLETSAPRNLPFYERLGFTVTADVEVPEGPRTWCMTRKPGA

SEQ ID NO: 16541 - protein, 865 aa, synthetic construct
MALPVTALLLPLALLLHAARPLEIQNPDPAVYQLRDSKSSDKSVCLFTDFDSQTNVSQSKDSDVYITDKCVLDMRSMDFKSNSAVAWSNKSDFACANAFNNSIIPEDTFFPSPESSCDVKLVEKSFETDTNLNFQILYEVIGFRILLLKVAGFNLLMTLRLWSSRAKRSGSGATNFSLLKQAGDVEENPGPTSMALPVTALLLPLALLLHAARPDIQMTQTTSSLSASLGDRVTISCRASQDISKYLNWYQQKPDGTVKLLIYHTSRLHSGVPSRFSGSGSGTDYSLTISNLEQEDIATYFCQQGNTLPYTFGGGTKLEITGGGGSGGGGSGGGGSEVKLQESGPGLVAPSQSLSVTCTVSGVSLPDYGVSWIRQPPRKGLEWLGVIWGSETTYYNSALKSRLTIIKDNSKSQVFLKMNSLQTDDTAIYYCAKHYYYGGSYAMDYWGQGTSVTVSSTREDLKNVFPPEVAVFEPSEAEISHTQKATLVCLATGFYPDHVELSWWVNGKEVHSGVCTDPQPLKEQPALNDSRYCLSSRLRVSATFWQNPRNHFRCQVQFYGLSENDEWTQDRAKPVTQIVSAEAWGRADCGFTSESYQQGVLSATNLSVIGFRILLLKVAGFNLLMTLRLWSSRAKRSGSGVKQTLNFDLLKLAGDVESNPGPSRGHMTEYKPTVRLATRDDVPRAVRTLAAAFADYPATRHTVDPDRHIERVTELQELFLTRVGLDIGKVWVADDGAAVAVWTTPESVEAGAVFAEIGPRMAELSGSRLAAQQQMEGLLAPHRPKEPAWFLATVGVSPDHQGKGLGSAVVLPGVEAAERAGVPAFLETSAPRNLPFYERLGFTVTADVEVPEGPRTWCMTRKPGA

SEQ ID NO: 16542 - protein, 866 aa, synthetic construct
MALPVTALLLPLALLLHAARPLEIQNPDPAVYQLRDSKSSDKSVCLFTDFDSQTNVSQSKDSDVYITDKCVLDMRSMDFKSNSAVAWSNKSDFACANAFNNSIIPEDTFFPSPESSCDVKLVEKSFETDTNLNFQILYEVIGFRILLLKVAGFNLLMTLRLWSSRAKRSGSGATNFSLLKQAGDVEENPGPTSTMALPVTALLLPLALLLHAARPEIVMTQSPATLSLSPGERATLSCRASQDISKYLNWYQQKPGQAPRLLIYHTSRLHSGIPARFSGSGSGTDYTLTISSLQPEDFAVYFCQQGNTLPYTFGQGTKLEIKGGGGSGGGGSGGGGSQVQLQESGPGLVKPSETLSLTCTVSGVSLPDYGVSWIRQPPGKGLEWIGVIWGSETTYYNSSLKSRVTISKDNSKNQVSLKLSSVTAADTAVYYCAKHYYYGGSYAMDYWGQGTLVTVSSTREDLKNVFPPEVAVFEPSEAEISHTQKATLVCLATGFYPDHVELSWWVNGKEVHSGVCTDPQPLKEQPALNDSRYCLSSRLRVSATFWQNPRNHFRCQVQFYGLSENDEWTQDRAKPVTQIVSAEAWGRADCGFTSESYQQGVLSATNLSVIGFRILLLKVAGFNLLMTLRLWSSRAKRSGSGVKQTLNFDLLKLAGDVESNPGPSRGHMTEYKPTVRLATRDDVPRAVRTLAAAFADYPATRHTVDPDRHIERVTELQELFLTRVGLDIGKVWVADDGAAVAVWTTPESVEAGAVFAEIGPRMAELSGSRLAAQQQMEGLLAPHRPKEPAWFLATVGVSPDHQGKGLGSAVVLPGVEAAERAGVPAFLETSAPRNLPFYERLGFTVTADVEVPEGPRTWCMTRKPGA

SEQ ID NO: 16543 - protein, 867 aa, synthetic construct
MALPVTALLLPLALLLHAARPLEIQNPDPAVYQLRDSKSSDKSVCLFTDFDSQTNVSQSKDSDVYITDKCVLDMRSMDFKSNSAVAWSNKSDFACANAFNNSIIPEDTFFPSPESSCDVKLVEKSFETDTNLNFQILYEVIGFRILLLKVAGFNLLMTLRLWSSRAKRSGSGATNFSLLKQAGDVEENPGPTSTMALPVTALLLPLALLLHAARPDEIVLTQSPATLSLSPGERATLSCSASSSVSYMHWYQQKPGQAPRLLIYDTSKLASGIPARFSGSGSGTDFTLTISSLEPEDVAVYYCFQGSVYPFTFGQGTKLEIKRGGGGSGGGGSGGGGSQVQLQESGPGLVKPSQTLSLTCTVSGGSISTSGMGVGWIRQHPGKGLEWIGHIWWDDDKRYNPALKSRVTISVDTSKNQFSLKLSSVTAADTAVYYCARMELWSYYFDYWGQGTLVTVSSTREDLKNVFPPEVAVFEPSEAEISHTQKATLVCLATGFYPDHVELSWWVNGKEVHSGVCTDPQPLKEQPALNDSRYCLSSRLRVSATFWQNPRNHFRCQVQFYGLSENDEWTQDRAKPVTQIVSAEAWGRADCGFTSESYQQGVLSATNLSVIGFRILLLKVAGFNLLMTLRLWSSRAKRSGSGVKQTLNFDLLKLAGDVESNPGPSRGHMTEYKPTVRLATRDDVPRAVRTLAAAFADYPATRHTVDPDRHIERVTELQELFLTRVGLDIGKVWVADDGAAVAVWTTPESVEAGAVFAEIGPRMAELSGSRLAAQQQMEGLLAPHRPKEPAWFLATVGVSPDHQGKGLGSAVVLPGVEAAERAGVPAFLETSAPRNLPFYERLGFTVTADVEVPEGPRTWCMTRKPGA

SEQ ID NO: 16544 - protein, 863 aa, synthetic construct
MALPVTALLLPLALLLHAARPLEIQNPDPAVYQLRDSKSSDKSVCLFTDFDSQTNVSQSKDSDVYITDKCVLDMRSMDFKSNSAVAWSNKSDFACANAFNNSIIPEDTFFPSPESSCDVKLVEKSFETDTNLNFQILYEVIGFRILLLKVAGFNLLMTLRLWSSRAKRSGSGATNFSLLKQAGDVEENPGPTSMALPVTALLLPLALLLHAARPDIQMTQSPSSLSASVGDRVTITCRASQDISNYLNWYQQKPGKAPKLLIYYTSRLHSGVPSRFSGSGSGTDFTLTISSLQPEDFATYYCQQGNTLPYTFGQGTKVEIKRGGGGSGGGGSGGGGSEVQLVESGGGLVQPGGSLRLSCAASGFTFSDYFMSWVRQAPGKGLEWVATISNGGTYTYYPDSVKGRFTISRDNSKNTLYLQMNSLRAEDTAVYYCARFDGYIFDYWGQGTLVTVSSTREDLKNVFPPEVAVFEPSEAEISHTQKATLVCLATGFYPDHVELSWWVNGKEVHSGVCTDPQPLKEQPALNDSRYCLSSRLRVSATFWQNPRNHFRCQVQFYGLSENDEWTQDRAKPVTQIVSAEAWGRADCGFTSESYQQGVLSATNLSVIGFRILLLKVAGFNLLMTLRLWSSRAKRSGSGVKQTLNFDLLKLAGDVESNPGPSRGHMTEYKPTVRLATRDDVPRAVRTLAAAFADYPATRHTVDPDRHIERVTELQELFLTRVGLDIGKVWVADDGAAVAVWTTPESVEAGAVFAEIGPRMAELSGSRLAAQQQMEGLLAPHRPKEPAWFLATVGVSPDHQGKGLGSAVVLPGVEAAERAGVPAFLETSAPRNLPFYERLGFTVTADVEVPEGPRTWCMTRKPGA

SEQ ID NO: 16545 - protein, 867 aa, synthetic construct
MALPVTALLLPLALLLHAARPLEIQNPDPAVYQLRDSKSSDKSVCLFTDFDSQTNVSQSKDSDVYITDKCVLDMRSMDFKSNSAVAWSNKSDFACANAFNNSIIPEDTFFPSPESSCDVKLVEKSFETDTNLNFQILYEVIGFRILLLKVAGFNLLMTLRLWSSRAKRSGSGATNFSLLKQAGDVEENPGPTSMALPVTALLLPLALLLHAARPDIQMTQSPSSLSASVGDRVTITCKASDHINNWLAWYQQKPGQAPKLLIYGATTLETGVPSRFSGSGSGTDYTLTISSLQPEDFATYYCQQSWNTPWTFGQGTKLEIKRGGGGSGGGGSGGGGSQVQLQQPGAELVKPGASVKMSCKASGYAFSSYWINWMKQKPGQGLEWIGQIYPGDGDTNYNGKFKGRATLTADTSSSTAYMQLSSLTSEDSAVYFCARSITTVVGCAMDYWGQGTSVTVSSTREDLKNVFPPEVAVFEPSEAEISHTQKATLVCLATGFYPDHVELSWWVNGKEVHSGVCTDPQPLKEQPALNDSRYCLSSRLRVSATFWQNPRNHFRCQVQFYGLSENDEWTQDRAKPVTQIVSAEAWGRADCGFTSESYQQGVLSATNLSVIGFRILLLKVAGFNLLMTLRLWSSRAKRSGSGVKQTLNFDLLKLAGDVESNPGPSRGHMTEYKPTVRLATRDDVPRAVRTLAAAFADYPATRHTVDPDRHIERVTELQELFLTRVGLDIGKVWVADDGAAVAVWTTPESVEAGAVFAEIGPRMAELSGSRLAAQQQMEGLLAPHRPKEPAWFLATVGVSPDHQGKGLGSAVVLPGVEAAERAGVPAFLETSAPRNLPFYERLGFTVTADVEVPEGPRTWCMTRKPGA

SEQ ID NO: 16546 - protein, 869 aa, synthetic construct
MALPVTALLLPLALLLHAARPLEIQNPDPAVYQLRDSKSSDKSVCLFTDFDSQTNVSQSKDSDVYITDKCVLDMRSMDFKSNSAVAWSNKSDFACANAFNNSIIPEDTFFPSPESSCDVKLVEKSFETDTNLNFQILYEVIGFRILLLKVAGFNLLMTLRLWSSRAKRSGSGATNFSLLKQAGDVEENPGPTSMALPVTALLLPLALLLHAARPQIVLSQSPAILSASPGEKVTMTCRASSSVSYMHWYQQKPGSSPKPWIYATSNLASGVPARFSGSGSGTSYSFTISRVEAEDAATYYCQQWTFNPPTFGGGTRLEIKRTVAAGGGGSGGGGSGGGGSQAYLQQSGAELVRPGASVKMSCKASGYTFTSYNMHWVKQTPRQGLEWIGGIYPGNGDTSYNQKFKGKATLTVGKSSSTAYMQLSSLTSEDSAVYFCARYDYNYAMDYWGQGTSVTVSSASTREDLKNVFPPEVAVFEPSEAEISHTQKATLVCLATGFYPDHVELSWWVNGKEVHSGVCTDPQPLKEQPALNDSRYCLSSRLRVSATFWQNPRNHFRCQVQFYGLSENDEWTQDRAKPVTQIVSAEAWGRADCGFTSESYQQGVLSATNLSVIGFRILLLKVAGFNLLMTLRLWSSRAKRSGSGVKQTLNFDLLKLAGDVESNPGPSRGHMTEYKPTVRLATRDDVPRAVRTLAAAFADYPATRHTVDPDRHIERVTELQELFLTRVGLDIGKVWVADDGAAVAVWTTPESVEAGAVFAEIGPRMAELSGSRLAAQQQMEGLLAPHRPKEPAWFLATVGVSPDHQGKGLGSAVVLPGVEAAERAGVPAFLETSAPRNLPFYERLGFTVTADVEVPEGPRTWCMTRKPGA

SEQ ID NO: 16547 - protein, 867 aa, synthetic construct
MALPVTALLLPLALLLHAARPLEIQNPDPAVYQLRDSKSSDKSVCLFTDFDSQTNVSQSKDSDVYITDKCVLDMRSMDFKSNSAVAWSNKSDFACANAFNNSIIPEDTFFPSPESSCDVKLVEKSFETDTNLNFQILYEVIGFRILLLKVAGFNLLMTLRLWSSRAKRSGSGATNFSLLKQAGDVEENPGPTSMALPVTALLLPLALLLHAARPEIVLTQSPATLSLSPGERATLSCRASQSVSSYLAWYQQKPGQAPRLLIYDASNRATGIPARFSGSGSGTDFTLTISSLEPEDFAVYYCQQRSNWPITFGQGTRLEIKGGGGSGGGGSGGGGSEVQLVESGGGLVQPDRSLRLSCAASGFTFHDYAMHWVRQAPGKGLEWVSTISWNSGTIGYADSVKGRFTISRDNAKNSLYLQMNSLRAEDTALYYCAKDIQYGNYYYGMDVWGQGTTVTVSSTREDLKNVFPPEVAVFEPSEAEISHTQKATLVCLATGFYPDHVELSWWVNGKEVHSGVCTDPQPLKEQPALNDSRYCLSSRLRVSATFWQNPRNHFRCQVQFYGLSENDEWTQDRAKPVTQIVSAEAWGRADCGFTSESYQQGVLSATNLSVIGFRILLLKVAGFNLLMTLRLWSSRAKRSGSGVKQTLNFDLLKLAGDVESNPGPSRGHMTEYKPTVRLATRDDVPRAVRTLAAAFADYPATRHTVDPDRHIERVTELQELFLTRVGLDIGKVWVADDGAAVAVWTTPESVEAGAVFAEIGPRMAELSGSRLAAQQQMEGLLAPHRPKEPAWFLATVGVSPDHQGKGLGSAVVLPGVEAAERAGVPAFLETSAPRNLPFYERLGFTVTADVEVPEGPRTWCMTRKPGA

SEQ ID NO: 16548 - protein, 865 aa, synthetic construct
MALPVTALLLPLALLLHAARPLEIQNPDPAVYQLRDSKSSDKSVCLFTDFDSQTNVSQSKDSDVYITDKCVLDMRSMDFKSNSAVAWSNKSDFACANAFNNSIIPEDTFFPSPESSCDVKLVEKSFETDTNLNFQILYEVIGFRILLLKVAGFNLLMTLRLWSSRAKRSGSGATNFSLLKQAGDVEENPGPTSMALPVTALLLPLALLLHAARPDIQMTQSPSSLSASVGDRVTITCRASQDVNTAVAWYQQKPGKAPKLLIYSASFLESGVPSRFSGSRSGTDFTLTISSLQPEDFATYYCQQHYTTPPTFGQTKVEIKRGGGGSGGGGSGGGGSEVQLVESGGGLVQPGGSLRLSCAASGFNIKDTYIHWVRQAPGKGLEWVARIYPTNGYTRYADSVKGRFTISADTSKNTAYLQMNSLRAEDTAVYYCSRWGGDGFYAMDVWGQGTLVTVSSTREDLKNVFPPEVAVFEPSEAEISHTQKATLVCLATGFYPDHVELSWWVNGKEVHSGVCTDPQPLKEQPALNDSRYCLSSRLRVSATFWQNPRNHFRCQVQFYGLSENDEWTQDRAKPVTQIVSAEAWGRADCGFTSESYQQGVLSATNLSVIGFRILLLKVAGFNLLMTLRLWSSRAKRSGSGVKQTLNFDLLKLAGDVESNPGPSRGHMTEYKPTVRLATRDDVPRAVRTLAAAFADYPATRHTVDPDRHIERVTELQELFLTRVGLDIGKVWVADDGAAVAVWTTPESVEAGAVFAEIGPRMAELSGSRLAAQQQMEGLLAPHRPKEPAWFLATVGVSPDHQGKGLGSAVVLPGVEAAERAGVPAFLETSAPRNLPFYERLGFTVTADVEVPEGPRTWCMTRKPGA

SEQ ID NO: 16549 - protein, 744 aa, synthetic construct
MALPVTALLLPLALLLHAARPLEIQNPDPAVYQLRDSKSSDKSVCLFTDFDSQTNVSQSKDSDVYITDKCVLDMRSMDFKSNSAVAWSNKSDFACANAFNNSIIPEDTFFPSPESSCDVKLVEKSFETDTNLNFQILYEVIGFRILLLKVAGFNLLMTLRLWSSRAKRSGSGATNFSLLKQAGDVEENPGPTSMALPVTALLLPLALLLHAARPDEFEVQLVESGGGLVQAGGSLRLSCAASGITFSINTMGWYRQAPGKQRELVALISSIGDTYYADSVKGRFTISRDNAKNTVYLQMNSLKPEDTAVYYCKRFRTAAQGTDYWGQGTQVTVSSTREDLKNVFPPEVAVFEPSEAEISHTQKATLVCLATGFYPDHVELSWWVNGKEVHSGVCTDPQPLKEQPALNDSRYCLSSRLRVSATFWQNPRNHFRCQVQFYGLSENDEWTQDRAKPVTQIVSAEAWGRADCGFTSESYQQGVLSATNLSVIGFRILLLKVAGFNLLMTLRLWSSRAKRSGSGVKQTLNFDLLKLAGDVESNPGPSRGHMTEYKPTVRLATRDDVPRAVRTLAAAFADYPATRHTVDPDRHIERVTELQELFLTRVGLDIGKVWVADDGAAVAVWTTPESVEAGAVFAEIGPRMAELSGSRLAAQQQMEGLLAPHRPKEPAWFLATVGVSPDHQGKGLGSAVVLPGVEAAERAGVPAFLETSAPRNLPFYERLGFTVTADVEVPEGPRTWCMTRKPGA

SEQ ID NO: 16550 - protein, 744 aa, synthetic construct; identical to SEQ ID NO: 16549

SEQ ID NO: 16551 - protein, 1009 aa, synthetic construct
MALPVTALLLPLALLLHAARPLEIQNPDPAVYQLRDSKSSDKSVCLFTDFDSQTNVSQSKDSDVYITDKCVLDMRSMDFKSNSAVAWSNKSDFACANAFNNSIIPEDTFFPSPESSCDVKLVEKSFETDTNLNFQILYEVIGFRILLLKVAGFNLLMTLRLWSSRAKRSGSGATNFSLLKQAGDVEENPGPTSMALPVTALLLPLALLLHAARPQVQLVESGGGLVQAGDSVTLSCTASGRTFSSYALAWFRQRPGKEREFVAGLRWGGPTNYADSVKDRFTISGDSAKHTMYLQMNSLKPEDTAVYYCGYNPGGWAVPSQYEYDSWGQGTQVTVSSGTGGGGSGGGGSGGGGSEFDIQMTQSPSSLSASVGDRVTITCKASDHINNWLAWYQQKPGQAPKLLIYGATTLETGVPSRFSGSGSGTDYTLTISSLQPEDFATYYCQQSWNTPWTFGQGTKLEIKRGGGGSGGGGSGGGGSQVQLQQPGAELVKPGASVKMSCKASGYAFSSYWINWMKQKPGQGLEWIGQIYPGDGDTNYNGKFKGRATLTADTSSSTAYMQLSSLTSEDSAVYFCARSITTVVGCAMDYWGQGTSVTVSSTREDLKNVFPPEVAVFEPSEAEISHTQKATLVCLATGFYPDHVELSWWVNGKEVHSGVCTDPQPLKEQPALNDSRYCLSSRLRVSATFWQNPRNHFRCQVQFYGLSENDEWTQDRAKPVTQIVSAEAWGRADCGFTSESYQQGVLSATNLSVIGFRILLLKVAGFNLLMTLRLWSSRAKRSGSGVKQTLNFDLLKLAGDVESNPGPSRGHMTEYKPTVRLATRDDVPRAVRTLAAAFADYPATRHTVDPDRHIERVTELQELFLTRVGLDIGKVWVADDGAAVAVWTTPESVEAGAVFAEIGPRMAELSGSRLAAQQQMEGLLAPHRPKEPAWFLATVGVSPDHQGKGLGSAVVLPGVEAAERAGVPAFLETSAPRNLPFYERLGFTVTADVEVPEGPRTWCMTRKPGA

SEQ ID NO: 16552 - protein, 1138 aa, synthetic construct
MALPVTALLLPLALLLHAARPLEIQNPDPAVYQLRDSKSSDKSVCLFTDFDSQTNVSQSKDSDVYITDKCVLDMRSMDFKSNSAVAWSNKSDFACANAFNNSIIPEDTFFPSPESSCDVKLVEKSFETDTNLNFQILYEVIGFRILLLKVAGFNLLMTLRLWSSRAKRSGSGATNFSLLKQAGDVEENPGPTSMALPVTALLLPLALLLHAARPEVQLLESGGGLVQPGGSLRLSCAASGFTFSSYAMSWVRQAPGKGLEWVSSISGSGDYIYYADSVKGRFTISRDISKNTLYLQMNSLRAEDTAVYYCAKEGTGANSSLADYRGQGTLVTVSSGGGSGGGSQVQLVESGGGLVQAGDSVTLSCTASGRTFSSYALAWFRQRPGKEREFVAGLRWGGPTNYADSVKDRFTISGDSAKHTMYLQMNSLKPEDTAVYYCGYNPGGWAVPSQYEYDSWGQGTQVTVSSGTGGGGSGGGGSGGGGSEFDIQMTQSPSSLSASVGDRVTITCKASDHINNWLAWYQQKPGQAPKLLIYGATTLETGVPSRFSGSGSGTDYTLTISSLQPEDFATYYCQQSWNTPWTFGQGTKLEIKRGGGGSGGGGSGGGGSQVQLQQPGAELVKPGASVKMSCKASGYAFSSYWINWMKQKPGQGLEWIGQIYPGDGDTNYNGKFKGRATLTADTSSSTAYMQLSSLTSEDSAVYFCARSITTVVGCAMDYWGQGTSVTVSSTREDLKNVFPPEVAVFEPSEAEISHTQKATLVCLATGFYPDHVELSWWVNGKEVHSGVCTDPQPLKEQPALNDSRYCLSSRLRVSATFWQNPRNHFRCQVQFYGLSENDEWTQDRAKPVTQIVSAEAWGRADCGFTSESYQQGVLSATNLSVIGFRILLLKVAGFNLLMTLRLWSSRAKRSGSGVKQTLNFDLLKLAGDVESNPGPSRGHMTEYKPTVRLATRDDVPRAVRTLAAAFADYPATRHTVDPDRHIERVTELQELFLTRVGLDIGKVWVADDGAAVAVWTTPESVEAGAVFAEIGPRMAELSGSRLAAQQQMEGLLAPHRPKEPAWFLATVGVSPDHQGKGLGSAVVLPGVEAAERAGVPAFLETSAPRNLPFYERLGFTVTADVEVPEGPRTWCMTRKPGA

SEQ ID NO: 16553 - protein, 1138 aa, synthetic construct; identical to SEQ ID NO: 16552

SEQ ID NO: 16554 - protein, 750 aa, synthetic construct
MALPVTALLLPLALLLHAARPLEIQNPDPAVYQLRDSKSSDKSVCLFTDFDSQTNVSQSKDSDVYITDKCVLDMRSMDFKSNSAVAWSNKSDFACANAFNNSIIPEDTFFPSPESSCDVKLVEKSFETDTNLNFQILYEVIGFRILLLKVAGFNLLMTLRLWSSRAKRSGSGATNFSLLKQAGDVEENPGPTSMALPVTALLLPLALLLHAARPDEFGSDLGIKLLFAAAKGQDDEVRILLAAGADVNAKDFEGYTPLHVAAYDGHLEIVEVLLKAGADVNAKDSQGRTPLHEAAYSGHLEIVEVLLKAGADVNAQDDAGETPADLAAAWGHEDIAEVLQKTREDLKNVFPPEVAVFEPSEAEISHTQKATLVCLATGFYPDHVELSWWVNGKEVHSGVCTDPQPLKEQPALNDSRYCLSSRLRVSATFWQNPRNHFRCQVQFYGLSENDEWTQDRAKPVTQIVSAEAWGRADCGFTSESYQQGVLSATNLSVIGFRILLLKVAGFNLLMTLRLWSSRAKRSGSGVKQTLNFDLLKLAGDVESNPGPSRGHMTEYKPTVRLATRDDVPRAVRTLAAAFADYPATRHTVDPDRHIERVTELQELFLTRVGLDIGKVWVADDGAAVAVWTTPESVEAGAVFAEIGPRMAELSGSRLAAQQQMEGLLAPHRPKEPAWFLATVGVSPDHQGKGLGSAVVLPGVEAAERAGVPAFLETSAPRNLPFYERLGFTVTADVEVPEGPRTWCMTRKPGA

SEQ ID NO: 16555 - protein, 679 aa, synthetic construct
MALPVTALLLPLALLLHAARPLEIQNPDPAVYQLRDSKSSDKSVCLFTDFDSQTNVSQSKDSDVYITDKCVLDMRSMDFKSNSAVAWSNKSDFACANAFNNSIIPEDTFFPSPESSCDVKLVEKSFETDTNLNFQILYEVIGFRILLLKVAGFNLLMTLRLWSSRAKRSGSGATNFSLLKQAGDVEENPGPTSMDWIWRILFLVGAATGAHSFEGSGFEYAKEMRNAYWEIALLPNLTNQQKRAPIRKLYDDPSQSSELLSEAKKLNDSQTREDLKNVFPPEVAVFEPSEAEISHTQKATLVCLATGFYPDHVELSWWVNGKEVHSGVCTDPQPLKEQPALNDSRYCLSSRLRVSATFWQNPRNHFRCQVQFYGLSENDEWTQDRAKPVTQIVSAEAWGRADCGFTSESYQQGVLSATNLSVIGFRILLLKVAGFNLLMTLRLWSSRAKRSGSGVKQTLNFDLLKLAGDVESNPGPSRGHMTEYKPTVRLATRDDVPRAVRTLAAAFADYPATRHTVDPDRHIERVTELQELFLTRVGLDIGKVWVADDGAAVAVWTTPESVEAGAVFAEIGPRMAELSGSRLAAQQQMEGLLAPHRPKEPAWFLATVGVSPDHQGKGLGSAVVLPGVEAAERAGVPAFLETSAPRNLPFYERLGFTVTADVEVPEGPRTWCMTRKPGA

SEQ ID NO: 16556 - protein, 901 aa, synthetic construct
MALPVTALLLPLALLLHAARPLEIQNPDPAVYQLRDSKSSDKSVCLFTDFDSQTNVSQSKDSDVYITDKCVLDMRSMDFKSNSAVAWSNKSDFACANAFNNSIIPEDTFFPSPESSCDVKLVEKSFETDTNLNFQILYEVIGFRILLLKVAGFNLLMTLRLWSSRAKRSGSGATNFSLLKQAGDVEENPGPTSMALPVTALLLPLALLLHAARPDEFEVQLVESGGGLVQAGGSLRLSCAASGITFSINTMGWYRQAPGKQRELVALISSIGDTYYADSVKGRFTISRDNAKNTVYLQMNSLKPEDTAVYYCKRFRTAAQGTDYWGQGTQVTVSSLEGGGGSGGGGSGGGGSGSGGSGSGGSGSGGSGSGGSFEVQLVESGGGLVQPGGSLRLSCAASGSIFGFNDMAWYRQAPGKQRELVALISRVGVTSSADSVKGRFTISRVNAKDTVYLQMNSLKPEDTAVYYCYMDQRLDGSTLAYWGQGTQVTVSSTREDLKNVFPPEVAVFEPSEAEISHTQKATLVCLATGFYPDHVELSWWVNGKEVHSGVCTDPQPLKEQPALNDSRYCLSSRLRVSATFWQNPRNHFRCQVQFYGLSENDEWTQDRAKPVTQIVSAEAWGRADCGFTSESYQQGVLSATNLSVIGFRILLLKVAGFNLLMTLRLWSSRAKRSGSGVKQTLNFDLLKLAGDVESNPGPSRGHMTEYKPTVRLATRDDVPRAVRTLAAAFADYPATRHTVDPDRHIERVTELQELFLTRVGLDIGKVWVADDGAAVAVWTTPESVEAGAVFAEIGPRMAELSGSRLAAQQQMEGLLAPHRPKEPAWFLATVGVSPDHQGKGLGSAVVLPGVEAAERAGVPAFLETSAPRNLPFYERLGFTVTADVEVPEGPRTWCMTRKPGA

SEQ ID NO: 16557 - protein, 815 aa, synthetic construct
MALPVTALLLPLALLLHAARPLEIQNPDPAVYQLRDSKSSDKSVCLFTDFDSQTNVSQSKDSDVYITDKCVLDMRSMDFKSNSAVAWSNKSDFACANAFNNSIIPEDTFFPSPESSCDVKLVEKSFETDTNLNFQILYEVIGFRILLLKVAGFNLLMTLRLWSSRAKRSGSGATNFSLLKQAGDVEENPGPTSMALPVTALLLPLALLLHAARPGMRTEDLPKAVVFLEPQWYRVLEKDSVTLKCQGAYSPEDNSTQWFHNESLISSQASSYFIDAATVDDSGEYRCQTNLSTLSDPVQLEVHIGWLLLQAPRWVFKEEDPIHLRCHSWKNTALHKVTYLQNGKGRKYFHHNSDFYIPKATLKDSGSYFCRGLVGSKNVSSETVNITITQGLAVSTISSFFPPGYQTREDLKNVFPPEVAVFEPSEAEISHTQKATLVCLATGFYPDHVELSWWVNGKEVHSGVCTDPQPLKEQPALNDSRYCLSSRLRVSATFWQNPRNHFRCQVQFYGLSENDEWTQDRAKPVTQIVSAEAWGRADCGFTSESYQQGVLSATNLSVIGFRILLLKVAGFNLLMTLRLWSSRAKRSGSGVKQTLNFDLLKLAGDVESNPGPSRGHMTEYKPTVRLATRDDVPRAVRTLAAAFADYPATRHTVDPDRHIERVTELQELFLTRVGLDIGKVWVADDGAAVAVWTTPESVEAGAVFAEIGPRMAELSGSRLAAQQQMEGLLAPHRPKEPAWFLATVGVSPDHQGKGLGSAVVLPGVEAAERAGVPAFLETSAPRNLPFYERLGFTVTADVEVPEGPRTWCMTRKPGA

SEQ ID NO: 16558 - protein, 817 aa, synthetic construct
MALPVTALLLPLALLLHAARPLEIQNPDPAVYQLRDSKSSDKSVCLFTDFDSQTNVSQSKDSDVYITDKCVLDMRSMDFKSNSAVAWSNKSDFACANAFNNSIIPEDTFFPSPESSCDVKLVEKSFETDTNLNFQILYEVIGFRILLLKVAGFNLLMTLRLWSSRAKRSGSGATNFSLLKQAGDVEENPGPTSATMALPVTALLLPLALLLHAARPGMRTEDLPKAVVFLEPQWYRVLEKDSVTLKCQGAYSPEDNSTQWFHNESLISSQASSYFIDAATVDDSGEYRCQTNLSTLSDPVQLEVHIGWLLLQAPRWVFKEEDPIHLRCHSWKNTALHKVTYLQNGKGRKYFHHNSDFYIPKATLKDSGSYFCRGLVGSKNVSSETVNITITQGLAVSTISSFFPPGYQTREDLKNVFPPEVAVFEPSEAEISHTQKATLVCLATGFYPDHVELSWWVNGKEVHSGVCTDPQPLKEQPALNDSRYCLSSRLRVSATFWQNPRNHFRCQVQFYGLSENDEWTQDRAKPVTQIVSAEAWGRADCGFTSESYQQGVLSATNLSVIGFRILLLKVAGFNLLMTLRLWSSRAKRSGSGVKQTLNFDLLKLAGDVESNPGPSRGHMTEYKPTVRLATRDDVPRAVRTLAAAFADYPATRHTVDPDRHIERVTELQELFLTRVGLDIGKVWVADDGAAVAVWTTPESVEAGAVFAEIGPRMAELSGSRLAAQQQMEGLLAPHRPKEPAWFLATVGVSPDHQGKGLGSAVVLPGVEAAERAGVPAFLETSAPRNLPFYERLGFTVTADVEVPEGPRTWCMTRKPGA

SEQ ID NO: 16559 - protein, 865 aa, synthetic construct; identical to SEQ ID NO: 16523

SEQ ID NO: 16560 - protein, 866 aa, synthetic construct; identical to SEQ ID NO: 16524

SEQ ID NO: 16561 - protein, 867 aa, synthetic construct; identical to SEQ ID NO: 16525

SEQ ID NO: 16562 - protein, 863 aa, synthetic construct; identical to SEQ ID NO: 16526

SEQ ID NO: 16563 - protein, 867 aa, synthetic construct; identical to SEQ ID NO: 16527

SEQ ID NO: 16564 - protein, 869 aa, synthetic construct; identical to SEQ ID NO: 16528

SEQ ID NO: 16565 - protein, 867 aa, synthetic construct; identical to SEQ ID NO: 16529

SEQ ID NO: 16566 - protein, 865 aa, synthetic construct; identical to SEQ ID NO: 16530

SEQ ID NO: 16567 - protein, 744 aa, synthetic construct; identical to SEQ ID NO: 16531

SEQ ID NO: 16568 - protein, 744 aa, synthetic construct; identical to SEQ ID NO: 16531

SEQ ID NO: 16569 - protein, 1009 aa, synthetic construct; identical to SEQ ID NO: 16533

SEQ ID NO: 16570 - protein, 1138 aa, synthetic construct; identical to SEQ ID NO: 16534

SEQ ID NO: 16571 - protein, 1138 aa, synthetic construct; identical to SEQ ID NO: 16534

SEQ ID NO: 16572 - protein, 750 aa, synthetic construct; identical to SEQ ID NO: 16536

SEQ ID NO: 16573 - protein, 679 aa, synthetic construct; identical to SEQ ID NO: 16537

SEQ ID NO: 16574 - protein, 901 aa, synthetic construct; identical to SEQ ID NO: 16538

SEQ ID NO: 16575 - protein, 815 aa, synthetic construct; identical to SEQ ID NO: 16539

SEQ ID NO: 16576 - protein, 817 aa, synthetic construct; identical to SEQ ID NO: 16540

SEQ ID NO: 16577 - protein, 865 aa, synthetic construct; identical to SEQ ID NO: 16541

SEQ ID NO: 16578 - protein, 866 aa, synthetic construct; identical to SEQ ID NO: 16542

SEQ ID NO: 16579 - protein, 867 aa, synthetic construct; identical to SEQ ID NO: 16543

SEQ ID NO: 16580 - protein, 863 aa, synthetic construct; identical to SEQ ID NO: 16544

SEQ ID NO: 16581 - protein, 867 aa, synthetic construct; identical to SEQ ID NO: 16545

SEQ ID NO: 16582 - protein, 869 aa, synthetic construct; identical to SEQ ID NO: 16546

SEQ ID NO: 16583 - protein, 867 aa, synthetic construct; identical to SEQ ID NO: 16547

SEQ ID NO: 16584 - protein, 865 aa, synthetic construct; identical to SEQ ID NO: 16548

SEQ ID NO: 16585 - protein, 744 aa, synthetic construct; identical to SEQ ID NO: 16549

SEQ ID NO: 16586 - protein, 744 aa, synthetic construct; identical to SEQ ID NO: 16549

SEQ ID NO: 16587 - protein, 1009 aa, synthetic construct; identical to SEQ ID NO: 16551

SEQ ID NO: 16588 - protein, 1138 aa, synthetic construct; identical to SEQ ID NO: 16552

SEQ ID NO: 16589 - protein, 1138 aa, synthetic construct; identical to SEQ ID NO: 16552

SEQ ID NO: 16590 - protein, 750 aa, synthetic construct; identical to SEQ ID NO: 16554

SEQ ID NO: 16591 - protein, 679 aa, synthetic construct; identical to SEQ ID NO: 16555

SEQ ID NO: 16592 - protein, 901 aa, synthetic construct; identical to SEQ ID NO: 16556

SEQ ID NO: 16593 - protein, 815 aa, synthetic construct; identical to SEQ ID NO: 16557

SEQ ID NO: 16594 - protein, 817 aa, synthetic construct; identical to SEQ ID NO: 16558

SEQ ID NO: 16595 - protein, 857 aa, synthetic construct
MALPVTALLLPLALLLHAARPLEEDLKNVFPPEVAVFEPSEAEISHTQKATLVCLATGFYPDHVELSWWVNGKEVHSGVSTDPQPLKEQPALNDSRYCLSSRLRVSATFWQNPRNHFRCQVQFYGLSENDEWTQDRAKPVTQIVSAEAWGRADCDVKLVEKSFETDTNLNFQNLSVIGFRILLLKVAGFNLLMTLRLWSSRAKRSGSGATNFSLLKQAGDVEENPGPTSMALPVTALLLPLALLLHAARPDIQMTQTTSSLSASLGDRVTISCRASQDISKYLNWYQQKPDGTVKLLIYHTSRLHSGVPSRFSGSGSGTDYSLTISNLEQEDIATYFCQQGNTLPYTFGGGTKLEITGGGGSGGGGSGGGGSEVKLQESGPGLVAPSQSLSVTCTVSGVSLPDYGVSWIRQPPRKGLEWLGVIWGSETTYYNSALKSRLTIIKDNSKSQVFLKMNSLQTDDTAIYYCAKHYYYGGSYAMDYWGQGTSVTVSSTRIQNPDPAVYQLRDSKSSDKSVCLFTDFDSQTNVSQSKDSDVYITDKTVLDMRSMDFKSNSAVAWSNKSDFACANAFNNSIIPEDTFFPSPESSCGFTSESYQQGVLSATILYETASASESCCKWPALTCPCGCGPAAPREADLASRPISTCSWLATWNPTQALLEAIPSTSPRCASPPATTSPGPYAPSPPRSPTTPPRATPSIRTATSSGSPSCKNSSSRASGSTSARCGSRTTAPRWRSGPRRRASKRGRCSPRSARAWPSAVPGWPRSNRWKASWRRTGPRSPRGSWPPSASRPTTRARVWAAPSCSPEWRRPSAPGCPPSWRPPRPATSPSTSGSASPSPPTSRCPKDRAPGAPASPVP

SEQ ID NO: 16596 - protein, 858 aa, synthetic construct
MALPVTALLLPLALLLHAARPLEEDLKNVFPPEVAVFEPSEAEISHTQKATLVCLATGFYPDHVELSWWVNGKEVHSGVSTDPQPLKEQPALNDSRYCLSSRLRVSATFWQNPRNHFRCQVQFYGLSENDEWTQDRAKPVTQIVSAEAWGRADCDVKLVEKSFETDTNLNFQNLSVIGFRILLLKVAGFNLLMTLRLWSSRAKRSGSGATNFSLLKQAGDVEENPGPTSTMALPVTALLLPLALLLHAARPEIVMTQSPATLSLSPGERATLSCRASQDISKYLNWYQQKPGQAPRLLIYHTSRLHSGIPARFSGSGSGTDYTLTISSLQPEDFAVYFCQQGNTLPYTFGQGTKLEIKGGGGSGGGGSGGGGSQVQLQESGPGLVKPSETLSLTCTVSGVSLPDYGVSWIRQPPGKGLEWIGVIWGSETTYYNSSLKSRVTISKDNSKNQVSLKLSSVTAADTAVYYCAKHYYYGGSYAMDYWGQGTLVTVSSTRIQNPDPAVYQLRDSKSSDKSVCLFTDFDSQTNVSQSKDSDVYITDKTVLDMRSMDFKSNSAVAWSNKSDFACANAFNNSIIPEDTFFPSPESSCGFTSESYQQGVLSATILYETASASESCCKWPALTCPCGCGPAAPREADLASRPISTCSWLATWNPTQALLEAIPSTSPRCASPPATTSPGPYAPSPPRSPTTPPRATPSIRTATSSGSPSCKNSSSRASGSTSARCGSRTTAPRWRSGPRRRASKRGRCSPRSARAWPSAVPGWPRSNRWKASWRRTGPRSPRGSWPPSASRPTTRARVWAAPSCSPEWRRPSAPGCPPSWRPPRPATSPSTSGSASPSPPTSRCPKDRAPGAPASPVP

SEQ ID NO: 16597 - protein, 859 aa, synthetic construct
MALPVTALLLPLALLLHAARPLEEDLKNVFPPEVAVFEPSEAEISHTQKATLVCLATGFYPDHVELSWWVNGKEVHSGVSTDPQPLKEQPALNDSRYCLSSRLRVSATFWQNPRNHFRCQVQFYGLSENDEWTQDRAKPVTQIVSAEAWGRADCDVKLVEKSFETDTNLNFQNLSVIGFRILLLKVAGFNLLMTLRLWSSRAKRSGSGATNFSLLKQAGDVEENPGPTSTMALPVTALLLPLALLLHAARPDEIVLTQSPATLSLSPGERATLSCSASSSVSYMHWYQQKPGQAPRLLIYDTSKLASGIPARFSGSGSGTDFTLTISSLEPEDVAVYYCFQGSVYPFTFGQGTKLEIKRGGGGSGGGGSGGGGSQVQLQESGPGLVKPSQTLSLTCTVSGGSISTSGMGVGWIRQHPGKGLEWIGHIWWDDDKRYNPALKSRVTISVDTSKNQFSLKLSSVTAADTAVYYCARMELWSYYFDYWGQGTLVTVSSTRIQNPDPAVYQLRDSKSSDKSVCLFTDFDSQTNVSQSKDSDVYITDKTVLDMRSMDFKSNSAVAWSNKSDFACANAFNNSIIPEDTFFPSPESSCGFTSESYQQGVLSATILYETASASESCCKWPALTCPCGCGPAAPREADLASRPISTCSWLATWNPTQALLEAIPSTSPRCASPPATTSPGPYAPSPPRSPTTPPRATPSIRTATSSGSPSCKNSSSRASGSTSARCGSRTTAPRWRSGPRRRASKRGRCSPRSARAWPSAVPGWPRSNRWKASWRRTGPRSPRGSWPPSASRPTTRARVWAAPSCSPEWRRPSAPGCPPSWRPPRPATSPSTSGSASPSPPTSRCPKDRAPGAPASPVP

SEQ ID NO: 16598 - protein, 855 aa, synthetic construct
MALPVTALLLPLALLLHAARPLEEDLKNVFPPEVAVFEPSEAEISHTQKATLVCLATGFYPDHVELSWWVNGKEVHSGVSTDPQPLKEQPALNDSRYCLSSRLRVSATFWQNPRNHFRCQVQFYGLSENDEWTQDRAKPVTQIVSAEAWGRADCDVKLVEKSFETDTNLNFQNLSVIGFRILLLKVAGFNLLMTLRLWSSRAKRSGSGATNFSLLKQAGDVEENPGPTSMALPVTALLLPLALLLHAARPDIQMTQSPSSLSASVGDRVTITCRASQDISNYLNWYQQKPGKAPKLLIYYTSRLHSGVPSRFSGSGSGTDFTLTISSLQPEDFATYYCQQGNTLPYTFGQGTKVEIKRGGGGSGGGGSGGGGSEVQLVESGGGLVQPGGSLRLSCAASGFTFSDYFMSWVRQAPGKGLEWVATISNGGTYTYYPDSVKGRFTISRDNSKNTLYLQMNSLRAEDTAVYYCARFDGYIFDYWGQGTLVTVSSTRIQNPDPAVYQLRDSKSSDKSVCLFTDFDSQTNVSQSKDSDVYITDKTVLDMRSMDFKSNSAVAWSNKSDFACANAFNNSIIPEDTFFPSPESSCGFTSESYQQGVLSATILYETASASESCCKWPALTCPCGCGPAAPREADLASRPISTCSWLATWNPTQALLEAIPSTSPRCASPPATTSPGPYAPSPPRSPTTPPRATPSIRTATSSGSPSCKNSSSRASGSTSARCGSRTTAPRWRSGPRRRASKRGRCSPRSARAWPSAVPGWPRSNRWKASWRRTGPRSPRGSWPPSASRPTTRARVWAAPSCSPEWRRPSAPGCPPSWRPPRPATSPSTSGSASPSPPTSRCPKDRAPGAPASPVP

SEQ ID NO: 16599 - protein, 859 aa, synthetic construct
MALPVTALLLPLALLLHAARPLEEDLKNVFPPEVAVFEPSEAEISHTQKATLVCLATGFYPDHVELSWWVNGKEVHSGVSTDPQPLKEQPALNDSRYCLSSRLRVSATFWQNPRNHFRCQVQFYGLSENDEWTQDRAKPVTQIVSAEAWGRADCDVKLVEKSFETDTNLNFQNLSVIGFRILLLKVAGFNLLMTLRLWSSRAKRSGSGATNFSLLKQAGDVEENPGPTSMALPVTALLLPLALLLHAARPDIQMTQSPSSLSASVGDRVTITCKASDHINNWLAWYQQKPGQAPKLLIYGATTLETGVPSRFSGSGSGTDYTLTISSLQPEDFATYYCQQSWNTPWTFGQGTKLEIKRGGGGSGGGGSGGGGSQVQLQQPGAELVKPGASVKMSCKASGYAFSSYWINWMKQKPGQGLEWIGQIYPGDGDTNYNGKFKGRATLTADTSSSTAYMQLSSLTSEDSAVYFCARSITTVVGCAMDYWGQGTSVTVSSTRIQNPDPAVYQLRDSKSSDKSVCLFTDFDSQTNVSQSKDSDVYITDKTVLDMRSMDFKSNSAVAWSNKSDFACANAFNNSIIPEDTFFPSPESSCGFTSESYQQGVLSATILYETASASESCCKWPALTCPCGCGPAAPREADLASRPISTCSWLATWNPTQALLEAIPSTSPRCASPPATTSPGPYAPSPPRSPTTPPRATPSIRTATSSGSPSCKNSSSRASGSTSARCGSRTTAPRWRSGPRRRASKRGRCSPRSARAWPSAVPGWPRSNRWKASWRRTGPRSPRGSWPPSASRPTTRARVWAAPSCSPEWRRPSAPGCPPSWRPPRPATSPSTSGSASPSPPTSRCPKDRAPGAPASPVP

SEQ ID NO: 16600 - protein, 861 aa, synthetic construct
MALPVTALLLPLALLLHAARPLEEDLKNVFPPEVAVFEPSEAEISHTQKATLVCLATGFYPDHVELSWWVNGKEVHSGVSTDPQPLKEQPALNDSRYCLSSRLRVSATFWQNPRNHFRCQVQFYGLSENDEWTQDRAKPVTQIVSAEAWGRADCDVKLVEKSFETDTNLNFQNLSVIGFRILLLKVAGFNLLMTLRLWSSRAKRSGSGATNFSLLKQAGDVEENPGPTSMALPVTALLLPLALLLHAARPQIVLSQSPAILSASPGEKVTMTCRASSSVSYMHWYQQKPGSSPKPWIYATSNLASGVPARFSGSGSGTSYSFTISRVEAEDAATYYCQQWTFNPPTFGGGTRLEIKRTVAAGGGGSGGGGSGGGGSQAYLQQSGAELVRPGASVKMSCKASGYTFTSYNMHWVKQTPRQGLEWIGGIYPGNGDTSYNQKFKGKATLTVGKSSSTAYMQLSSLTSEDSAVYFCARYDYNYAMDYWGQGTSVTVSSASTRIQNPDPAVYQLRDSKSSDKSVCLFTDFDSQTNVSQSKDSDVYITDKTVLDMRSMDFKSNSAVAWSNKSDFACANAFNNSIIPEDTFFPSPESSCGFTSESYQQGVLSATILYETASASESCCKWPALTCPCGCGPAAPREADLASRPISTCSWLATWNPTQALLEAIPSTSPRCASPPATTSPGPYAPSPPRSPTTPPRATPSIRTATSSGSPSCKNSSSRASGSTSARCGSRTTAPRWRSGPRRRASKRGRCSPRSARAWPSAVPGWPRSNRWKASWRRTGPRSPRGSWPPSASRPTTRARVWAAPSCSPEWRRPSAPGCPPSWRPPRPATSPSTSGSASPSPPTSRCPKDRAPGAPASPVP

SEQ ID NO: 16601 - protein, 859 aa, synthetic construct
MALPVTALLLPLALLLHAARPLEEDLKNVFPPEVAVFEPSEAEISHTQKATLVCLATGFYPDHVELSWWVNGKEVHSGVSTDPQPLKEQPALNDSRYCLSSRLRVSATFWQNPRNHFRCQVQFYGLSENDEWTQDRAKPVTQIVSAEAWGRADCDVKLVEKSFETDTNLNFQNLSVIGFRILLLKVAGFNLLMTLRLWSSRAKRSGSGATNFSLLKQAGDVEENPGPTSMALPVTALLLPLALLLHAARPEIVLTQSPATLSLSPGERATLSCRASQSVSSYLAWYQQKPGQAPRLLIYDASNRATGIPARFSGSGSGTDFTLTISSLEPEDFAVYYCQQRSNWPITFGQGTRLEIKGGGGSGGGGSGGGGSEVQLVESGGGLVQPDRSLRLSCAASGFTFHDYAMHWVRQAPGKGLEWVSTISWNSGTIGYADSVKGRFTISRDNAKNSLYLQMNSLRAEDTALYYCAKDIQYGNYYYGMDVWGQGTTVTVSSTRIQNPDPAVYQLRDSKSSDKSVCLFTDFDSQTNVSQSKDSDVYITDKTVLDMRSMDFKSNSAVAWSNKSDFACANAFNNSIIPEDTFFPSPESSCGFTSESYQQGVLSATILYETASASESCCKWPALTCPCGCGPAAPREADLASRPISTCSWLATWNPTQALLEAIPSTSPRCASPPATTSPGPYAPSPPRSPTTPPRATPSIRTATSSGSPSCKNSSSRASGSTSARCGSRTTAPRWRSGPRRRASKRGRCSPRSARAWPSAVPGWPRSNRWKASWRRTGPRSPRGSWPPSASRPTTRARVWAAPSCSPEWRRPSAPGCPPSWRPPRPATSPSTSGSASPSPPTSRCPKDRAPGAPASPVP

SEQ ID NO: 16602 - protein, 857 aa, synthetic construct
MALPVTALLLPLALLLHAARPLEEDLKNVFPPEVAVFEPSEAEISHTQKATLVCLATGFYPDHVELSWWVNGKEVHSGVSTDPQPLKEQPALNDSRYCLSSRLRVSATFWQNPRNHFRCQVQFYGLSENDEWTQDRAKPVTQIVSAEAWGRADCDVKLVEKSFETDTNLNFQNLSVIGFRILLLKVAGFNLLMTLRLWSSRAKRSGSGATNFSLLKQAGDVEENPGPTSMALPVTALLLPLALLLHAARPDIQMTQSPSSLSASVGDRVTITCRASQDVNTAVAWYQQKPGKAPKLLIYSASFLESGVPSRFSGSRSGTDFTLTISSLQPEDFATYYCQQHYTTPPTFGQTKVEIKRGGGGSGGGGSGGGGSEVQLVESGGGLVQPGGSLRLSCAASGFNIKDTYIHWVRQAPGKGLEWVARIYPTNGYTRYADSVKGRFTISADTSKNTAYLQMNSLRAEDTAVYYCSRWGGDGFYAMDVWGQGTLVTVSSTRIQNPDPAVYQLRDSKSSDKSVCLFTDFDSQTNVSQSKDSDVYITDKTVLDMRSMDFKSNSAVAWSNKSDFACANAFNNSIIPEDTFFPSPESSCGFTSESYQQGVLSATILYETASASESCCKWPALTCPCGCGPAAPREADLASRPISTCSWLATWNPTQALLEAIPSTSPRCASPPATTSPGPYAPSPPRSPTTPPRATPSIRTATSSGSPSCKNSSSRASGSTSARCGSRTTAPRWRSGPRRRASKRGRCSPRSARAWPSAVPGWPRSNRWKASWRRTGPRSPRGSWPPSASRPTTRARVWAAPSCSPEWRRPSAPGCPPSWRPPRPATSPSTSGSASPSPPTSRCPKDRAPGAPASPVP

SEQ ID NO: 16603 - protein, 736 aa, synthetic construct
MALPVTALLLPLALLLHAARPLEEDLKNVFPPEVAVFEPSEAEISHTQKATLVCLATGFYPDHVELSWWVNGKEVHSGVSTDPQPLKEQPALNDSRYCLSSRLRVSATFWQNPRNHFRCQVQFYGLSENDEWTQDRAKPVTQIVSAEAWGRADCDVKLVEKSFETDTNLNFQNLSVIGFRILLLKVAGFNLLMTLRLWSSRAKRSGSGATNFSLLKQAGDVEENPGPTSMALPVTALLLPLALLLHAARPDEFEVQLVESGGGLVQAGGSLRLSCAASGITFSINTMGWYRQAPGKQRELVALISSIGDTYYADSVKGRFTISRDNAKNTVYLQMNSLKPEDTAVYYCKRFRTAAQGTDYWGQGTQVTVSSTRIQNPDPAVYQLRDSKSSDKSVCLFTDFDSQTNVSQSKDSDVYITDKTVLDMRSMDFKSNSAVAWSNKSDFACANAFNNSIIPEDTFFPSPESSCGFTSESYQQGVLSATILYETASASESCCKWPALTCPCGCGPAAPREADLASRPISTCSWLATWNPTQALLEAIPSTSPRCASPPATTSPGPYAPSPPRSPTTPPRATPSIRTATSSGSPSCKNSSSRASGSTSARCGSRTTAPRWRSGPRRRASKRGRCSPRSARAWPSAVPGWPRSNRWKASWRRTGPRSPRGSWPPSASRPTTRARVWAAPSCSPEWRRPSAPGCPPSWRPPRPATSPSTSGSASPSPPTSRCPKDRAPGAPASPVP

SEQ ID NO: 16604 - protein, 736 aa, synthetic construct; identical to SEQ ID NO: 16603

SEQ ID NO: 16605 - protein, 1001 aa, synthetic construct
MALPVTALLLPLALLLHAARPLEEDLKNVFPPEVAVFEPSEAEISHTQKATLVCLATGFYPDHVELSWWVNGKEVHSGVSTDPQPLKEQPALNDSRYCLSSRLRVSATFWQNPRNHFRCQVQFYGLSENDEWTQDRAKPVTQIVSAEAWGRADCDVKLVEKSFETDTNLNFQNLSVIGFRILLLKVAGFNLLMTLRLWSSRAKRSGSGATNFSLLKQAGDVEENPGPTSMALPVTALLLPLALLLHAARPQVQLVESGGGLVQAGDSVTLSCTASGRTFSSYALAWFRQRPGKEREFVAGLRWGGPTNYADSVKDRFTISGDSAKHTMYLQMNSLKPEDTAVYYCGYNPGGWAVPSQYEYDSWGQGTQVTVSSGTGGGGSGGGGSGGGGSEFDIQMTQSPSSLSASVGDRVTITCKASDHINNWLAWYQQKPGQAPKLLIYGATTLETGVPSRFSGSGSGTDYTLTISSLQPEDFATYYCQQSWNTPWTFGQGTKLEIKRGGGGSGGGGSGGGGSQVQLQQPGAELVKPGASVKMSCKASGYAFSSYWINWMKQKPGQGLEWIGQIYPGDGDTNYNGKFKGRATLTADTSSSTAYMQLSSLTSEDSAVYFCARSITTVVGCAMDYWGQGTSVTVSSTRIQNPDPAVYQLRDSKSSDKSVCLFTDFDSQTNVSQSKDSDVYITDKTVLDMRSMDFKSNSAVAWSNKSDFACANAFNNSIIPEDTFFPSPESSCGFTSESYQQGVLSATILYETASASESCCKWPALTCPCGCGPAAPREADLASRPISTCSWLATWNPTQALLEAIPSTSPRCASPPATTSPGPYAPSPPRSPTTPPRATPSIRTATSSGSPSCKNSSSRASGSTSARCGSRTTAPRWRSGPRRRASKRGRCSPRSARAWPSAVPGWPRSNRWKASWRRTGPRSPRGSWPPSASRPTTRARVWAAPSCSPEWRRPSAPGCPPSWRPPRPATSPSTSGSASPSPPTSRCPKDRAPGAPASPVP

SEQ ID NO: 16606 - protein, 1130 aa, synthetic construct
MALPVTALLLPLALLLHAARPLEEDLKNVFPPEVAVFEPSEAEISHTQKATLVCLATGFYPDHVELSWWVNGKEVHSGVSTDPQPLKEQPALNDSRYCLSSRLRVSATFWQNPRNHFRCQVQFYGLSENDEWTQDRAKPVTQIVSAEAWGRADCDVKLVEKSFETDTNLNFQNLSVIGFRILLLKVAGFNLLMTLRLWSSRAKRSGSGATNFSLLKQAGDVEENPGPTSMALPVTALLLPLALLLHAARPEVQLLESGGGLVQPGGSLRLSCAASGFTFSSYAMSWVRQAPGKGLEWVSSISGSGDYIYYADSVKGRFTISRDISKNTLYLQMNSLRAEDTAVYYCAKEGTGANSSLADYRGQGTLVTVSSGGGSGGGSQVQLVESGGGLVQAGDSVTLSCTASGRTFSSYALAWFRQRPGKEREFVAGLRWGGPTNYADSVKDRFTISGDSAKHTMYLQMNSLKPEDTAVYYCGYNPGGWAVPSQYEYDSWGQGTQVTVSSGTGGGGSGGGGSGGGGSEFDIQMTQSPSSLSASVGDRVTITCKASDHINNWLAWYQQKPGQAPKLLIYGATTLETGVPSRFSGSGSGTDYTLTISSLQPEDFATYYCQQSWNTPWTFGQGTKLEIKRGGGGSGGGGSGGGGSQVQLQQPGAELVKPGASVKMSCKASGYAFSSYWINWMKQKPGQGLEWIGQIYPGDGDTNYNGKFKGRATLTADTSSSTAYMQLSSLTSEDSAVYFCARSITTVVGCAMDYWGQGTSVTVSSTRIQNPDPAVYQLRDSKSSDKSVCLFTDFDSQTNVSQSKDSDVYITDKTVLDMRSMDFKSNSAVAWSNKSDFACANAFNNSIIPEDTFFPSPESSCGFTSESYQQGVLSATILYETASASESCCKWPALTCPCGCGPAAPREADLASRPISTCSWLATWNPTQALLEAIPSTSPRCASPPATTSPGPYAPSPPRSPTTPPRATPSIRTATSSGSPSCKNSSSRASGSTSARCGSRTTAPRWRSGPRRRASKRGRCSPRSARAWPSAVPGWPRSNRWKASWRRTGPRSPRGSWPPSASRPTTRARVWAAPSCSPEWRRPSAPGCPPSWRPPRPATSPSTSGSASPSPPTSRCPKDRAPGAPASPVP

SEQ ID NO: 16607 - protein, 1130 aa, synthetic construct; identical to SEQ ID NO: 16606

SEQ ID NO: 16608 - protein, 742 aa, synthetic construct
MALPVTALLLPLALLLHAARPLEEDLKNVFPPEVAVFEPSEAEISHTQKATLVCLATGFYPDHVELSWWVNGKEVHSGVSTDPQPLKEQPALNDSRYCLSSRLRVSATFWQNPRNHFRCQVQFYGLSENDEWTQDRAKPVTQIVSAEAWGRADCDVKLVEKSFETDTNLNFQNLSVIGFRILLLKVAGFNLLMTLRLWSSRAKRSGSGATNFSLLKQAGDVEENPGPTSMALPVTALLLPLALLLHAARPDEFGSDLGIKLLFAAAKGQDDEVRILLAAGADVNAKDFEGYTPLHVAAYDGHLEIVEVLLKAGADVNAKDSQGRTPLHEAAYSGHLEIVEVLLKAGADVNAQDDAGETPADLAAAWGHEDIAEVLQKTRIQNPDPAVYQLRDSKSSDKSVCLFTDFDSQTNVSQSKDSDVYITDKTVLDMRSMDFKSNSAVAWSNKSDFACANAFNNSIIPEDTFFPSPESSCGFTSESYQQGVLSATILYETASASESCCKWPALTCPCGCGPAAPREADLASRPISTCSWLATWNPTQALLEAIPSTSPRCASPPATTSPGPYAPSPPRSPTTPPRATPSIRTATSSGSPSCKNSSSRASGSTSARCGSRTTAPRWRSGPRRRASKRGRCSPRSARAWPSAVPGWPRSNRWKASWRRTGPRSPRGSWPPSASRPTTRARVWAAPSCSPEWRRPSAPGCPPSWRPPRPATSPSTSGSASPSPPTSRCPKDRAPGAPASPVP

SEQ ID NO: 16609 - protein, 671 aa, synthetic construct
MALPVTALLLPLALLLHAARPLEEDLKNVFPPEVAVFEPSEAEISHTQKATLVCLATGFYPDHVELSWWVNGKEVHSGVSTDPQPLKEQPALNDSRYCLSSRLRVSATFWQNPRNHFRCQVQFYGLSENDEWTQDRAKPVTQIVSAEAWGRADCDVKLVEKSFETDTNLNFQNLSVIGFRILLLKVAGFNLLMTLRLWSSRAKRSGSGATNFSLLKQAGDVEENPGPTSMDWIWRILFLVGAATGAHSFEGSGFEYAKEMRNAYWEIALLPNLTNQQKRAPIRKLYDDPSQSSELLSEAKKLNDSQTRIQNPDPAVYQLRDSKSSDKSVCLFTDFDSQTNVSQSKDSDVYITDKTVLDMRSMDFKSNSAVAWSNKSDFACANAFNNSIIPEDTFFPSPESSCGFTSESYQQGVLSATILYETASASESCCKWPALTCPCGCGPAAPREADLASRPISTCSWLATWNPTQALLEAIPSTSPRCASPPATTSPGPYAPSPPRSPTTPPRATPSIRTATSSGSPSCKNSSSRASGSTSARCGSRTTAPRWRSGPRRRASKRGRCSPRSARAWPSAVPGWPRSNRWKASWRRTGPRSPRGSWPPSASRPTTRARVWAAPSCSPEWRRPSAPGCPPSWRPPRPATSPSTSGSASPSPPTSRCPKDRAPGAPASPVP

SEQ ID NO: 16610 - protein, 893 aa, synthetic construct
MALPVTALLLPLALLLHAARPLEEDLKNVFPPEVAVFEPSEAEISHTQKATLVCLATGFYPDHVELSWWVNGKEVHSGVSTDPQPLKEQPALNDSRYCLSSRLRVSATFWQNPRNHFRCQVQFYGLSENDEWTQDRAKPVTQIVSAEAWGRADCDVKLVEKSFETDTNLNFQNLSVIGFRILLLKVAGFNLLMTLRLWSSRAKRSGSGATNFSLLKQAGDVEENPGPTSMALPVTALLLPLALLLHAARPDEFEVQLVESGGGLVQAGGSLRLSCAASGITFSINTMGWYRQAPGKQRELVALISSIGDTYYADSVKGRFTISRDNAKNTVYLQMNSLKPEDTAVYYCKRFRTAAQGTDYWGQGTQVTVSSLEGGGGSGGGGSGGGGSGSGGSGSGGSGSGGSGSGGSFEVQLVESGGGLVQPGGSLRLSCAASGSIFGFNDMAWYRQAPGKQRELVALISRVGVTSSADSVKGRFTISRVNAKDTVYLQMNSLKPEDTAVYYCYMDQRLDGSTLAYWGQGTQVTVSSTRIQNPDPAVYQLRDSKSSDKSVCLFTDFDSQTNVSQSKDSDVYITDKTVLDMRSMDFKSNSAVAWSNKSDFACANAFNNSIIPEDTFFPSPESSCGFTSESYQQGVLSATILYETASASESCCKWPALTCPCGCGPAAPREADLASRPISTCSWLATWNPTQALLEAIPSTSPRCASPPATTSPGPYAPSPPRSPTTPPRATPSIRTATSSGSPSCKNSSSRASGSTSARCGSRTTAPRWRSGPRRRASKRGRCSPRSARAWPSAVPGWPRSNRWKASWRRTGPRSPRGSWPPSASRPTTRARVWAAPSCSPEWRRPSAPGCPPSWRPPRPATSPSTSGSASPSPPTSRCPKDRAPGAPASPVP

SEQ ID NO: 16611 - protein, 807 aa, synthetic construct
MALPVTALLLPLALLLHAARPLEEDLKNVFPPEVAVFEPSEAEISHTQKATLVCLATGFYPDHVELSWWVNGKEVHSGVSTDPQPLKEQPALNDSRYCLSSRLRVSATFWQNPRNHFRCQVQFYGLSENDEWTQDRAKPVTQIVSAEAWGRADCDVKLVEKSFETDTNLNFQNLSVIGFRILLLKVAGFNLLMTLRLWSSRAKRSGSGATNFSLLKQAGDVEENPGPTSMALPVTALLLPLALLLHAARPGMRTEDLPKAVVFLEPQWYRVLEKDSVTLKCQGAYSPEDNSTQWFHNESLISSQASSYFIDAATVDDSGEYRCQTNLSTLSDPVQLEVHIGWLLLQAPRWVFKEEDPIHLRCHSWKNTALHKVTYLQNGKGRKYFHHNSDFYIPKATLKDSGSYFCRGLVGSKNVSSETVNITITQGLAVSTISSFFPPGYQTRIQNPDPAVYQLRDSKSSDKSVCLFTDFDSQTNVSQSKDSDVYITDKTVLDMRSMDFKSNSAVAWSNKSDFACANAFNNSIIPEDTFFPSPESSCGFTSESYQQGVLSATILYETASASESCCKWPALTCPCGCGPAAPREADLASRPISTCSWLATWNPTQALLEAIPSTSPRCASPPATTSPGPYAPSPPRSPTTPPRATPSIRTATSSGSPSCKNSSSRASGSTSARCGSRTTAPRWRSGPRRRASKRGRCSPRSARAWPSAVPGWPRSNRWKASWRRTGPRSPRGSWPPSASRPTTRARVWAAPSCSPEWRRPSAPGCPPSWRPPRPATSPSTSGSASPSPPTSRCPKDRAPGAPASPVP

SEQ ID NO: 16612 - protein, 809 aa, synthetic construct
MALPVTALLLPLALLLHAARPLEEDLKNVFPPEVAVFEPSEAEISHTQKATLVCLATGFYPDHVELSWWVNGKEVHSGVSTDPQPLKEQPALNDSRYCLSSRLRVSATFWQNPRNHFRCQVQFYGLSENDEWTQDRAKPVTQIVSAEAWGRADCDVKLVEKSFETDTNLNFQNLSVIGFRILLLKVAGFNLLMTLRLWSSRAKRSGSGATNFSLLKQAGDVEENPGPTSATMALPVTALLLPLALLLHAARPGMRTEDLPKAVVFLEPQWYRVLEKDSVTLKCQGAYSPEDNSTQWFHNESLISSQASSYFIDAATVDDSGEYRCQTNLSTLSDPVQLEVHIGWLLLQAPRWVFKEEDPIHLRCHSWKNTALHKVTYLQNGKGRKYFHHNSDFYIPKATLKDSGSYFCRGLVGSKNVSSETVNITITQGLAVSTISSFFPPGYQTRIQNPDPAVYQLRDSKSSDKSVCLFTDFDSQTNVSQSKDSDVYITDKTVLDMRSMDFKSNSAVAWSNKSDFACANAFNNSIIPEDTFFPSPESSCGFTSESYQQGVLSATILYETASASESCCKWPALTCPCGCGPAAPREADLASRPISTCSWLATWNPTQALLEAIPSTSPRCASPPATTSPGPYAPSPPRSPTTPPRATPSIRTATSSGSPSCKNSSSRASGSTSARCGSRTTAPRWRSGPRRRASKRGRCSPRSARAWPSAVPGWPRSNRWKASWRRTGPRSPRGSWPPSASRPTTRARVWAAPSCSPEWRRPSAPGCPPSWRPPRPATSPSTSGSASPSPPTSRCPKDRAPGAPASPVP

SEQ ID NO: 16613 - protein, 833 aa, synthetic construct
MALPVTALLLPLALLLHAARPLEIQNPDPAVYQLRDSKSSDKSVCLFTDFDSQTNVSQSKDSDVYITDKTVLDMRSMDFKSNSAVAWSNKSDFACANAFNNSIIPEDTFFPSPESSCGFTSESYQQGVLSATILYETASASESCCKWPALTCPCGCGPAGPSDLDLEQQTSHYSNKQVTWRRIPGLLAWPYQPPCSCRWPCCSTPPGRTSRHRLHPPCLPLWETESPSVAGQVRTLVNIIGISRNQMELLNSSTIHQDYTQESHQGSVAVGLEQIILSPLATWSKKILPLTFANRVIRFRTRSEGGPSWRSQVAVARAVVGRVAADLRNCRSQDLAWWRPHRACPSHALSQGSHYPTMVAGFASLHERVWSGWEYGVVKPHTIIQLSNPDPSSRTTPRAKFSKTVCKLMTQPFTTVPNIITTVVAMLWTTGVKEPQSPSPQRVRTRTCSHLRWPCSSLARPRSATPRKPPSCAWLPASTPTMWNCLGGSTAKRCTAACLPTPSHKNSPPTTAGTAAADECPPPSGRTPGTTSDARCSSTAARTTSGPRTEPSPPRSCLPKPGAEPIATSWWKRASRQTPTTSRTASASESCCKWPALTCPCGCGPAAPREADLASRPISTCSWLATWNPTQALLEAIPSTSPRCASPPATTSPGPYAPSPPRSPTTPPRATPSIRTATSSGSPSCKNSSSRASGSTSARCGSRTTAPRWRSGPRRRASKRGRCSPRSARAWPSAVPGWPRSNRWKASWRRTGPRSPRGSWPPSASRPTTRARVWAAPSCSPEWRRPSAPGCPPSWRPPRPATSPSTSGSASPSPPTSRCPKDRAPGAPASPVP

SEQ ID NO: 16614 - protein, 826 aa, synthetic construct
MALPVTALLLPLALLLHAARPLEIQNPDPAVYQLRDSKSSDKSVCLFTDFDSQTNVSQSKDSDVYITDKTVLDMRSMDFKSNSAVAWSNKSDFACANAFNNSIIPEDTFFPSPESSCGFTSESYQQGVLSATILYETASASESCCKWPALTCPCGCGPAGPSDLDLEQQTSHYSNKQVTWRRIPGLLAPWPYQPPCSCRWPCCSTPPGRRSPRALPPCLALAKEPPAVEPARTSASTTGISRSPARPPDCSTTPADCTAASPPDFLALAAAPTTPQSAASSPRTSPCTSVSKATPCPTPSARAPSWKSRAEAEVEAEDLAAEALRCNSRNLALASSPARHAPVPCPACPCLTMACPGSDSPLARAWNGSEFGAAKPPTTTAPSPEPSPRTTPRTRCPSAAQPPTPPCITAPSTTTTAAATLWTTGAREPSPCLVRVRTRTCSHLRWPCSSLARPRSATPRKPPSCAWLPASTPTMWNCLGGSTAKRCTAACLPTPSHKNSPPTTAGTAAADECPPPSGRTPGTTSDARCSSTAARTTSGPRTEPSPPRSCLPKPGAEPIATSWWKRASRQTPTTSRTASASESCCKWPALTCPCGCGPAAPREADLASRPISTCSWLATWNPTQALLEAIPSTSPRCASPPATTSPGPYAPSPPRSPTTPPRATPSIRTATSSGSPSCKNSSSRASGSTSARCGSRTTAPRWRSGPRRRASKRGRCSPRSARAWPSAVPGWPRSNRWKASWRRTGPRSPRGSWPPSASRPTTRARVWAAPSCSPEWRRPSAPGCPPSWRPPRPATSPSTSGSASPSPPTSRCPKDRAPGAPASPVP

SEQ ID NO: 16615 - protein, 831 aa, synthetic construct
MALPVTALLLPLALLLHAARPLEIQNPDPAVYQLRDSKSSDKSVCLFTDFDSQTNVSQSKDSDVYITDKTVLDMRSMDFKSNSAVAWSNKSDFACANAFNNSIIPEDTFFPSPESSCGFTSESYQQGVLSATILYETASASESCCKWPALTCPCGCGPAGPSDLDLEQQTSHYSNKQVTWRRIPGLLAPWPYQPPCSCRWPCCSTPPGRTRSCHRAPPPCHCLQAKEPPAVAPAAACPTCTGISRSPARPPDCSTIPASWPPASPPDFLAAAPAPTSPQSAAWNPRTWPCTTVFKAACTPSPSARAPSWKSREVAVARAVVGRVAADLRCSSRNLALASSLARPAPVPCLAAASAQAAWAWAGSDSTLARAWNGSATFGGTTTSGTTPPSPEPSAWTPARTSSASAAQPPIPPCIIAPGWNCGPTTSTTGAREPSPCLVRVRTRTCSHLRWPCSSLARPRSATPRKPPSCAWLPASTPTMWNCLGGSTAKRCTAACLPTPSHKNSPPTTAGTAAADECPPPSGRTPGTTSDARCSSTAARTTSGPRTEPSPPRSCLPKPGAEPIATSWWKRASRQTPTTSRTASASESCCKWPALTCPCGCGPAAPREADLASRPISTCSWLATWNPTQALLEAIPSTSPRCASPPATTSPGPYAPSPPRSPTTPPRATPSIRTATSSGSPSCKNSSSRASGSTSARCGSRTTAPRWRSGPRRRASKRGRCSPRSARAWPSAVPGWPRSNRWKASWRRTGPRSPRGSWPPSASRPTTRARVWAAPSCSPEWRRPSAPGCPPSWRPPRPATSPSTSGSASPSPPTSRCPKDRAPGAPASPVP

SEQ ID NO: 16616 - protein, 829 aa, synthetic construct
MALPVTALLLPLALLLHAARPLEIQNPDPAVYQLRDSKSSDKSVCLFTDFDSQTNVSQSKDSDVYITDKTVLDMRSMDFKSNSAVAWSNKSDFACANAFNNSIIPEDTFFPSPESSCGFTSESYQQGVLSATILYETASASESCCKWPALTCPCGCGPAGPSDLDLEQQTSHYSNKQVTWRRIPGLLAWPYQPPCSCRWPCCSTPPGRTSRHRALAACLPAWETEPSPVEPARTSATTTGISRSPARPLSCSTTPADCTAACPADFLALAAAPTSPQYLASSLRTSPPTIASRATPCLTHLDRAPRWKSREAEAEVEAEDLAAEALKCSWLNQVAAWFNLADLDAVPPAASPSATTLAGSDRPLAKDLNGSPPSAMAAPTLTTPTARADSPSPETTARTPCTSRTPEPRTPPCTTAPDSTATSSTIGARAPWSQSLLRVRTRTCSHLRWPCSSLARPRSATPRKPPSCAWLPASTPTMWNCLGGSTAKRCTAACLPTPSHKNSPPTTAGTAAADECPPPSGRTPGTTSDARCSSTAARTTSGPRTEPSPPRSCLPKPGAEPIATSWWKRASRQTPTTSRTASASESCCKWPALTCPCGCGPAAPREADLASRPISTCSWLATWNPTQALLEAIPSTSPRCASPPATTSPGPYAPSPPRSPTTPPRATPSIRTATSSGSPSCKNSSSRASGSTSARCGSRTTAPRWRSGPRRRASKRGRCSPRSARAWPSAVPGWPRSNRWKASWRRTGPRSPRGSWPPSASRPTTRARVWAAPSCSPEWRRPSAPGCPPSWRPPRPATSPSTSGSASPSPPTSRCPKDRAPGAPASPVP

SEQ ID NO: 16617 - protein, 833 aa, synthetic construct
MALPVTALLLPLALLLHAARPLEIQNPDPAVYQLRDSKSSDKSVCLFTDFDSQTNVSQSKDSDVYITDKTVLDMRSMDFKSNSAVAWSNKSDFACANAFNNSIIPEDTFFPSPESSCGFTSESYQQGVLSATILYETASASESCCKWPALTCPCGCGPAGPSDLDLEQQTSHYSNKQVTWRRIPGLLAWPYQPPCSCRWPCCSTPPGRTSRHRALAACLPAWETEPSHARPATTSTTGWPGISRSLDRPLSCSTALPHWKQACPADFLAAALAPTTPQYPASSLRTSPPTTVSRAGTPLGHSARAPSWKSREAEAEVEAEDLAAEALKFSFNSLALSWSNLALLRAAKPAATPSAATGSTGSRNPARDSNGSAKSIPATATPTTTASSRAEPHPPIPLAAQPTCSAAPAKIAPCTSVPGPSQQSWAALWTIGAREQAPCLVRVRTRTCSHLRWPCSSLARPRSATPRKPPSCAWLPASTPTMWNCLGGSTAKRCTAACLPTPSHKNSPPTTAGTAAADECPPPSGRTPGTTSDARCSSTAARTTSGPRTEPSPPRSCLPKPGAEPIATSWWKRASRQTPTTSRTASASESCCKWPALTCPCGCGPAAPREADLASRPISTCSWLATWNPTQALLEAIPSTSPRCASPPATTSPGPYAPSPPRSPTTPPRATPSIRTATSSGSPSCKNSSSRASGSTSARCGSRTTAPRWRSGPRRRASKRGRCSPRSARAWPSAVPGWPRSNRWKASWRRTGPRSPRGSWPPSASRPTTRARVWAAPSCSPEWRRPSAPGCPPSWRPPRPATSPSTSGSASPSPPTSRCPKDRAPGAPASPVP

SEQ ID NO: 16618 - protein, 838 aa, synthetic construct
MALPVTALLLPLALLLHAARPLEIQNPDPAVYQLRDSKSSDKSVCLFTDFDSQTNVSQSKDSDVYITDKTVLDMRSMDFKSNSAVAWSNKSDFACANAFNNSIIPEDTFFPSPESSCGFTSESYQQGVLSATILYETASASESCCKWPALTCPCGCGPAGPSDLDLEQQTSHYSNKQVTWRRIPGLLAWPYQPPCSCRWPCCSTPPGRRSCCLSLLPSALPQARKPPVEPAAACPTCTGISRSPAAALSLGSTPPAIWPLACQPDFLALAAAPATASQSAEWKPRTPPPTIVSSGPSILLPSAEAPGWKSKEQWLLAEAEVEAEDLAAEALRLICNRAEPNSSDLALLRAARPAATPSPAIICTGSSRPLGRDSNGSAESIPATATPPTTRSSRAKPHPWARAAAPPICSSAAPARTAPCTSAPDTTTTTLWTTGARAPAQLALPARVRTRTCSHLRWPCSSLARPRSATPRKPPSCAWLPASTPTMWNCLGGSTAKRCTAACLPTPSHKNSPPTTAGTAAADECPPPSGRTPGTTSDARCSSTAARTTSGPRTEPSPPRSCLPKPGAEPIATSWWKRASRQTPTTSRTASASESCCKWPALTCPCGCGPAAPREADLASRPISTCSWLATWNPTQALLEAIPSTSPRCASPPATTSPGPYAPSPPRSPTTPPRATPSIRTATSSGSPSCKNSSSRASGSTSARCGSRTTAPRWRSGPRRRASKRGRCSPRSARAWPSAVPGWPRSNRWKASWRRTGPRSPRGSWPPSASRPTTRARVWAAPSCSPEWRRPSAPGCPPSWRPPRPATSPSTSGSASPSPPTSRCPKDRAPGAPASPVP

SEQ ID NO: 16619 - protein, 834 aa, synthetic construct
MALPVTALLLPLALLLHAARPLEIQNPDPAVYQLRDSKSSDKSVCLFTDFDSQTNVSQSKDSDVYITDKTVLDMRSMDFKSNSAVAWSNKSDFACANAFNNSIIPEDTFFPSPESSCGFTSESYQQGVLSATILYETASASESCCKWPALTCPCGCGPAGPSDLDLEQQTSHYSNKQVTWRRIPGLLAWPYQPPCSCRWPCCSTPPGRRSCHRALPPCLALAKEPPAVEPARACPATWPGISRSPARLPGCSTMPAIEPPASPPDFPALAAAPTSPPSAPWNPRTSPCTTASSGATGPSHSARAPGWKSKAEAEVEAEDLAAEALRCSLLSLAEDWCSPIEADCLVPPAASPSTIMPCTGSDRPLAKDLNGCPPSLGTAAQSATPTLRADSPSAGTTPRTACTSRTPEPRTQPCTTAPRTSSTATTTTAWTCGARAQQQSLLRVRTRTCSHLRWPCSSLARPRSATPRKPPSCAWLPASTPTMWNCLGGSTAKRCTAACLPTPSHKNSPPTTAGTAAADECPPPSGRTPGTTSDARCSSTAARTTSGPRTEPSPPRSCLPKPGAEPIATSWWKRASRQTPTTSRTASASESCCKWPALTCPCGCGPAAPREADLASRPISTCSWLATWNPTQALLEAIPSTSPRCASPPATTSPGPYAPSPPRSPTTPPRATPSIRTATSSGSPSCKNSSSRASGSTSARCGSRTTAPRWRSGPRRRASKRGRCSPRSARAWPSAVPGWPRSNRWKASWRRTGPRSPRGSWPPSASRPTTRARVWAAPSCSPEWRRPSAPGCPPSWRPPRPATSPSTSGSASPSPPTSRCPKDRAPGAPASPVP

SEQ ID NO: 16620 - protein, 832 aa, synthetic construct
MALPVTALLLPLALLLHAARPLEIQNPDPAVYQLRDSKSSDKSVCLFTDFDSQTNVSQSKDSDVYITDKTVLDMRSMDFKSNSAVAWSNKSDFACANAFNNSIIPEDTFFPSPESSCGFTSESYQQGVLSATILYETASASESCCKWPALTCPCGCGPAGPSDLDLEQQTSHYSNKQVTWRRIPGLLAWPYQPPCSCRWPCCSTPPGRTSRPRAPAACLPAWATEPSPVEPARTTPPWPGISRSLARPPSCSTAPASWKAACPADSAEAEAAPTSPPSAPSSPRTSPPTTASSTTPPLPPSARPRWKSREAEAEVEAEDLAAEALKCNWWNLAADWCSLADLDAVPPAASTSRTPTSTGCARPLERDWNGWPGSTPPTATPDTPTARAGSPSAPTPARIPPTSRTACGPRIPPCTTAQDGEATASTLWTCGARAPLPCHLRVRTRTCSHLRWPCSSLARPRSATPRKPPSCAWLPASTPTMWNCLGGSTAKRCTAACLPTPSHKNSPPTTAGTAAADECPPPSGRTPGTTSDARCSSTAARTTSGPRTEPSPPRSCLPKPGAEPIATSWWKRASRQTPTTSRTASASESCCKWPALTCPCGCGPAAPREADLASRPISTCSWLATWNPTQALLEAIPSTSPRCASPPATTSPGPYAPSPPRSPTTPPRATPSIRTATSSGSPSCKNSSSRASGSTSARCGSRTTAPRWRSGPRRRASKRGRCSPRSARAWPSAVPGWPRSNRWKASWRRTGPRSPRGSWPPSASRPTTRARVWAAPSCSPEWRRPSAPGCPPSWRPPRPATSPSTSGSASPSPPTSRCPKDRAPGAPASPVP

SEQ ID NO: 16621 - protein, 714 aa, synthetic construct
MALPVTALLLPLALLLHAARPLEIQNPDPAVYQLRDSKSSDKSVCLFTDFDSQTNVSQSKDSDVYITDKTVLDMRSMDFKSNSAVAWSNKSDFACANAFNNSIIPEDTFFPSPESSCGFTSESYQQGVLSATILYETASASESCCKWPALTCPCGCGPAGPSDLDLEQQTSHYSNKQVTWRRIPGLLAWPCPQPCCCLWLCCCTPPDPMNSRCNWWKAAEAWCRLADLDAVPPAASPSASTQWAGTDRPLASRGNWWPSPASATPTTPTARAGSPSAGTTPRTPCTSRTASPRTPPCTTASGSEQPPRAPIIGAREHKPCPLRVRTRTCSHLRWPCSSLARPRSATPRKPPSCAWLPASTPTMWNCLGGSTAKRCTAACLPTPSHKNSPPTTAGTAAADECPPPSGRTPGTTSDARCSSTAARTTSGPRTEPSPPRSCLPKPGAEPIATSWWKRASRQTPTTSRTASASESCCKWPALTCPCGCGPAAPREADLASRPISTCSWLATWNPTQALLEAIPSTSPRCASPPATTSPGPYAPSPPRSPTTPPRATPSIRTATSSGSPSCKNSSSRASGSTSARCGSRTTAPRWRSGPRRRASKRGRCSPRSARAWPSAVPGWPRSNRWKASWRRTGPRSPRGSWPPSASRPTTRARVWAAPSCSPEWRRPSAPGCPPSWRPPRPATSPSTSGSASPSPPTSRCPKDRAPGAPASPVP

SEQ ID NO: 16622 - protein, 714 aa, synthetic construct; identical to SEQ ID NO: 16621

SEQ ID NO: 16623 - protein, 974 aa, synthetic construct
MALPVTALLLPLALLLHAARPLEIQNPDPAVYQLRDSKSSDKSVCLFTDFDSQTNVSQSKDSDVYITDKTVLDMRSMDFKSNSAVAWSNKSDFACANAFNNSIIPEDTFFPSPESSCGFTSESYQQGVLSATILYETASASESCCKWPALTCPCGCGPAGPSDLDLEQQTSHYSNKQVTWRRIPGLLAWPYQPPCSCRWPCCSTPPGRRSSSSSPAAASSRPATPSPSPAPPPAAPSPPTPSPGSASAPARSASSSPASAGAAPPTTPTPSRTASPSPATPPSTPCTSRTPSSPRTPPSTTAATTPAAGPSPPSTSTTPGARAPRSPSPPVPAEADLAAEVAVAEDLNSTSRHRALAACLPAWETEPSHARPATTSTTGWPGISRSLDRPLSCSTALPHWKQACPADFLAAALAPTTPQYPASSLRTSPPTTVSRAGTPLGHSARAPSWKSREAEAEVEAEDLAAEALKFSFNSLALSWSNLALLRAAKPAATPSAATGSTGSRNPARDSNGSAKSIPATATPTTTASSRAEPHPPIPLAAQPTCSAAPAKIAPCTSVPGPSQQSWAALWTIGAREQAPCLVRVRTRTCSHLRWPCSSLARPRSATPRKPPSCAWLPASTPTMWNCLGGSTAKRCTAACLPTPSHKNSPPTTAGTAAADECPPPSGRTPGTTSDARCSSTAARTTSGPRTEPSPPRSCLPKPGAEPIATSWWKRASRQTPTTSRTASASESCCKWPALTCPCGCGPAAPREADLASRPISTCSWLATWNPTQALLEAIPSTSPRCASPPATTSPGPYAPSPPRSPTTPPRATPSIRTATSSGSPSCKNSSSRASGSTSARCGSRTTAPRWRSGPRRRASKRGRCSPRSARAWPSAVPGWPRSNRWKASWRRTGPRSPRGSWPPSASRPTTRARVWAAPSCSPEWRRPSAPGCPPSWRPPRPATSPSTSGSASPSPPTSRCPKDRAPGAPASPVP

SEQ ID NO: 16624 - protein, 1098 aa, synthetic construct
MALPVTALLLPLALLLHAARPLEIQNPDPAVYQLRDSKSSDKSVCLFTDFDSQTNVSQSKDSDVYITDKTVLDMRSMDFKSNSAVAWSNKSDFACANAFNNSIIPEDTFFPSPESSCGFTSESYQQGVLSATILYETASASESCCKWPALTCPCGCGPAGPSDLDLEQQTSHYSNKQVTWRRIPGLLAWPYQPPCSCRWPCCSTPPGRRFSCLSLAEDWFNLAEADCLVPPAASPLAATPAGSDRLLAKDWNGCPASAAAATTSTTPIARADSPSAGTSARTPCTSRTAEPRTPPCTTVPKKAPALTAAWPIIEARAHWSPCLVAEEAAEDLRSSSSSPAAASSRPATPSPSPAPPPAAPSPPTPSPGSASAPARSASSSPASAGAAPPTTPTPSRTASPSPATPPSTPCTSRTPSSPRTPPSTTAATTPAAGPSPPSTSTTPGARAPRSPSPPVPAEADLAAEVAVAEDLNSTSRHRALAACLPAWETEPSHARPATTSTTGWPGISRSLDRPLSCSTALPHWKQACPADFLAAALAPTTPQYPASSLRTSPPTTVSRAGTPLGHSARAPSWKSREAEAEVEAEDLAAEALKFSFNSLALSWSNLALLRAAKPAATPSAATGSTGSRNPARDSNGSAKSIPATATPTTTASSRAEPHPPIPLAAQPTCSAAPAKIAPCTSVPGPSQQSWAALWTIGAREQAPCLVRVRTRTCSHLRWPCSSLARPRSATPRKPPSCAWLPASTPTMWNCLGGSTAKRCTAACLPTPSHKNSPPTTAGTAAADECPPPSGRTPGTTSDARCSSTAARTTSGPRTEPSPPRSCLPKPGAEPIATSWWKRASRQTPTTSRTASASESCCKWPALTCPCGCGPAAPREADLASRPISTCSWLATWNPTQALLEAIPSTSPRCASPPATTSPGPYAPSPPRSPTTPPRATPSIRTATSSGSPSCKNSSSRASGSTSARCGSRTTAPRWRSGPRRRASKRGRCSPRSARAWPSAVPGWPRSNRWKASWRRTGPRSPRGSWPPSASRPTTRARVWAAPSCSPEWRRPSAPGCPPSWRPPRPATSPSTSGSASPSPPTSRCPKDRAPGAPASPVP

SEQ ID NO: 16625 - protein, 1098 aa, synthetic construct; identical to SEQ ID NO: 16624

SEQ ID NO: 16626 - protein, 722 aa, synthetic construct
MALPVTALLLPLALLLHAARPLEIQNPDPAVYQLRDSKSSDKSVCLFTDFDSQTNVSQSKDSDVYITDKTVLDMRSMDFKSNSAVAWSNKSDFACANAFNNSIIPEDTFFPSPESSCGFTSESYQQGVLSATILYETASASESCCKWPALTCPCGCGPAGPSDLDLEQQTSHYSNKQVTWRRIPGLLAWPCPQPCCCLWLCCCTPPDPMNSALTWASSCCSPLPRARTTKCGFCWLLGPTTPRISRATPPCTWPPMMDTWKSWKCCRLALMMPKTARAGPLCMKPPTAAIWKLWKCCKPGQTTLRTTLARHQPIWLQLGATKISPRCCRRRVRTRTCSHLRWPCSSLARPRSATPRKPPSCAWLPASTPTMWNCLGGSTAKRCTAACLPTPSHKNSPPTTAGTAAADECPPPSGRTPGTTSDARCSSTAARTTSGPRTEPSPPRSCLPKPGAEPIATSWWKRASRQTPTTSRTASASESCCKWPALTCPCGCGPAAPREADLASRPISTCSWLATWNPTQALLEAIPSTSPRCASPPATTSPGPYAPSPPRSPTTPPRATPSIRTATSSGSPSCKNSSSRASGSTSARCGSRTTAPRWRSGPRRRASKRGRCSPRSARAWPSAVPGWPRSNRWKASWRRTGPRSPRGSWPPSASRPTTRARVWAAPSCSPEWRRPSAPGCPPSWRPPRPATSPSTSGSASPSPPTSRCPKDRAPGAPASPVP

SEQ ID NO: 16627 - protein, 655 aa, synthetic construct
MALPVTALLLPLALLLHAARPLEIQNPDPAVYQLRDSKSSDKSVCLFTDFDSQTNVSQSKDSDVYITDKTVLDMRSMDFKSNSAVAWSNKSDFACANAFNNSIIPEDTFFPSPESSCGFTSESYQQGVLSATILYETASASESCCKWPALTCPCGCGPAGPSDLDLEQQTSHYSNKQVTWRRIPGLLAWTGFGASFSLSALLPAPIPSKAADSNTPKRCGTPTGRSPCCPIPTSRREPPSESCTTTPPRAASCCLRLKNTIARRVRTRTCSHLRWPCSSLARPRSATPRKPPSCAWLPASTPTMWNCLGGSTAKRCTAACLPTPSHKNSPPTTAGTAAADECPPPSGRTPGTTSDARCSSTAARTTSGPRTEPSPPRSCLPKPGAEPIATSWWKRASRQTPTTSRTASASESCCKWPALTCPCGCGPAAPREADLASRPISTCSWLATWNPTQALLEAIPSTSPRCASPPATTSPGPYAPSPPRSPTTPPRATPSIRTATSSGSPSCKNSSSRASGSTSARCGSRTTAPRWRSGPRRRASKRGRCSPRSARAWPSAVPGWPRSNRWKASWRRTGPRSPRGSWPPSASRPTTRARVWAAPSCSPEWRRPSAPGCPPSWRPPRPATSPSTSGSASPSPPTSRCPKDRAPGAPASPVP

SEQ ID NO: 16628 - protein, 863 aa, synthetic construct
MALPVTALLLPLALLLHAARPLEIQNPDPAVYQLRDSKSSDKSVCLFTDFDSQTNVSQSKDSDVYITDKTVLDMRSMDFKSNSAVAWSNKSDFACANAFNNSIIPEDTFFPSPESSCGFTSESYQQGVLSATILYETASASESCCKWPALTCPCGCGPAGPSDLDLEQQTSHYSNKQVTWRRIPGLLAWPCPQPCCCLWLCCCTPPDPMNSRCNWWKAAEAWCRLADLDAVPPAASPSASTQWAGTDRPLASRGNWWPSPASATPTTPTARAGSPSAGTTPRTPCTSRTASPRTPPCTTASGSEQPPRAPIIGAREHKPCPLSREEAAPGEAEVEAEDLGLEEADLEAQGQGAQAVEALSKCNWWNLGADWCSQAEVGCLVPPPAASSASTTWPGIGRLPENSASWWLLAEWAPAAPTLRADSQSPETPRIQCTSRTLNLRIQQCTIATWTSGWTAAHWPTGDRELKQCLARVRTRTCSHLRWPCSSLARPRSATPRKPPSCAWLPASTPTMWNCLGGSTAKRCTAACLPTPSHKNSPPTTAGTAAADECPPPSGRTPGTTSDARCSSTAARTTSGPRTEPSPPRSCLPKPGAEPIATSWWKRASRQTPTTSRTASASESCCKWPALTCPCGCGPAAPREADLASRPISTCSWLATWNPTQALLEAIPSTSPRCASPPATTSPGPYAPSPPRSPTTPPRATPSIRTATSSGSPSCKNSSSRASGSTSARCGSRTTAPRWRSGPRRRASKRGRCSPRSARAWPSAVPGWPRSNRWKASWRRTGPRSPRGSWPPSASRPTTRARVWAAPSCSPEWRRPSAPGCPPSWRPPRPATSPSTSGSASPSPPTSRCPKDRAPGAPASPVP

SEQ ID NO: 16629 - protein, 783 aa, synthetic construct
MALPVTALLLPLALLLHAARPLEIQNPDPAVYQLRDSKSSDKSVCLFTDFDSQTNVSQSKDSDVYITDKTVLDMRSMDFKSNSAVAWSNKSDFACANAFNNSIIPEDTFFPSPESSCGFTSESYQQGVLSATILYETASASESCCKWPALTCPCGCGPAGPSDLDLEQQTSHYSNKQVTWRRIPGLLAWPFQSLPCCCLWRSCSTPLDRAEPRTCLRPWCSWNPSGTECWKRTAPSARAPTAPRTIAPSGSTTRASPARPAATSSTPPPWTTAASIDARPTAPATPCSWKCTSDGCCCRPPDGCSKKRTPSTDATLGRTPPCTKPTCRTARAESTSTTTATSTSPRPPRTPAPTSAEASWAARTCPARQTSPSPRAWPCLPSAAFSHPATRRVRTRTCSHLRWPCSSLARPRSATPRKPPSCAWLPASTPTMWNCLGGSTAKRCTAACLPTPSHKNSPPTTAGTAAADECPPPSGRTPGTTSDARCSSTAARTTSGPRTEPSPPRSCLPKPGAEPIATSWWKRASRQTPTTSRTASASESCCKWPALTCPCGCGPAAPREADLASRPISTCSWLATWNPTQALLEAIPSTSPRCASPPATTSPGPYAPSPPRSPTTPPRATPSIRTATSSGSPSCKNSSSRASGSTSARCGSRTTAPRWRSGPRRRASKRGRCSPRSARAWPSAVPGWPRSNRWKASWRRTGPRSPRGSWPPSASRPTTRARVWAAPSCSPEWRRPSAPGCPPSWRPPRPATSPSTSGSASPSPPTSRCPKDRAPGAPASPVP

SEQ ID NO: 16630 - protein, 789 aa, synthetic construct
MALPVTALLLPLALLLHAARPLEIQNPDPAVYQLRDSKSSDKSVCLFTDFDSQTNVSQSKDSDVYITDKTVLDMRSMDFKSNSAVAWSNKSDFACANAFNNSIIPEDTFFPSPESSCGFTSESYQQGVLSATILYETASASESCCKWPALTCPCGCGPAGPSDLDLEQQTSHYSNKQVTWRRIPGLLAPPWPYQPPCSCRWPCCSTPPGRACGLKTSQRLWCSWSLNGTGCWRRTVLSAREPTPLRTIPHSGFTMRASSQARPPATSLTLPQWTTVESTGARQTSPPSVTRCSKSISAGCCSRPLGGCSRRKTLFTGVTAGRTLLCIRSHIYRMAKAGSIFIIILTSTFQKPHSKTAAPTSAGGLLGVKMCLQRLTSPSLKVWQCQPSHHSFHLATKRVRTRTCSHLRWPCSSLARPRSATPRKPPSCAWLPASTPTMWNCLGGSTAKRCTAACLPTPSHKNSPPTTAGTAAADECPPPSGRTPGTTSDARCSSTAARTTSGPRTEPSPPRSCLPKPGAEPIATSWWKRASRQTPTTSRTASASESCCKWPALTCPCGCGPAAPREADLASRPISTCSWLATWNPTQALLEAIPSTSPRCASPPATTSPGPYAPSPPRSPTTPPRATPSIRTATSSGSPSCKNSSSRASGSTSARCGSRTTAPRWRSGPRRRASKRGRCSPRSARAWPSAVPGWPRSNRWKASWRRTGPRSPRGSWPPSASRPTTRARVWAAPSCSPEWRRPSAPGCPPSWRPPRPATSPSTSGSASPSPPTSRCPKDRAPGAPASPVP

SEQ ID NO: 16631 - protein, 855 aa, synthetic construct
MALPVTALLLPLALLLHAARPLEEDLKNVFPPEVAVFEPSEAEISHTQKATLVCLATGFYPDHVELSWWVNGKEVHSGVSTDPQPLKEQPALNDSRYCLSSRLRVSATFWQNPRNHFRCQVQFYGLSENDEWTQDRAKPVTQIVSAEAWGRADCGFTSESYQQGVLSATNLSVIGFRILLLKVAGFNLLMTLRLWSSRAKRSGSGATNFSLLKQAGDVEENPGPTSMALPVTALLLPLALLLHAARPDIQMTQTTSSLSASLGDRVTISCRASQDISKYLNWYQQKPDGTVKLLIYHTSRLHSGVPSRFSGSGSGTDYSLTISNLEQEDIATYFCQQGNTLPYTFGGGTKLEITGGGGSGGGGSGGGGSEVKLQESGPGLVAPSQSLSVTCTVSGVSLPDYGVSWIRQPPRKGLEWLGVIWGSETTYYNSALKSRLTIIKDNSKSQVFLKMNSLQTDDTAIYYCAKHYYYGGSYAMDYWGQGTSVTVSSTRIQNPDPAVYQLRDSKSSDKSVCLFTDFDSQTNVSQSKDSDVYITDKTVLDMRSMDFKSNSAVAWSNKSDFACANAFNNSIIPEDTFFPSPESSCDVKLVEKSFETDTNLNFQILYESASESCCKWPALTCPCGCGPAAPREADLASRPISTCSWLATWNPTQALLEAIPSTSPRCASPPATTSPGPYAPSPPRSPTTPPRATPSIRTATSSGSPSCKNSSSRASGSTSARCGSRTTAPRWRSGPRRRASKRGRCSPRSARAWPSAVPGWPRSNRWKASWRRTGPRSPRGSWPPSASRPTTRARVWAAPSCSPEWRRPSAPGCPPSWRPPRPATSPSTSGSASPSPPTSRCPKDRAPGAPASPVP

SEQ ID NO: 16632 - protein, 856 aa, synthetic construct
MALPVTALLLPLALLLHAARPLEEDLKNVFPPEVAVFEPSEAEISHTQKATLVCLATGFYPDHVELSWWVNGKEVHSGVSTDPQPLKEQPALNDSRYCLSSRLRVSATFWQNPRNHFRCQVQFYGLSENDEWTQDRAKPVTQIVSAEAWGRADCGFTSESYQQGVLSATNLSVIGFRILLLKVAGFNLLMTLRLWSSRAKRSGSGATNFSLLKQAGDVEENPGPTSTMALPVTALLLPLALLLHAARPEIVMTQSPATLSLSPGERATLSCRASQDISKYLNWYQQKPGQAPRLLIYHTSRLHSGIPARFSGSGSGTDYTLTISSLQPEDFAVYFCQQGNTLPYTFGQGTKLEIKGGGGSGGGGSGGGGSQVQLQESGPGLVKPSETLSLTCTVSGVSLPDYGVSWIRQPPGKGLEWIGVIWGSETTYYNSSLKSRVTISKDNSKNQVSLKLSSVTAADTAVYYCAKHYYYGGSYAMDYWGQGTLVTVSSTRIQNPDPAVYQLRDSKSSDKSVCLFTDFDSQTNVSQSKDSDVYITDKTVLDMRSMDFKSNSAVAWSNKSDFACANAFNNSIIPEDTFFPSPESSCDVKLVEKSFETDTNLNFQILYESASESCCKWPALTCPCGCGPAAPREADLASRPISTCSWLATWNPTQALLEAIPSTSPRCASPPATTSPGPYAPSPPRSPTTPPRATPSIRTATSSGSPSCKNSSSRASGSTSARCGSRTTAPRWRSGPRRRASKRGRCSPRSARAWPSAVPGWPRSNRWKASWRRTGPRSPRGSWPPSASRPTTRARVWAAPSCSPEWRRPSAPGCPPSWRPPRPATSPSTSGSASPSPPTSRCPKDRAPGAPASPVP

SEQ ID NO: 16633 - protein, 857 aa, synthetic construct
MALPVTALLLPLALLLHAARPLEEDLKNVFPPEVAVFEPSEAEISHTQKATLVCLATGFYPDHVELSWWVNGKEVHSGVSTDPQPLKEQPALNDSRYCLSSRLRVSATFWQNPRNHFRCQVQFYGLSENDEWTQDRAKPVTQIVSAEAWGRADCGFTSESYQQGVLSATNLSVIGFRILLLKVAGFNLLMTLRLWSSRAKRSGSGATNFSLLKQAGDVEENPGPTSTMALPVTALLLPLALLLHAARPDEIVLTQSPATLSLSPGERATLSCSASSSVSYMHWYQQKPGQAPRLLIYDTSKLASGIPARFSGSGSGTDFTLTISSLEPEDVAVYYCFQGSVYPFTFGQGTKLEIKRGGGGSGGGGSGGGGSQVQLQESGPGLVKPSQTLSLTCTVSGGSISTSGMGVGWIRQHPGKGLEWIGHIWWDDDKRYNPALKSRVTISVDTSKNQFSLKLSSVTAADTAVYYCARMELWSYYFDYWGQGTLVTVSSTRIQNPDPAVYQLRDSKSSDKSVCLFTDFDSQTNVSQSKDSDVYITDKTVLDMRSMDFKSNSAVAWSNKSDFACANAFNNSIIPEDTFFPSPESSCDVKLVEKSFETDTNLNFQILYESASESCCKWPALTCPCGCGPAAPREADLASRPISTCSWLATWNPTQALLEAIPSTSPRCASPPATTSPGPYAPSPPRSPTTPPRATPSIRTATSSGSPSCKNSSSRASGSTSARCGSRTTAPRWRSGPRRRASKRGRCSPRSARAWPSAVPGWPRSNRWKASWRRTGPRSPRGSWPPSASRPTTRARVWAAPSCSPEWRRPSAPGCPPSWRPPRPATSPSTSGSASPSPPTSRCPKDRAPGAPASPVP

SEQ ID NO: 16634 - protein, 853 aa, synthetic construct
MALPVTALLLPLALLLHAARPLEEDLKNVFPPEVAVFEPSEAEISHTQKATLVCLATGFYPDHVELSWWVNGKEVHSGVSTDPQPLKEQPALNDSRYCLSSRLRVSATFWQNPRNHFRCQVQFYGLSENDEWTQDRAKPVTQIVSAEAWGRADCGFTSESYQQGVLSATNLSVIGFRILLLKVAGFNLLMTLRLWSSRAKRSGSGATNFSLLKQAGDVEENPGPTSMALPVTALLLPLALLLHAARPDIQMTQSPSSLSASVGDRVTITCRASQDISNYLNWYQQKPGKAPKLLIYYTSRLHSGVPSRFSGSGSGTDFTLTISSLQPEDFATYYCQQGNTLPYTFGQGTKVEIKRGGGGSGGGGSGGGGSEVQLVESGGGLVQPGGSLRLSCAASGFTFSDYFMSWVRQAPGKGLEWVATISNGGTYTYYPDSVKGRFTISRDNSKNTLYLQMNSLRAEDTAVYYCARFDGYIFDYWGQGTLVTVSSTRIQNPDPAVYQLRDSKSSDKSVCLFTDFDSQTNVSQSKDSDVYITDKTVLDMRSMDFKSNSAVAWSNKSDFACANAFNNSIIPEDTFFPSPESSCDVKLVEKSFETDTNLNFQILYESASESCCKWPALTCPCGCGPAAPREADLASRPISTCSWLATWNPTQALLEAIPSTSPRCASPPATTSPGPYAPSPPRSPTTPPRATPSIRTATSSGSPSCKNSSSRASGSTSARCGSRTTAPRWRSGPRRRASKRGRCSPRSARAWPSAVPGWPRSNRWKASWRRTGPRSPRGSWPPSASRPTTRARVWAAPSCSPEWRRPSAPGCPPSWRPPRPATSPSTSGSASPSPPTSRCPKDRAPGAPASPVP

SEQ ID NO: 16635 - protein, 857 aa, synthetic construct
MALPVTALLLPLALLLHAARPLEEDLKNVFPPEVAVFEPSEAEISHTQKATLVCLATGFYPDHVELSWWVNGKEVHSGVSTDPQPLKEQPALNDSRYCLSSRLRVSATFWQNPRNHFRCQVQFYGLSENDEWTQDRAKPVTQIVSAEAWGRADCGFTSESYQQGVLSATNLSVIGFRILLLKVAGFNLLMTLRLWSSRAKRSGSGATNFSLLKQAGDVEENPGPTSMALPVTALLLPLALLLHAARPDIQMTQSPSSLSASVGDRVTITCKASDHINNWLAWYQQKPGQAPKLLIYGATTLETGVPSRFSGSGSGTDYTLTISSLQPEDFATYYCQQSWNTPWTFGQGTKLEIKRGGGGSGGGGSGGGGSQVQLQQPGAELVKPGASVKMSCKASGYAFSSYWINWMKQKPGQGLEWIGQIYPGDGDTNYNGKFKGRATLTADTSSSTAYMQLSSLTSEDSAVYFCARSITTVVGCAMDYWGQGTSVTVSSTRIQNPDPAVYQLRDSKSSDKSVCLFTDFDSQTNVSQSKDSDVYITDKTVLDMRSMDFKSNSAVAWSNKSDFACANAFNNSIIPEDTFFPSPESSCDVKLVEKSFETDTNLNFQILYESASESCCKWPALTCPCGCGPAAPREADLASRPISTCSWLATWNPTQALLEAIPSTSPRCASPPATTSPGPYAPSPPRSPTTPPRATPSIRTATSSGSPSCKNSSSRASGSTSARCGSRTTAPRWRSGPRRRASKRGRCSPRSARAWPSAVPGWPRSNRWKASWRRTGPRSPRGSWPPSASRPTTRARVWAAPSCSPEWRRPSAPGCPPSWRPPRPATSPSTSGSASPSPPTSRCPKDRAPGAPASPVP

SEQ ID NO: 16636 - protein, 859 aa, synthetic construct
MALPVTALLLPLALLLHAARPLEEDLKNVFPPEVAVFEPSEAEISHTQKATLVCLATGFYPDHVELSWWVNGKEVHSGVSTDPQPLKEQPALNDSRYCLSSRLRVSATFWQNPRNHFRCQVQFYGLSENDEWTQDRAKPVTQIVSAEAWGRADCGFTSESYQQGVLSATNLSVIGFRILLLKVAGFNLLMTLRLWSSRAKRSGSGATNFSLLKQAGDVEENPGPTSMALPVTALLLPLALLLHAARPQIVLSQSPAILSASPGEKVTMTCRASSSVSYMHWYQQKPGSSPKPWIYATSNLASGVPARFSGSGSGTSYSFTISRVEAEDAATYYCQQWTFNPPTFGGGTRLEIKRTVAAGGGGSGGGGSGGGGSQAYLQQSGAELVRPGASVKMSCKASGYTFTSYNMHWVKQTPRQGLEWIGGIYPGNGDTSYNQKFKGKATLTVGKSSSTAYMQLSSLTSEDSAVYFCARYDYNYAMDYWGQGTSVTVSSASTRIQNPDPAVYQLRDSKSSDKSVCLFTDFDSQTNVSQSKDSDVYITDKTVLDMRSMDFKSNSAVAWSNKSDFACANAFNNSIIPEDTFFPSPESSCDVKLVEKSFETDTNLNFQILYESASESCCKWPALTCPCGCGPAAPREADLASRPISTCSWLATWNPTQALLEAIPSTSPRCASPPATTSPGPYAPSPPRSPTTPPRATPSIRTATSSGSPSCKNSSSRASGSTSARCGSRTTAPRWRSGPRRRASKRGRCSPRSARAWPSAVPGWPRSNRWKASWRRTGPRSPRGSWPPSASRPTTRARVWAAPSCSPEWRRPSAPGCPPSWRPPRPATSPSTSGSASPSPPTSRCPKDRAPGAPASPVP

SEQ ID NO: 16637 - protein, 857 aa, synthetic construct
MALPVTALLLPLALLLHAARPLEEDLKNVFPPEVAVFEPSEAEISHTQKATLVCLATGFYPDHVELSWWVNGKEVHSGVSTDPQPLKEQPALNDSRYCLSSRLRVSATFWQNPRNHFRCQVQFYGLSENDEWTQDRAKPVTQIVSAEAWGRADCGFTSESYQQGVLSATNLSVIGFRILLLKVAGFNLLMTLRLWSSRAKRSGSGATNFSLLKQAGDVEENPGPTSMALPVTALLLPLALLLHAARPEIVLTQSPATLSLSPGERATLSCRASQSVSSYLAWYQQKPGQAPRLLIYDASNRATGIPARFSGSGSGTDFTLTISSLEPEDFAVYYCQQRSNWPITFGQGTRLEIKGGGGSGGGGSGGGGSEVQLVESGGGLVQPDRSLRLSCAASGFTFHDYAMHWVRQAPGKGLEWVSTISWNSGTIGYADSVKGRFTISRDNAKNSLYLQMNSLRAEDTALYYCAKDIQYGNYYYGMDVWGQGTTVTVSSTRIQNPDPAVYQLRDSKSSDKSVCLFTDFDSQTNVSQSKDSDVYITDKTVLDMRSMDFKSNSAVAWSNKSDFACANAFNNSIIPEDTFFPSPESSCDVKLVEKSFETDTNLNFQILYESASESCCKWPALTCPCGCGPAAPREADLASRPISTCSWLATWNPTQALLEAIPSTSPRCASPPATTSPGPYAPSPPRSPTTPPRATPSIRTATSSGSPSCKNSSSRASGSTSARCGSRTTAPRWRSGPRRRASKRGRCSPRSARAWPSAVPGWPRSNRWKASWRRTGPRSPRGSWPPSASRPTTRARVWAAPSCSPEWRRPSAPGCPPSWRPPRPATSPSTSGSASPSPPTSRCPKDRAPGAPASPVP

SEQ ID NO: 16638 - protein, 855 aa, synthetic construct
MALPVTALLLPLALLLHAARPLEEDLKNVFPPEVAVFEPSEAEISHTQKATLVCLATGFYPDHVELSWWVNGKEVHSGVSTDPQPLKEQPALNDSRYCLSSRLRVSATFWQNPRNHFRCQVQFYGLSENDEWTQDRAKPVTQIVSAEAWGRADCGFTSESYQQGVLSATNLSVIGFRILLLKVAGFNLLMTLRLWSSRAKRSGSGATNFSLLKQAGDVEENPGPTSMALPVTALLLPLALLLHAARPDIQMTQSPSSLSASVGDRVTITCRASQDVNTAVAWYQQKPGKAPKLLIYSASFLESGVPSRFSGSRSGTDFTLTISSLQPEDFATYYCQQHYTTPPTFGQTKVEIKRGGGGSGGGGSGGGGSEVQLVESGGGLVQPGGSLRLSCAASGFNIKDTYIHWVRQAPGKGLEWVARIYPTNGYTRYADSVKGRFTISADTSKNTAYLQMNSLRAEDTAVYYCSRWGGDGFYAMDVWGQGTLVTVSSTRIQNPDPAVYQLRDSKSSDKSVCLFTDFDSQTNVSQSKDSDVYITDKTVLDMRSMDFKSNSAVAWSNKSDFACANAFNNSIIPEDTFFPSPESSCDVKLVEKSFETDTNLNFQILYESASESCCKWPALTCPCGCGPAAPREADLASRPISTCSWLATWNPTQALLEAIPSTSPRCASPPATTSPGPYAPSPPRSPTTPPRATPSIRTATSSGSPSCKNSSSRASGSTSARCGSRTTAPRWRSGPRRRASKRGRCSPRSARAWPSAVPGWPRSNRWKASWRRTGPRSPRGSWPPSASRPTTRARVWAAPSCSPEWRRPSAPGCPPSWRPPRPATSPSTSGSASPSPPTSRCPKDRAPGAPASPVP

SEQ ID NO: 16639 - protein, 734 aa, synthetic construct
MALPVTALLLPLALLLHAARPLEEDLKNVFPPEVAVFEPSEAEISHTQKATLVCLATGFYPDHVELSWWVNGKEVHSGVSTDPQPLKEQPALNDSRYCLSSRLRVSATFWQNPRNHFRCQVQFYGLSENDEWTQDRAKPVTQIVSAEAWGRADCGFTSESYQQGVLSATNLSVIGFRILLLKVAGFNLLMTLRLWSSRAKRSGSGATNFSLLKQAGDVEENPGPTSMALPVTALLLPLALLLHAARPDEFEVQLVESGGGLVQAGGSLRLSCAASGITFSINTMGWYRQAPGKQRELVALISSIGDTYYADSVKGRFTISRDNAKNTVYLQMNSLKPEDTAVYYCKRFRTAAQGTDYWGQGTQVTVSSTRIQNPDPAVYQLRDSKSSDKSVCLFTDFDSQTNVSQSKDSDVYITDKTVLDMRSMDFKSNSAVAWSNKSDFACANAFNNSIIPEDTFFPSPESSCDVKLVEKSFETDTNLNFQILYESASESCCKWPALTCPCGCGPAAPREADLASRPISTCSWLATWNPTQALLEAIPSTSPRCASPPATTSPGPYAPSPPRSPTTPPRATPSIRTATSSGSPSCKNSSSRASGSTSARCGSRTTAPRWRSGPRRRASKRGRCSPRSARAWPSAVPGWPRSNRWKASWRRTGPRSPRGSWPPSASRPTTRARVWAAPSCSPEWRRPSAPGCPPSWRPPRPATSPSTSGSASPSPPTSRCPKDRAPGAPASPVP

SEQ ID NO: 16640 - protein, 734 aa, synthetic construct; identical to SEQ ID NO: 16639

SEQ ID NO: 16641 - protein, 999 aa, synthetic construct
MALPVTALLLPLALLLHAARPLEEDLKNVFPPEVAVFEPSEAEISHTQKATLVCLATGFYPDHVELSWWVNGKEVHSGVSTDPQPLKEQPALNDSRYCLSSRLRVSATFWQNPRNHFRCQVQFYGLSENDEWTQDRAKPVTQIVSAEAWGRADCGFTSESYQQGVLSATNLSVIGFRILLLKVAGFNLLMTLRLWSSRAKRSGSGATNFSLLKQAGDVEENPGPTSMALPVTALLLPLALLLHAARPQVQLVESGGGLVQAGDSVTLSCTASGRTFSSYALAWFRQRPGKEREFVAGLRWGGPTNYADSVKDRFTISGDSAKHTMYLQMNSLKPEDTAVYYCGYNPGGWAVPSQYEYDSWGQGTQVTVSSGTGGGGSGGGGSGGGGSEFDIQMTQSPSSLSASVGDRVTITCKASDHINNWLAWYQQKPGQAPKLLIYGATTLETGVPSRFSGSGSGTDYTLTISSLQPEDFATYYCQQSWNTPWTFGQGTKLEIKRGGGGSGGGGSGGGGSQVQLQQPGAELVKPGASVKMSCKASGYAFSSYWINWMKQKPGQGLEWIGQIYPGDGDTNYNGKFKGRATLTADTSSSTAYMQLSSLTSEDSAVYFCARSITTVVGCAMDYWGQGTSVTVSSTRIQNPDPAVYQLRDSKSSDKSVCLFTDFDSQTNVSQSKDSDVYITDKTVLDMRSMDFKSNSAVAWSNKSDFACANAFNNSIIPEDTFFPSPESSCDVKLVEKSFETDTNLNFQILYESASESCCKWPALTCPCGCGPAAPREADLASRPISTCSWLATWNPTQALLEAIPSTSPRCASPPATTSPGPYAPSPPRSPTTPPRATPSIRTATSSGSPSCKNSSSRASGSTSARCGSRTTAPRWRSGPRRRASKRGRCSPRSARAWPSAVPGWPRSNRWKASWRRTGPRSPRGSWPPSASRPTTRARVWAAPSCSPEWRRPSAPGCPPSWRPPRPATSPSTSGSASPSPPTSRCPKDRAPGAPASPVP

SEQ ID NO: 16642 - protein, 1128 aa, synthetic construct
MALPVTALLLPLALLLHAARPLEEDLKNVFPPEVAVFEPSEAEISHTQKATLVCLATGFYPDHVELSWWVNGKEVHSGVSTDPQPLKEQPALNDSRYCLSSRLRVSATFWQNPRNHFRCQVQFYGLSENDEWTQDRAKPVTQIVSAEAWGRADCGFTSESYQQGVLSATNLSVIGFRILLLKVAGFNLLMTLRLWSSRAKRSGSGATNFSLLKQAGDVEENPGPTSMALPVTALLLPLALLLHAARPEVQLLESGGGLVQPGGSLRLSCAASGFTFSSYAMSWVRQAPGKGLEWVSSISGSGDYIYYADSVKGRFTISRDISKNTLYLQMNSLRAEDTAVYYCAKEGTGANSSLADYRGQGTLVTVSSGGGSGGGSQVQLVESGGGLVQAGDSVTLSCTASGRTFSSYALAWFRQRPGKEREFVAGLRWGGPTNYADSVKDRFTISGDSAKHTMYLQMNSLKPEDTAVYYCGYNPGGWAVPSQYEYDSWGQGTQVTVSSGTGGGGSGGGGSGGGGSEFDIQMTQSPSSLSASVGDRVTITCKASDHINNWLAWYQQKPGQAPKLLIYGATTLETGVPSRFSGSGSGTDYTLTISSLQPEDFATYYCQQSWNTPWTFGQGTKLEIKRGGGGSGGGGSGGGGSQVQLQQPGAELVKPGASVKMSCKASGYAFSSYWINWMKQKPGQGLEWIGQIYPGDGDTNYNGKFKGRATLTADTSSSTAYMQLSSLTSEDSAVYFCARSITTVVGCAMDYWGQGTSVTVSSTRIQNPDPAVYQLRDSKSSDKSVCLFTDFDSQTNVSQSKDSDVYITDKTVLDMRSMDFKSNSAVAWSNKSDFACANAFNNSIIPEDTFFPSPESSCDVKLVEKSFETDTNLNFQILYESASESCCKWPALTCPCGCGPAAPREADLASRPISTCSWLATWNPTQALLEAIPSTSPRCASPPATTSPGPYAPSPPRSPTTPPRATPSIRTATSSGSPSCKNSSSRASGSTSARCGSRTTAPRWRSGPRRRASKRGRCSPRSARAWPSAVPGWPRSNRWKASWRRTGPRSPRGSWPPSASRPTTRARVWAAPSCSPEWRRPSAPGCPPSWRPPRPATSPSTSGSASPSPPTSRCPKDRAPGAPASPVP

SEQ ID NO: 16643 - protein, 1128 aa, synthetic construct; identical to SEQ ID NO: 16642

SEQ ID NO: 16644 - protein, 740 aa, synthetic construct
MALPVTALLLPLALLLHAARPLEEDLKNVFPPEVAVFEPSEAEISHTQKATLVCLATGFYPDHVELSWWVNGKEVHSGVSTDPQPLKEQPALNDSRYCLSSRLRVSATFWQNPRNHFRCQVQFYGLSENDEWTQDRAKPVTQIVSAEAWGRADCGFTSESYQQGVLSATNLSVIGFRILLLKVAGFNLLMTLRLWSSRAKRSGSGATNFSLLKQAGDVEENPGPTSMALPVTALLLPLALLLHAARPDEFGSDLGIKLLFAAAKGQDDEVRILLAAGADVNAKDFEGYTPLHVAAYDGHLEIVEVLLKAGADVNAKDSQGRTPLHEAAYSGHLEIVEVLLKAGADVNAQDDAGETPADLAAAWGHEDIAEVLQKTRIQNPDPAVYQLRDSKSSDKSVCLFTDFDSQTNVSQSKDSDVYITDKTVLDMRSMDFKSNSAVAWSNKSDFACANAFNNSIIPEDTFFPSPESSCDVKLVEKSFETDTNLNFQILYESASESCCKWPALTCPCGCGPAAPREADLASRPISTCSWLATWNPTQALLEAIPSTSPRCASPPATTSPGPYAPSPPRSPTTPPRATPSIRTATSSGSPSCKNSSSRASGSTSARCGSRTTAPRWRSGPRRRASKRGRCSPRSARAWPSAVPGWPRSNRWKASWRRTGPRSPRGSWPPSASRPTTRARVWAAPSCSPEWRRPSAPGCPPSWRPPRPATSPSTSGSASPSPPTSRCPKDRAPGAPASPVP

SEQ ID NO: 16645 - protein, 669 aa, synthetic construct
MALPVTALLLPLALLLHAARPLEEDLKNVFPPEVAVFEPSEAEISHTQKATLVCLATGFYPDHVELSWWVNGKEVHSGVSTDPQPLKEQPALNDSRYCLSSRLRVSATFWQNPRNHFRCQVQFYGLSENDEWTQDRAKPVTQIVSAEAWGRADCGFTSESYQQGVLSATNLSVIGFRILLLKVAGFNLLMTLRLWSSRAKRSGSGATNFSLLKQAGDVEENPGPTSMDWIWRILFLVGAATGAHSFEGSGFEYAKEMRNAYWEIALLPNLTNQQKRAPIRKLYDDPSQSSELLSEAKKLNDSQTRIQNPDPAVYQLRDSKSSDKSVCLFTDFDSQTNVSQSKDSDVYITDKTVLDMRSMDFKSNSAVAWSNKSDFACANAFNNSIIPEDTFFPSPESSCDVKLVEKSFETDTNLNFQILYESASESCCKWPALTCPCGCGPAAPREADLASRPISTCSWLATWNPTQALLEAIPSTSPRCASPPATTSPGPYAPSPPRSPTTPPRATPSIRTATSSGSPSCKNSSSRASGSTSARCGSRTTAPRWRSGPRRRASKRGRCSPRSARAWPSAVPGWPRSNRWKASWRRTGPRSPRGSWPPSASRPTTRARVWAAPSCSPEWRRPSAPGCPPSWRPPRPATSPSTSGSASPSPPTSRCPKDRAPGAPASPVP

SEQ ID NO: 16646 - protein, 891 aa, synthetic construct
MALPVTALLLPLALLLHAARPLEEDLKNVFPPEVAVFEPSEAEISHTQKATLVCLATGFYPDHVELSWWVNGKEVHSGVSTDPQPLKEQPALNDSRYCLSSRLRVSATFWQNPRNHFRCQVQFYGLSENDEWTQDRAKPVTQIVSAEAWGRADCGFTSESYQQGVLSATNLSVIGFRILLLKVAGFNLLMTLRLWSSRAKRSGSGATNFSLLKQAGDVEENPGPTSMALPVTALLLPLALLLHAARPDEFEVQLVESGGGLVQAGGSLRLSCAASGITFSINTMGWYRQAPGKQRELVALISSIGDTYYADSVKGRFTISRDNAKNTVYLQMNSLKPEDTAVYYCKRFRTAAQGTDYWGQGTQVTVSSLEGGGGSGGGGSGGGGSGSGGSGSGGSGSGGSGSGGSFEVQLVESGGGLVQPGGSLRLSCAASGSIFGFNDMAWYRQAPGKQRELVALISRVGVTSSADSVKGRFTISRVNAKDTVYLQMNSLKPEDTAVYYCYMDQRLDGSTLAYWGQGTQVTVSSTRIQNPDPAVYQLRDSKSSDKSVCLFTDFDSQTNVSQSKDSDVYITDKTVLDMRSMDFKSNSAVAWSNKSDFACANAFNNSIIPEDTFFPSPESSCDVKLVEKSFETDTNLNFQILYESASESCCKWPALTCPCGCGPAAPREADLASRPISTCSWLATWNPTQALLEAIPSTSPRCASPPATTSPGPYAPSPPRSPTTPPRATPSIRTATSSGSPSCKNSSSRASGSTSARCGSRTTAPRWRSGPRRRASKRGRCSPRSARAWPSAVPGWPRSNRWKASWRRTGPRSPRGSWPPSASRPTTRARVWAAPSCSPEWRRPSAPGCPPSWRPPRPATSPSTSGSASPSPPTSRCPKDRAPGAPASPVP

SEQ ID NO: 16647 - protein, 805 aa, synthetic construct
MALPVTALLLPLALLLHAARPLEEDLKNVFPPEVAVFEPSEAEISHTQKATLVCLATGFYPDHVELSWWVNGKEVHSGVSTDPQPLKEQPALNDSRYCLSSRLRVSATFWQNPRNHFRCQVQFYGLSENDEWTQDRAKPVTQIVSAEAWGRADCGFTSESYQQGVLSATNLSVIGFRILLLKVAGFNLLMTLRLWSSRAKRSGSGATNFSLLKQAGDVEENPGPTSMALPVTALLLPLALLLHAARPGMRTEDLPKAVVFLEPQWYRVLEKDSVTLKCQGAYSPEDNSTQWFHNESLISSQASSYFIDAATVDDSGEYRCQTNLSTLSDPVQLEVHIGWLLLQAPRWVFKEEDPIHLRCHSWKNTALHKVTYLQNGKGRKYFHHNSDFYIPKATLKDSGSYFCRGLVGSKNVSSETVNITITQGLAVSTISSFFPPGYQTRIQNPDPAVYQLRDSKSSDKSVCLFTDFDSQTNVSQSKDSDVYITDKTVLDMRSMDFKSNSAVAWSNKSDFACANAFNNSIIPEDTFFPSPESSCDVKLVEKSFETDTNLNFQILYESASESCCKWPALTCPCGCGPAAPREADLASRPISTCSWLATWNPTQALLEAIPSTSPRCASPPATTSPGPYAPSPPRSPTTPPRATPSIRTATSSGSPSCKNSSSRASGSTSARCGSRTTAPRWRSGPRRRASKRGRCSPRSARAWPSAVPGWPRSNRWKASWRRTGPRSPRGSWPPSASRPTTRARVWAAPSCSPEWRRPSAPGCPPSWRPPRPATSPSTSGSASPSPPTSRCPKDRAPGAPASPVP

SEQ ID NO: 16648 - protein, 807 aa, synthetic construct
MALPVTALLLPLALLLHAARPLEEDLKNVFPPEVAVFEPSEAEISHTQKATLVCLATGFYPDHVELSWWVNGKEVHSGVSTDPQPLKEQPALNDSRYCLSSRLRVSATFWQNPRNHFRCQVQFYGLSENDEWTQDRAKPVTQIVSAEAWGRADCGFTSESYQQGVLSATNLSVIGFRILLLKVAGFNLLMTLRLWSSRAKRSGSGATNFSLLKQAGDVEENPGPTSATMALPVTALLLPLALLLHAARPGMRTEDLPKAVVFLEPQWYRVLEKDSVTLKCQGAYSPEDNSTQWFHNESLISSQASSYFIDAATVDDSGEYRCQTNLSTLSDPVQLEVHIGWLLLQAPRWVFKEEDPIHLRCHSWKNTALHKVTYLQNGKGRKYFHHNSDFYIPKATLKDSGSYFCRGLVGSKNVSSETVNITITQGLAVSTISSFFPPGYQTRIQNPDPAVYQLRDSKSSDKSVCLFTDFDSQTNVSQSKDSDVYITDKTVLDMRSMDFKSNSAVAWSNKSDFACANAFNNSIIPEDTFFPSPESSCDVKLVEKSFETDTNLNFQILYESASESCCKWPALTCPCGCGPAAPREADLASRPISTCSWLATWNPTQALLEAIPSTSPRCASPPATTSPGPYAPSPPRSPTTPPRATPSIRTATSSGSPSCKNSSSRASGSTSARCGSRTTAPRWRSGPRRRASKRGRCSPRSARAWPSAVPGWPRSNRWKASWRRTGPRSPRGSWPPSASRPTTRARVWAAPSCSPEWRRPSAPGCPPSWRPPRPATSPSTSGSASPSPPTSRCPKDRAPGAPASPVP

SEQ ID NO: 16649 - protein, 832 aa, synthetic construct
MALPVTALLLPLALLLHAARPLEIQNPDPAVYQLRDSKSSDKSVCLFTDFDSQTNVSQSKDSDVYITDKTVLDMRSMDFKSNSAVAWSNKSDFACANAFNNSIIPEDTFFPSPESSCDVKLVEKSFETDTNLNFQILYESASESCCKWPALTCPCGCGPAGPSDLDLEQQTSHYSNKQVTWRRIPGLLAWPYQPPCSCRWPCCSTPPGRTSRHRLHPPCLPLWETESPSVAGQVRTLVNIIGISRNQMELLNSSTIHQDYTQESHQGSVAVGLEQIILSPLATWSKKILPLTFANRVIRFRTRSEGGPSWRSQVAVARAVVGRVAADLRNCRSQDLAWWRPHRACPSHALSQGSHYPTMVAGFASLHERVWSGWEYGVVKPHTIIQLSNPDPSSRTTPRAKFSKTVCKLMTQPFTTVPNIITTVVAMLWTTGVKEPQSPSPQRVRTRTCSHLRWPCSSLARPRSATPRKPPSCAWLPASTPTMWNCLGGSTAKRCTAACLPTPSHKNSPPTTAGTAAADECPPPSGRTPGTTSDARCSSTAARTTSGPRTEPSPPRSCLPKPGAEPIAALPARATSRACAPPTASASESCCKWPALTCPCGCGPAAPREADLASRPISTCSWLATWNPTQALLEAIPSTSPRCASPPATTSPGPYAPSPPRSPTTPPRATPSIRTATSSGSPSCKNSSSRASGSTSARCGSRTTAPRWRSGPRRRASKRGRCSPRSARAWPSAVPGWPRSNRWKASWRRTGPRSPRGSWPPSASRPTTRARVWAAPSCSPEWRRPSAPGCPPSWRPPRPATSPSTSGSASPSPPTSRCPKDRAPGAPASPVP

SEQ ID NO: 16650 - protein, 825 aa, synthetic construct
MALPVTALLLPLALLLHAARPLEIQNPDPAVYQLRDSKSSDKSVCLFTDFDSQTNVSQSKDSDVYITDKTVLDMRSMDFKSNSAVAWSNKSDFACANAFNNSIIPEDTFFPSPESSCDVKLVEKSFETDTNLNFQILYESASESCCKWPALTCPCGCGPAGPSDLDLEQQTSHYSNKQVTWRRIPGLLAPWPYQPPCSCRWPCCSTPPGRRSPRALPPCLALAKEPPAVEPARTSASTTGISRSPARPPDCSTTPADCTAASPPDFLALAAAPTTPQSAASSPRTSPCTSVSKATPCPTPSARAPSWKSRAEAEVEAEDLAAEALRCNSRNLALASSPARHAPVPCPACPCLTMACPGSDSPLARAWNGSEFGAAKPPTTTAPSPEPSPRTTPRTRCPSAAQPPTPPCITAPSTTTTAAATLWTTGAREPSPCLVRVRTRTCSHLRWPCSSLARPRSATPRKPPSCAWLPASTPTMWNCLGGSTAKRCTAACLPTPSHKNSPPTTAGTAAADECPPPSGRTPGTTSDARCSSTAARTTSGPRTEPSPPRSCLPKPGAEPIAALPARATSRACAPPTASASESCCKWPALTCPCGCGPAAPREADLASRPISTCSWLATWNPTQALLEAIPSTSPRCASPPATTSPGPYAPSPPRSPTTPPRATPSIRTATSSGSPSCKNSSSRASGSTSARCGSRTTAPRWRSGPRRRASKRGRCSPRSARAWPSAVPGWPRSNRWKASWRRTGPRSPRGSWPPSASRPTTRARVWAAPSCSPEWRRPSAPGCPPSWRPPRPATSPSTSGSASPSPPTSRCPKDRAPGAPASPVP

SEQ ID NO: 16651 - protein, 830 aa, synthetic construct
MALPVTALLLPLALLLHAARPLEIQNPDPAVYQLRDSKSSDKSVCLFTDFDSQTNVSQSKDSDVYITDKTVLDMRSMDFKSNSAVAWSNKSDFACANAFNNSIIPEDTFFPSPESSCDVKLVEKSFETDTNLNFQILYESASESCCKWPALTCPCGCGPAGPSDLDLEQQTSHYSNKQVTWRRIPGLLAPWPYQPPCSCRWPCCSTPPGRTRSCHRAPPPCHCLQAKEPPAVAPAAACPTCTGISRSPARPPDCSTIPASWPPASPPDFLAAAPAPTSPQSAAWNPRTWPCTTVFKAACTPSPSARAPSWKSREVAVARAVVGRVAADLRCSSRNLALASSLARPAPVPCLAAASAQAAWAWAGSDSTLARAWNGSATFGGTTTSGTTPPSPEPSAWTPARTSSASAAQPPIPPCIIAPGWNCGPTTSTTGAREPSPCLVRVRTRTCSHLRWPCSSLARPRSATPRKPPSCAWLPASTPTMWNCLGGSTAKRCTAACLPTPSHKNSPPTTAGTAAADECPPPSGRTPGTTSDARCSSTAARTTSGPRTEPSPPRSCLPKPGAEPIAALPARATSRACAPPTASASESCCKWPALTCPCGCGPAAPREADLASRPISTCSWLATWNPTQALLEAIPSTSPRCASPPATTSPGPYAPSPPRSPTTPPRATPSIRTATSSGSPSCKNSSSRASGSTSARCGSRTTAPRWRSGPRRRASKRGRCSPRSARAWPSAVPGWPRSNRWKASWRRTGPRSPRGSWPPSASRPTTRARVWAAPSCSPEWRRPSAPGCPPSWRPPRPATSPSTSGSASPSPPTSRCPKDRAPGAPASPVP

SEQ ID NO: 16652 - protein, 828 aa, synthetic construct
MALPVTALLLPLALLLHAARPLEIQNPDPAVYQLRDSKSSDKSVCLFTDFDSQTNVSQSKDSDVYITDKTVLDMRSMDFKSNSAVAWSNKSDFACANAFNNSIIPEDTFFPSPESSCDVKLVEKSFETDTNLNFQILYESASESCCKWPALTCPCGCGPAGPSDLDLEQQTSHYSNKQVTWRRIPGLLAWPYQPPCSCRWPCCSTPPGRTSRHRALAACLPAWETEPSPVEPARTSATTTGISRSPARPLSCSTTPADCTAACPADFLALAAAPTSPQYLASSLRTSPPTIASRATPCLTHLDRAPRWKSREAEAEVEAEDLAAEALKCSWLNQVAAWFNLADLDAVPPAASPSATTLAGSDRPLAKDLNGSPPSAMAAPTLTTPTARADSPSPETTARTPCTSRTPEPRTPPCTTAPDSTATSSTIGARAPWSQSLLRVRTRTCSHLRWPCSSLARPRSATPRKPPSCAWLPASTPTMWNCLGGSTAKRCTAACLPTPSHKNSPPTTAGTAAADECPPPSGRTPGTTSDARCSSTAARTTSGPRTEPSPPRSCLPKPGAEPIAALPARATSRACAPPTASASESCCKWPALTCPCGCGPAAPREADLASRPISTCSWLATWNPTQALLEAIPSTSPRCASPPATTSPGPYAPSPPRSPTTPPRATPSIRTATSSGSPSCKNSSSRASGSTSARCGSRTTAPRWRSGPRRRASKRGRCSPRSARAWPSAVPGWPRSNRWKASWRRTGPRSPRGSWPPSASRPTTRARVWAAPSCSPEWRRPSAPGCPPSWRPPRPATSPSTSGSASPSPPTSRCPKDRAPGAPASPVP

SEQ ID NO: 16653 - protein, 832 aa, synthetic construct
MALPVTALLLPLALLLHAARPLEIQNPDPAVYQLRDSKSSDKSVCLFTDFDSQTNVSQSKDSDVYITDKTVLDMRSMDFKSNSAVAWSNKSDFACANAFNNSIIPEDTFFPSPESSCDVKLVEKSFETDTNLNFQILYESASESCCKWPALTCPCGCGPAGPSDLDLEQQTSHYSNKQVTWRRIPGLLAWPYQPPCSCRWPCCSTPPGRTSRHRALAACLPAWETEPSHARPATTSTTGWPGISRSLDRPLSCSTALPHWKQACPADFLAAALAPTTPQYPASSLRTSPPTTVSRAGTPLGHSARAPSWKSREAEAEVEAEDLAAEALKFSFNSLALSWSNLALLRAAKPAATPSAATGSTGSRNPARDSNGSAKSIPATATPTTTASSRAEPHPPIPLAAQPTCSAAPAKIAPCTSVPGPSQQSWAALWTIGAREQAPCLVRVRTRTCSHLRWPCSSLARPRSATPRKPPSCAWLPASTPTMWNCLGGSTAKRCTAACLPTPSHKNSPPTTAGTAAADECPPPSGRTPGTTSDARCSSTAARTTSGPRTEPSPPRSCLPKPGAEPIAALPARATSRACAPPTASASESCCKWPALTCPCGCGPAAPREADLASRPISTCSWLATWNPTQALLEAIPSTSPRCASPPATTSPGPYAPSPPRSPTTPPRATPSIRTATSSGSPSCKNSSSRASGSTSARCGSRTTAPRWRSGPRRRASKRGRCSPRSARAWPSAVPGWPRSNRWKASWRRTGPRSPRGSWPPSASRPTTRARVWAAPSCSPEWRRPSAPGCPPSWRPPRPATSPSTSGSASPSPPTSRCPKDRAPGAPASPVP

SEQ ID NO: 16654 - protein, 837 aa, synthetic construct
MALPVTALLLPLALLLHAARPLEIQNPDPAVYQLRDSKSSDKSVCLFTDFDSQTNVSQSKDSDVYITDKTVLDMRSMDFKSNSAVAWSNKSDFACANAFNNSIIPEDTFFPSPESSCDVKLVEKSFETDTNLNFQILYESASESCCKWPALTCPCGCGPAGPSDLDLEQQTSHYSNKQVTWRRIPGLLAWPYQPPCSCRWPCCSTPPGRRSCCLSLLPSALPQARKPPVEPAAACPTCTGISRSPAAALSLGSTPPAIWPLACQPDFLALAAAPATASQSAEWKPRTPPPTIVSSGPSILLPSAEAPGWKSKEQWLLAEAEVEAEDLAAEALRLICNRAEPNSSDLALLRAARPAATPSPAIICTGSSRPLGRDSNGSAESIPATATPPTTRSSRAKPHPWARAAAPPICSSAAPARTAPCTSAPDTTTTTLWTTGARAPAQLALPARVRTRTCSHLRWPCSSLARPRSATPRKPPSCAWLPASTPTMWNCLGGSTAKRCTAACLPTPSHKNSPPTTAGTAAADECPPPSGRTPGTTSDARCSSTAARTTSGPRTEPSPPRSCLPKPGAEPIAALPARATSRACAPPTASASESCCKWPALTCPCGCGPAAPREADLASRPISTCSWLATWNPTQALLEAIPSTSPRCASPPATTSPGPYAPSPPRSPTTPPRATPSIRTATSSGSPSCKNSSSRASGSTSARCGSRTTAPRWRSGPRRRASKRGRCSPRSARAWPSAVPGWPRSNRWKASWRRTGPRSPRGSWPPSASRPTTRARVWAAPSCSPEWRRPSAPGCPPSWRPPRPATSPSTSGSASPSPPTSRCPKDRAPGAPASPVP

SEQ ID NO: 16655 - protein, 833 aa, synthetic construct
MALPVTALLLPLALLLHAARPLEIQNPDPAVYQLRDSKSSDKSVCLFTDFDSQTNVSQSKDSDVYITDKTVLDMRSMDFKSNSAVAWSNKSDFACANAFNNSIIPEDTFFPSPESSCDVKLVEKSFETDTNLNFQILYESASESCCKWPALTCPCGCGPAGPSDLDLEQQTSHYSNKQVTWRRIPGLLAWPYQPPCSCRWPCCSTPPGRRSCHRALPPCLALAKEPPAVEPARACPATWPGISRSPARLPGCSTMPAIEPPASPPDFPALAAAPTSPPSAPWNPRTSPCTTASSGATGPSHSARAPGWKSKAEAEVEAEDLAAEALRCSLLSLAEDWCSPIEADCLVPPAASPSTIMPCTGSDRPLAKDLNGCPPSLGTAAQSATPTLRADSPSAGTTPRTACTSRTPEPRTQPCTTAPRTSSTATTTTAWTCGARAQQQSLLRVRTRTCSHLRWPCSSLARPRSATPRKPPSCAWLPASTPTMWNCLGGSTAKRCTAACLPTPSHKNSPPTTAGTAAADECPPPSGRTPGTTSDARCSSTAARTTSGPRTEPSPPRSCLPKPGAEPIAALPARATSRACAPPTASASESCCKWPALTCPCGCGPAAPREADLASRPISTCSWLATWNPTQALLEAIPSTSPRCASPPATTSPGPYAPSPPRSPTTPPRATPSIRTATSSGSPSCKNSSSRASGSTSARCGSRTTAPRWRSGPRRRASKRGRCSPRSARAWPSAVPGWPRSNRWKASWRRTGPRSPRGSWPPSASRPTTRARVWAAPSCSPEWRRPSAPGCPPSWRPPRPATSPSTSGSASPSPPTSRCPKDRAPGAPASPVP

SEQ ID NO: 16656 - protein, 831 aa, synthetic construct
MALPVTALLLPLALLLHAARPLEIQNPDPAVYQLRDSKSSDKSVCLFTDFDSQTNVSQSKDSDVYITDKTVLDMRSMDFKSNSAVAWSNKSDFACANAFNNSIIPEDTFFPSPESSCDVKLVEKSFETDTNLNFQILYESASESCCKWPALTCPCGCGPAGPSDLDLEQQTSHYSNKQVTWRRIPGLLAWPYQPPCSCRWPCCSTPPGRTSRPRAPAACLPAWATEPSPVEPARTTPPWPGISRSLARPPSCSTAPASWKAACPADSAEAEAAPTSPPSAPSSPRTSPPTTASSTTPPLPPSARPRWKSREAEAEVEAEDLAAEALKCNWWNLAADWCSLADLDAVPPAASTSRTPTSTGCARPLERDWNGWPGSTPPTATPDTPTARAGSPSAPTPARIPPTSRTACGPRIPPCTTAQDGEATASTLWTCGARAPLPCHLRVRTRTCSHLRWPCSSLARPRSATPRKPPSCAWLPASTPTMWNCLGGSTAKRCTAACLPTPSHKNSPPTTAGTAAADECPPPSGRTPGTTSDARCSSTAARTTSGPRTEPSPPRSCLPKPGAEPIAALPARATSRACAPPTASASESCCKWPALTCPCGCGPAAPREADLASRPISTCSWLATWNPTQALLEAIPSTSPRCASPPATTSPGPYAPSPPRSPTTPPRATPSIRTATSSGSPSCKNSSSRASGSTSARCGSRTTAPRWRSGPRRRASKRGRCSPRSARAWPSAVPGWPRSNRWKASWRRTGPRSPRGSWPPSASRPTTRARVWAAPSCSPEWRRPSAPGCPPSWRPPRPATSPSTSGSASPSPPTSRCPKDRAPGAPASPVP

SEQ ID NO: 16657 - protein, 713 aa, synthetic construct
MALPVTALLLPLALLLHAARPLEIQNPDPAVYQLRDSKSSDKSVCLFTDFDSQTNVSQSKDSDVYITDKTVLDMRSMDFKSNSAVAWSNKSDFACANAFNNSIIPEDTFFPSPESSCDVKLVEKSFETDTNLNFQILYESASESCCKWPALTCPCGCGPAGPSDLDLEQQTSHYSNKQVTWRRIPGLLAWPCPQPCCCLWLCCCTPPDPMNSRCNWWKAAEAWCRLADLDAVPPAASPSASTQWAGTDRPLASRGNWWPSPASATPTTPTARAGSPSAGTTPRTPCTSRTASPRTPPCTTASGSEQPPRAPIIGAREHKPCPLRVRTRTCSHLRWPCSSLARPRSATPRKPPSCAWLPASTPTMWNCLGGSTAKRCTAACLPTPSHKNSPPTTAGTAAADECPPPSGRTPGTTSDARCSSTAARTTSGPRTEPSPPRSCLPKPGAEPIAALPARATSRACAPPTASASESCCKWPALTCPCGCGPAAPREADLASRPISTCSWLATWNPTQALLEAIPSTSPRCASPPATTSPGPYAPSPPRSPTTPPRATPSIRTATSSGSPSCKNSSSRASGSTSARCGSRTTAPRWRSGPRRRASKRGRCSPRSARAWPSAVPGWPRSNRWKASWRRTGPRSPRGSWPPSASRPTTRARVWAAPSCSPEWRRPSAPGCPPSWRPPRPATSPSTSGSASPSPPTSRCPKDRAPGAPASPVP

SEQ ID NO: 16658 - protein, 713 aa, synthetic construct; identical to SEQ ID NO: 16657

SEQ ID NO: 16659 - protein, 973 aa, synthetic construct
MALPVTALLLPLALLLHAARPLEIQNPDPAVYQLRDSKSSDKSVCLFTDFDSQTNVSQSKDSDVYITDKTVLDMRSMDFKSNSAVAWSNKSDFACANAFNNSIIPEDTFFPSPESSCDVKLVEKSFETDTNLNFQILYESASESCCKWPALTCPCGCGPAGPSDLDLEQQTSHYSNKQVTWRRIPGLLAWPYQPPCSCRWPCCSTPPGRRSSSSSPAAASSRPATPSPSPAPPPAAPSPPTPSPGSASAPARSASSSPASAGAAPPTTPTPSRTASPSPATPPSTPCTSRTPSSPRTPPSTTAATTPAAGPSPPSTSTTPGARAPRSPSPPVPAEADLAAEVAVAEDLNSTSRHRALAACLPAWETEPSHARPATTSTTGWPGISRSLDRPLSCSTALPHWKQACPADFLAAALAPTTPQYPASSLRTSPPTTVSRAGTPLGHSARAPSWKSREAEAEVEAEDLAAEALKFSFNSLALSWSNLALLRAAKPAATPSAATGSTGSRNPARDSNGSAKSIPATATPTTTASSRAEPHPPIPLAAQPTCSAAPAKIAPCTSVPGPSQQSWAALWTIGAREQAPCLVRVRTRTCSHLRWPCSSLARPRSATPRKPPSCAWLPASTPTMWNCLGGSTAKRCTAACLPTPSHKNSPPTTAGTAAADECPPPSGRTPGTTSDARCSSTAARTTSGPRTEPSPPRSCLPKPGAEPIAALPARATSRACAPPTASASESCCKWPALTCPCGCGPAAPREADLASRPISTCSWLATWNPTQALLEAIPSTSPRCASPPATTSPGPYAPSPPRSPTTPPRATPSIRTATSSGSPSCKNSSSRASGSTSARCGSRTTAPRWRSGPRRRASKRGRCSPRSARAWPSAVPGWPRSNRWKASWRRTGPRSPRGSWPPSASRPTTRARVWAAPSCSPEWRRPSAPGCPPSWRPPRPATSPSTSGSASPSPPTSRCPKDRAPGAPASPVP

SEQ ID NO: 16660 - protein, 1097 aa, synthetic construct
MALPVTALLLPLALLLHAARPLEIQNPDPAVYQLRDSKSSDKSVCLFTDFDSQTNVSQSKDSDVYITDKTVLDMRSMDFKSNSAVAWSNKSDFACANAFNNSIIPEDTFFPSPESSCDVKLVEKSFETDTNLNFQILYESASESCCKWPALTCPCGCGPAGPSDLDLEQQTSHYSNKQVTWRRIPGLLAWPYQPPCSCRWPCCSTPPGRRFSCLSLAEDWFNLAEADCLVPPAASPLAATPAGSDRLLAKDWNGCPASAAAATTSTTPIARADSPSAGTSARTPCTSRTAEPRTPPCTTVPKKAPALTAAWPIIEARAHWSPCLVAEEAAEDLRSSSSSPAAASSRPATPSPSPAPPPAAPSPPTPSPGSASAPARSASSSPASAGAAPPTTPTPSRTASPSPATPPSTPCTSRTPSSPRTPPSTTAATTPAAGPSPPSTSTTPGARAPRSPSPPVPAEADLAAEVAVAEDLNSTSRHRALAACLPAWETEPSHARPATTSTTGWPGISRSLDRPLSCSTALPHWKQACPADFLAAALAPTTPQYPASSLRTSPPTTVSRAGTPLGHSARAPSWKSREAEAEVEAEDLAAEALKFSFNSLALSWSNLALLRAAKPAATPSAATGSTGSRNPARDSNGSAKSIPATATPTTTASSRAEPHPPIPLAAQPTCSAAPAKIAPCTSVPGPSQQSWAALWTIGAREQAPCLVRVRTRTCSHLRWPCSSLARPRSATPRKPPSCAWLPASTPTMWNCLGGSTAKRCTAACLPTPSHKNSPPTTAGTAAADECPPPSGRTPGTTSDARCSSTAARTTSGPRTEPSPPRSCLPKPGAEPIAALPARATSRACAPPTASASESCCKWPALTCPCGCGPAAPREADLASRPISTCSWLATWNPTQALLEAIPSTSPRCASPPATTSPGPYAPSPPRSPTTPPRATPSIRTATSSGSPSCKNSSSRASGSTSARCGSRTTAPRWRSGPRRRASKRGRCSPRSARAWPSAVPGWPRSNRWKASWRRTGPRSPRGSWPPSASRPTTRARVWAAPSCSPEWRRPSAPGCPPSWRPPRPATSPSTSGSASPSPPTSRCPKDRAPGAPASPVP

SEQ ID NO: 16661 - protein, 1097 aa, synthetic construct; identical to SEQ ID NO: 16660

SEQ ID NO: 16662 - protein, 721 aa, synthetic construct
MALPVTALLLPLALLLHAARPLEIQNPDPAVYQLRDSKSSDKSVCLFTDFDSQTNVSQSKDSDVYITDKTVLDMRSMDFKSNSAVAWSNKSDFACANAFNNSIIPEDTFFPSPESSCDVKLVEKSFETDTNLNFQILYESASESCCKWPALTCPCGCGPAGPSDLDLEQQTSHYSNKQVTWRRIPGLLAWPCPQPCCCLWLCCCTPPDPMNSALTWASSCCSPLPRARTTKCGFCWLLGPTTPRISRATPPCTWPPMMDTWKSWKCCRLALMMPKTARAGPLCMKPPTAAIWKLWKCCKPGQTTLRTTLARHQPIWLQLGATKISPRCCRRRVRTRTCSHLRWPCSSLARPRSATPRKPPSCAWLPASTPTMWNCLGGSTAKRCTAACLPTPSHKNSPPTTAGTAAADECPPPSGRTPGTTSDARCSSTAARTTSGPRTEPSPPRSCLPKPGAEPIAALPARATSRACAPPTASASESCCKWPALTCPCGCGPAAPREADLASRPISTCSWLATWNPTQALLEAIPSTSPRCASPPATTSPGPYAPSPPRSPTTPPRATPSIRTATSSGSPSCKNSSSRASGSTSARCGSRTTAPRWRSGPRRRASKRGRCSPRSARAWPSAVPGWPRSNRWKASWRRTGPRSPRGSWPPSASRPTTRARVWAAPSCSPEWRRPSAPGCPPSWRPPRPATSPSTSGSASPSPPTSRCPKDRAPGAPASPVP

SEQ ID NO: 16663 - protein, 654 aa, synthetic construct
MALPVTALLLPLALLLHAARPLEIQNPDPAVYQLRDSKSSDKSVCLFTDFDSQTNVSQSKDSDVYITDKTVLDMRSMDFKSNSAVAWSNKSDFACANAFNNSIIPEDTFFPSPESSCDVKLVEKSFETDTNLNFQILYESASESCCKWPALTCPCGCGPAGPSDLDLEQQTSHYSNKQVTWRRIPGLLAWTGFGASFSLSALLPAPIPSKAADSNTPKRCGTPTGRSPCCPIPTSRREPPSESCTTTPPRAASCCLRLKNTIARRVRTRTCSHLRWPCSSLARPRSATPRKPPSCAWLPASTPTMWNCLGGSTAKRCTAACLPTPSHKNSPPTTAGTAAADECPPPSGRTPGTTSDARCSSTAARTTSGPRTEPSPPRSCLPKPGAEPIAALPARATSRACAPPTASASESCCKWPALTCPCGCGPAAPREADLASRPISTCSWLATWNPTQALLEAIPSTSPRCASPPATTSPGPYAPSPPRSPTTPPRATPSIRTATSSGSPSCKNSSSRASGSTSARCGSRTTAPRWRSGPRRRASKRGRCSPRSARAWPSAVPGWPRSNRWKASWRRTGPRSPRGSWPPSASRPTTRARVWAAPSCSPEWRRPSAPGCPPSWRPPRPATSPSTSGSASPSPPTSRCPKDRAPGAPASPVP

SEQ ID NO: 16664 - protein, 862 aa, synthetic construct
MALPVTALLLPLALLLHAARPLEIQNPDPAVYQLRDSKSSDKSVCLFTDFDSQTNVSQSKDSDVYITDKTVLDMRSMDFKSNSAVAWSNKSDFACANAFNNSIIPEDTFFPSPESSCDVKLVEKSFETDTNLNFQILYESASESCCKWPALTCPCGCGPAGPSDLDLEQQTSHYSNKQVTWRRIPGLLAWPCPQPCCCLWLCCCTPPDPMNSRCNWWKAAEAWCRLADLDAVPPAASPSASTQWAGTDRPLASRGNWWPSPASATPTTPTARAGSPSAGTTPRTPCTSRTASPRTPPCTTASGSEQPPRAPIIGAREHKPCPLSREEAAPGEAEVEAEDLGLEEADLEAQGQGAQAVEALSKCNWWNLGADWCSQAEVGCLVPPPAASSASTTWPGIGRLPENSASWWLLAEWAPAAPTLRADSQSPETPRIQCTSRTLNLRIQQCTIATWTSGWTAAHWPTGDRELKQCLARVRTRTCSHLRWPCSSLARPRSATPRKPPSCAWLPASTPTMWNCLGGSTAKRCTAACLPTPSHKNSPPTTAGTAAADECPPPSGRTPGTTSDARCSSTAARTTSGPRTEPSPPRSCLPKPGAEPIAALPARATSRACAPPTASASESCCKWPALTCPCGCGPAAPREADLASRPISTCSWLATWNPTQALLEAIPSTSPRCASPPATTSPGPYAPSPPRSPTTPPRATPSIRTATSSGSPSCKNSSSRASGSTSARCGSRTTAPRWRSGPRRRASKRGRCSPRSARAWPSAVPGWPRSNRWKASWRRTGPRSPRGSWPPSASRPTTRARVWAAPSCSPEWRRPSAPGCPPSWRPPRPATSPSTSGSASPSPPTSRCPKDRAPGAPASPVP

SEQ ID NO: 16665 - protein, 782 aa, synthetic construct
MALPVTALLLPLALLLHAARPLEIQNPDPAVYQLRDSKSSDKSVCLFTDFDSQTNVSQSKDSDVYITDKTVLDMRSMDFKSNSAVAWSNKSDFACANAFNNSIIPEDTFFPSPESSCDVKLVEKSFETDTNLNFQILYESASESCCKWPALTCPCGCGPAGPSDLDLEQQTSHYSNKQVTWRRIPGLLAWPFQSLPCCCLWRSCSTPLDRAEPRTCLRPWCSWNPSGTECWKRTAPSARAPTAPRTIAPSGSTTRASPARPAATSSTPPPWTTAASIDARPTAPATPCSWKCTSDGCCCRPPDGCSKKRTPSTDATLGRTPPCTKPTCRTARAESTSTTTATSTSPRPPRTPAPTSAEASWAARTCPARQTSPSPRAWPCLPSAAFSHPATRRVRTRTCSHLRWPCSSLARPRSATPRKPPSCAWLPASTPTMWNCLGGSTAKRCTAACLPTPSHKNSPPTTAGTAAADECPPPSGRTPGTTSDARCSSTAARTTSGPRTEPSPPRSCLPKPGAEPIAALPARATSRACAPPTASASESCCKWPALTCPCGCGPAAPREADLASRPISTCSWLATWNPTQALLEAIPSTSPRCASPPATTSPGPYAPSPPRSPTTPPRATPSIRTATSSGSPSCKNSSSRASGSTSARCGSRTTAPRWRSGPRRRASKRGRCSPRSARAWPSAVPGWPRSNRWKASWRRTGPRSPRGSWPPSASRPTTRARVWAAPSCSPEWRRPSAPGCPPSWRPPRPATSPSTSGSASPSPPTSRCPKDRAPGAPASPVP

SEQ ID NO: 16666 - protein, 788 aa, synthetic construct
MALPVTALLLPLALLLHAARPLEIQNPDPAVYQLRDSKSSDKSVCLFTDFDSQTNVSQSKDSDVYITDKTVLDMRSMDFKSNSAVAWSNKSDFACANAFNNSIIPEDTFFPSPESSCDVKLVEKSFETDTNLNFQILYESASESCCKWPALTCPCGCGPAGPSDLDLEQQTSHYSNKQVTWRRIPGLLAPPWPYQPPCSCRWPCCSTPPGRACGLKTSQRLWCSWSLNGTGCWRRTVLSAREPTPLRTIPHSGFTMRASSQARPPATSLTLPQWTTVESTGARQTSPPSVTRCSKSISAGCCSRPLGGCSRRKTLFTGVTAGRTLLCIRSHIYRMAKAGSIFIIILTSTFQKPHSKTAAPTSAGGLLGVKMCLQRLTSPSLKVWQCQPSHHSFHLATKRVRTRTCSHLRWPCSSLARPRSATPRKPPSCAWLPASTPTMWNCLGGSTAKRCTAACLPTPSHKNSPPTTAGTAAADECPPPSGRTPGTTSDARCSSTAARTTSGPRTEPSPPRSCLPKPGAEPIAALPARATSRACAPPTASASESCCKWPALTCPCGCGPAAPREADLASRPISTCSWLATWNPTQALLEAIPSTSPRCASPPATTSPGPYAPSPPRSPTTPPRATPSIRTATSSGSPSCKNSSSRASGSTSARCGSRTTAPRWRSGPRRRASKRGRCSPRSARAWPSAVPGWPRSNRWKASWRRTGPRSPRGSWPPSASRPTTRARVWAAPSCSPEWRRPSAPGCPPSWRPPRPATSPSTSGSASPSPPTSRCPKDRAPGAPASPVP

SEQ ID NO: 16667 - protein, 973 aa, synthetic construct
MALPVTALLLPLALLLHAARPLEEDLKNVFPPEVAVFEPSEAEISHTQKATLVCLATGFYPDHVELSWWVNGKEVHSGVSTDPQPLKEQPALNDSRYCLSSRLRVSATFWQNPRNHFRCQVQFYGLSENDEWTQDRAKPVTQIVSAEAWGRADDVIKIHWQEKKSNTILGSQEGNTMKTNDTYMKFSWLTVPEKSLDKEHRCIVRHENNKNGVDQEIIFPPIKTDVITMDPKDNCSKDANDTLLLQLTNTSAYYMYLLLLLKSVVYFAIITCCLLMAMVKRKDSRGRAKRSGSGATNFSLLKQAGDVEENPGPTSMALPVTALLLPLALLLHAARPDIQMTQTTSSLSASLGDRVTISCRASQDISKYLNWYQQKPDGTVKLLIYHTSRLHSGVPSRFSGSGSGTDYSLTISNLEQEDIATYFCQQGNTLPYTFGGGTKLEITGGGGSGGGGSGGGGSEVKLQESGPGLVAPSQSLSVTCTVSGVSLPDYGVSWIRQPPRKGLEWLGVIWGSETTYYNSALKSRLTIIKDNSKSQVFLKMNSLQTDDTAIYYCAKHYYYGGSYAMDYWGQGTSVTVSSTRIQNPDPAVYQLRDSKSSDKSVCLFTDFDSQTNVSQSKDSDVYITDKTVLDMRSMDFKSNSAVAWSNKSDFACANAFNNSIIPEDTFFPSPESSDSTDHVKPKETENTKQPSKSCHKPKAIVHTEKVNMMSLTVLGLRMLFAKTVAVNFLLTAKLFFLLTARAKRSGSGVKQTLNFDLLKLAGDVESNPGPSRGHMTEYKPTVRLATRDDVPRAVRTLAAAFADYPATRHTVDPDRHIERVTELQELFLTRVGLDIGKVWVADDGAAVAVWTTPESVEAGAVFAEIGPRMAELSGSRLAAQQQMEGLLAPHRPKEPAWFLATVGVSPDHQGKGLGSAVVLPGVEAAERAGVPAFLETSAPRNLPFYERLGFTVTADVEVPEGPRTWCMTRKPGA

SEQ ID NO: 16668 - protein, 974 aa, synthetic construct
MALPVTALLLPLALLLHAARPLEEDLKNVFPPEVAVFEPSEAEISHTQKATLVCLATGFYPDHVELSWWVNGKEVHSGVSTDPQPLKEQPALNDSRYCLSSRLRVSATFWQNPRNHFRCQVQFYGLSENDEWTQDRAKPVTQIVSAEAWGRADDVIKIHWQEKKSNTILGSQEGNTMKTNDTYMKFSWLTVPEKSLDKEHRCIVRHENNKNGVDQEIIFPPIKTDVITMDPKDNCSKDANDTLLLQLTNTSAYYMYLLLLLKSVVYFAIITCCLLMAMVKRKDSRGRAKRSGSGATNFSLLKQAGDVEENPGPTSTMALPVTALLLPLALLLHAARPEIVMTQSPATLSLSPGERATLSCRASQDISKYLNWYQQKPGQAPRLLIYHTSRLHSGIPARFSGSGSGTDYTLTISSLQPEDFAVYFCQQGNTLPYTFGQGTKLEIKGGGGSGGGGSGGGGSQVQLQESGPGLVKPSETLSLTCTVSGVSLPDYGVSWIRQPPGKGLEWIGVIWGSETTYYNSSLKSRVTISKDNSKNQVSLKLSSVTAADTAVYYCAKHYYYGGSYAMDYWGQGTLVTVSSTRIQNPDPAVYQLRDSKSSDKSVCLFTDFDSQTNVSQSKDSDVYITDKTVLDMRSMDFKSNSAVAWSNKSDFACANAFNNSIIPEDTFFPSPESSDSTDHVKPKETENTKQPSKSCHKPKAIVHTEKVNMMSLTVLGLRMLFAKTVAVNFLLTAKLFFLLTARAKRSGSGVKQTLNFDLLKLAGDVESNPGPSRGHMTEYKPTVRLATRDDVPRAVRTLAAAFADYPATRHTVDPDRHIERVTELQELFLTRVGLDIGKVWVADDGAAVAVWTTPESVEAGAVFAEIGPRMAELSGSRLAAQQQMEGLLAPHRPKEPAWFLATVGVSPDHQGKGLGSAVVLPGVEAAERAGVPAFLETSAPRNLPFYERLGFTVTADVEVPEGPRTWCMTRKPGA

SEQ ID NO: 16669 - protein, 975 aa, synthetic construct
MALPVTALLLPLALLLHAARPLEEDLKNVFPPEVAVFEPSEAEISHTQKATLVCLATGFYPDHVELSWWVNGKEVHSGVSTDPQPLKEQPALNDSRYCLSSRLRVSATFWQNPRNHFRCQVQFYGLSENDEWTQDRAKPVTQIVSAEAWGRADDVIKIHWQEKKSNTILGSQEGNTMKTNDTYMKFSWLTVPEKSLDKEHRCIVRHENNKNGVDQEIIFPPIKTDVITMDPKDNCSKDANDTLLLQLTNTSAYYMYLLLLLKSVVYFAIITCCLLMAMVKRKDSRGRAKRSGSGATNFSLLKQAGDVEENPGPTSTMALPVTALLLPLALLLHAARPDEIVLTQSPATLSLSPGERATLSCSASSSVSYMHWYQQKPGQAPRLLIYDTSKLASGIPARFSGSGSGTDFTLTISSLEPEDVAVYYCFQGSVYPFTFGQGTKLEIKRGGGGSGGGGSGGGGSQVQLQESGPGLVKPSQTLSLTCTVSGGSISTSGMGVGWIRQHPGKGLEWIGHIWWDDDKRYNPALKSRVTISVDTSKNQFSLKLSSVTAADTAVYYCARMELWSYYFDYWGQGTLVTVSSTRIQNPDPAVYQLRDSKSSDKSVCLFTDFDSQTNVSQSKDSDVYITDKTVLDMRSMDFKSNSAVAWSNKSDFACANAFNNSIIPEDTFFPSPESSDSTDHVKPKETENTKQPSKSCHKPKAIVHTEKVNMMSLTVLGLRMLFAKTVAVNFLLTAKLFFLLTARAKRSGSGVKQTLNFDLLKLAGDVESNPGPSRGHMTEYKPTVRLATRDDVPRAVRTLAAAFADYPATRHTVDPDRHIERVTELQELFLTRVGLDIGKVWVADDGAAVAVWTTPESVEAGAVFAEIGPRMAELSGSRLAAQQQMEGLLAPHRPKEPAWFLATVGVSPDHQGKGLGSAVVLPGVEAAERAGVPAFLETSAPRNLPFYERLGFTVTADVEVPEGPRTWCMTRKPGA

SEQ ID NO: 16670 - protein, 971 aa, synthetic construct
MALPVTALLLPLALLLHAARPLEEDLKNVFPPEVAVFEPSEAEISHTQKATLVCLATGFYPDHVELSWWVNGKEVHSGVSTDPQPLKEQPALNDSRYCLSSRLRVSATFWQNPRNHFRCQVQFYGLSENDEWTQDRAKPVTQIVSAEAWGRADDVIKIHWQEKKSNTILGSQEGNTMKTNDTYMKFSWLTVPEKSLDKEHRCIVRHENNKNGVDQEIIFPPIKTDVITMDPKDNCSKDANDTLLLQLTNTSAYYMYLLLLLKSVVYFAIITCCLLMAMVKRKDSRGRAKRSGSGATNFSLLKQAGDVEENPGPTSMALPVTALLLPLALLLHAARPDIQMTQSPSSLSASVGDRVTITCRASQDISNYLNWYQQKPGKAPKLLIYYTSRLHSGVPSRFSGSGSGTDFTLTISSLQPEDFATYYCQQGNTLPYTFGQGTKVEIKRGGGGSGGGGSGGGGSEVQLVESGGGLVQPGGSLRLSCAASGFTFSDYFMSWVRQAPGKGLEWVATISNGGTYTYYPDSVKGRFTISRDNSKNTLYLQMNSLRAEDTAVYYCARFDGYIFDYWGQGTLVTVSSTRIQNPDPAVYQLRDSKSSDKSVCLFTDFDSQTNVSQSKDSDVYITDKTVLDMRSMDFKSNSAVAWSNKSDFACANAFNNSIIPEDTFFPSPESSDSTDHVKPKETENTKQPSKSCHKPKAIVHTEKVNMMSLTVLGLRMLFAKTVAVNFLLTAKLFFLLTARAKRSGSGVKQTLNFDLLKLAGDVESNPGPSRGHMTEYKPTVRLATRDDVPRAVRTLAAAFADYPATRHTVDPDRHIERVTELQELFLTRVGLDIGKVWVADDGAAVAVWTTPESVEAGAVFAEIGPRMAELSGSRLAAQQQMEGLLAPHRPKEPAWFLATVGVSPDHQGKGLGSAVVLPGVEAAERAGVPAFLETSAPRNLPFYERLGFTVTADVEVPEGPRTWCMTRKPGA

SEQ ID NO: 16671 - protein, 975 aa, synthetic construct
MALPVTALLLPLALLLHAARPLEEDLKNVFPPEVAVFEPSEAEISHTQKATLVCLATGFYPDHVELSWWVNGKEVHSGVSTDPQPLKEQPALNDSRYCLSSRLRVSATFWQNPRNHFRCQVQFYGLSENDEWTQDRAKPVTQIVSAEAWGRADDVIKIHWQEKKSNTILGSQEGNTMKTNDTYMKFSWLTVPEKSLDKEHRCIVRHENNKNGVDQEIIFPPIKTDVITMDPKDNCSKDANDTLLLQLTNTSAYYMYLLLLLKSVVYFAIITCCLLMAMVKRKDSRGRAKRSGSGATNFSLLKQAGDVEENPGPTSMALPVTALLLPLALLLHAARPDIQMTQSPSSLSASVGDRVTITCKASDHINNWLAWYQQKPGQAPKLLIYGATTLETGVPSRFSGSGSGTDYTLTISSLQPEDFATYYCQQSWNTPWTFGQGTKLEIKRGGGGSGGGGSGGGGSQVQLQQPGAELVKPGASVKMSCKASGYAFSSYWINWMKQKPGQGLEWIGQIYPGDGDTNYNGKFKGRATLTADTSSSTAYMQLSSLTSEDSAVYFCARSITTVVGCAMDYWGQGTSVTVSSTRIQNPDPAVYQLRDSKSSDKSVCLFTDFDSQTNVSQSKDSDVYITDKTVLDMRSMDFKSNSAVAWSNKSDFACANAFNNSIIPEDTFFPSPESSDSTDHVKPKETENTKQPSKSCHKPKAIVHTEKVNMMSLTVLGLRMLFAKTVAVNFLLTAKLFFLLTARAKRSGSGVKQTLNFDLLKLAGDVESNPGPSRGHMTEYKPTVRLATRDDVPRAVRTLAAAFADYPATRHTVDPDRHIERVTELQELFLTRVGLDIGKVWVADDGAAVAVWTTPESVEAGAVFAEIGPRMAELSGSRLAAQQQMEGLLAPHRPKEPAWFLATVGVSPDHQGKGLGSAVVLPGVEAAERAGVPAFLETSAPRNLPFYERLGFTVTADVEVPEGPRTWCMTRKPGA

SEQ ID NO: 16672 - protein, 977 aa, synthetic construct
MALPVTALLLPLALLLHAARPLEEDLKNVFPPEVAVFEPSEAEISHTQKATLVCLATGFYPDHVELSWWVNGKEVHSGVSTDPQPLKEQPALNDSRYCLSSRLRVSATFWQNPRNHFRCQVQFYGLSENDEWTQDRAKPVTQIVSAEAWGRADDVIKIHWQEKKSNTILGSQEGNTMKTNDTYMKFSWLTVPEKSLDKEHRCIVRHENNKNGVDQEIIFPPIKTDVITMDPKDNCSKDANDTLLLQLTNTSAYYMYLLLLLKSVVYFAIITCCLLMAMVKRKDSRGRAKRSGSGATNFSLLKQAGDVEENPGPTSMALPVTALLLPLALLLHAARPQIVLSQSPAILSASPGEKVTMTCRASSSVSYMHWYQQKPGSSPKPWIYATSNLASGVPARFSGSGSGTSYSFTISRVEAEDAATYYCQQWTFNPPTFGGGTRLEIKRTVAAGGGGSGGGGSGGGGSQAYLQQSGAELVRPGASVKMSCKASGYTFTSYNMHWVKQTPRQGLEWIGGIYPGNGDTSYNQKFKGKATLTVGKSSSTAYMQLSSLTSEDSAVYFCARYDYNYAMDYWGQGTSVTVSSASTRIQNPDPAVYQLRDSKSSDKSVCLFTDFDSQTNVSQSKDSDVYITDKTVLDMRSMDFKSNSAVAWSNKSDFACANAFNNSIIPEDTFFPSPESSDSTDHVKPKETENTKQPSKSCHKPKAIVHTEKVNMMSLTVLGLRMLFAKTVAVNFLLTAKLFFLLTARAKRSGSGVKQTLNFDLLKLAGDVESNPGPSRGHMTEYKPTVRLATRDDVPRAVRTLAAAFADYPATRHTVDPDRHIERVTELQELFLTRVGLDIGKVWVADDGAAVAVWTTPESVEAGAVFAEIGPRMAELSGSRLAAQQQMEGLLAPHRPKEPAWFLATVGVSPDHQGKGLGSAVVLPGVEAAERAGVPAFLETSAPRNLPFYERLGFTVTADVEVPEGPRTWCMTRKPGA

SEQ ID NO: 16673 - protein, 975 aa, synthetic construct
MALPVTALLLPLALLLHAARPLEEDLKNVFPPEVAVFEPSEAEISHTQKATLVCLATGFYPDHVELSWWVNGKEVHSGVSTDPQPLKEQPALNDSRYCLSSRLRVSATFWQNPRNHFRCQVQFYGLSENDEWTQDRAKPVTQIVSAEAWGRADDVIKIHWQEKKSNTILGSQEGNTMKTNDTYMKFSWLTVPEKSLDKEHRCIVRHENNKNGVDQEIIFPPIKTDVITMDPKDNCSKDANDTLLLQLTNTSAYYMYLLLLLKSVVYFAIITCCLLMAMVKRKDSRGRAKRSGSGATNFSLLKQAGDVEENPGPTSMALPVTALLLPLALLLHAARPEIVLTQSPATLSLSPGERATLSCRASQSVSSYLAWYQQKPGQAPRLLIYDASNRATGIPARFSGSGSGTDFTLTISSLEPEDFAVYYCQQRSNWPITFGQGTRLEIKGGGGSGGGGSGGGGSEVQLVESGGGLVQPDRSLRLSCAASGFTFHDYAMHWVRQAPGKGLEWVSTISWNSGTIGYADSVKGRFTISRDNAKNSLYLQMNSLRAEDTALYYCAKDIQYGNYYYGMDVWGQGTTVTVSSTRIQNPDPAVYQLRDSKSSDKSVCLFTDFDSQTNVSQSKDSDVYITDKTVLDMRSMDFKSNSAVAWSNKSDFACANAFNNSIIPEDTFFPSPESSDSTDHVKPKETENTKQPSKSCHKPKAIVHTEKVNMMSLTVLGLRMLFAKTVAVNFLLTAKLFFLLTARAKRSGSGVKQTLNFDLLKLAGDVESNPGPSRGHMTEYKPTVRLATRDDVPRAVRTLAAAFADYPATRHTVDPDRHIERVTELQELFLTRVGLDIGKVWVADDGAAVAVWTTPESVEAGAVFAEIGPRMAELSGSRLAAQQQMEGLLAPHRPKEPAWFLATVGVSPDHQGKGLGSAVVLPGVEAAERAGVPAFLETSAPRNLPFYERLGFTVTADVEVPEGPRTWCMTRKPGA

SEQ ID NO: 16674 - protein, 973 aa, synthetic construct
MALPVTALLLPLALLLHAARPLEEDLKNVFPPEVAVFEPSEAEISHTQKATLVCLATGFYPDHVELSWWVNGKEVHSGVSTDPQPLKEQPALNDSRYCLSSRLRVSATFWQNPRNHFRCQVQFYGLSENDEWTQDRAKPVTQIVSAEAWGRADDVIKIHWQEKKSNTILGSQEGNTMKTNDTYMKFSWLTVPEKSLDKEHRCIVRHENNKNGVDQEIIFPPIKTDVITMDPKDNCSKDANDTLLLQLTNTSAYYMYLLLLLKSVVYFAIITCCLLMAMVKRKDSRGRAKRSGSGATNFSLLKQAGDVEENPGPTSMALPVTALLLPLALLLHAARPDIQMTQSPSSLSASVGDRVTITCRASQDVNTAVAWYQQKPGKAPKLLIYSASFLESGVPSRFSGSRSGTDFTLTISSLQPEDFATYYCQQHYTTPPTFGQTKVEIKRGGGGSGGGGSGGGGSEVQLVESGGGLVQPGGSLRLSCAASGFNIKDTYIHWVRQAPGKGLEWVARIYPTNGYTRYADSVKGRFTISADTSKNTAYLQMNSLRAEDTAVYYCSRWGGDGFYAMDVWGQGTLVTVSSTRIQNPDPAVYQLRDSKSSDKSVCLFTDFDSQTNVSQSKDSDVYITDKTVLDMRSMDFKSNSAVAWSNKSDFACANAFNNSIIPEDTFFPSPESSDSTDHVKPKETENTKQPSKSCHKPKAIVHTEKVNMMSLTVLGLRMLFAKTVAVNFLLTAKLFFLLTARAKRSGSGVKQTLNFDLLKLAGDVESNPGPSRGHMTEYKPTVRLATRDDVPRAVRTLAAAFADYPATRHTVDPDRHIERVTELQELFLTRVGLDIGKVWVADDGAAVAVWTTPESVEAGAVFAEIGPRMAELSGSRLAAQQQMEGLLAPHRPKEPAWFLATVGVSPDHQGKGLGSAVVLPGVEAAERAGVPAFLETSAPRNLPFYERLGFTVTADVEVPEGPRTWCMTRKPGA

SEQ ID NO: 16675 - protein, 852 aa, synthetic construct
MALPVTALLLPLALLLHAARPLEEDLKNVFPPEVAVFEPSEAEISHTQKATLVCLATGFYPDHVELSWWVNGKEVHSGVSTDPQPLKEQPALNDSRYCLSSRLRVSATFWQNPRNHFRCQVQFYGLSENDEWTQDRAKPVTQIVSAEAWGRADDVIKIHWQEKKSNTILGSQEGNTMKTNDTYMKFSWLTVPEKSLDKEHRCIVRHENNKNGVDQEIIFPPIKTDVITMDPKDNCSKDANDTLLLQLTNTSAYYMYLLLLLKSVVYFAIITCCLLMAMVKRKDSRGRAKRSGSGATNFSLLKQAGDVEENPGPTSMALPVTALLLPLALLLHAARPDEFEVQLVESGGGLVQAGGSLRLSCAASGITFSINTMGWYRQAPGKQRELVALISSIGDTYYADSVKGRFTISRDNAKNTVYLQMNSLKPEDTAVYYCKRFRTAAQGTDYWGQGTQVTVSSTRIQNPDPAVYQLRDSKSSDKSVCLFTDFDSQTNVSQSKDSDVYITDKTVLDMRSMDFKSNSAVAWSNKSDFACANAFNNSIIPEDTFFPSPESSDSTDHVKPKETENTKQPSKSCHKPKAIVHTEKVNMMSLTVLGLRMLFAKTVAVNFLLTAKLFFLLTARAKRSGSGVKQTLNFDLLKLAGDVESNPGPSRGHMTEYKPTVRLATRDDVPRAVRTLAAAFADYPATRHTVDPDRHIERVTELQELFLTRVGLDIGKVWVADDGAAVAVWTTPESVEAGAVFAEIGPRMAELSGSRLAAQQQMEGLLAPHRPKEPAWFLATVGVSPDHQGKGLGSAVVLPGVEAAERAGVPAFLETSAPRNLPFYERLGFTVTADVEVPEGPRTWCMTRKPGA

SEQ ID NO: 16676 - protein, 852 aa, synthetic construct; identical to SEQ ID NO: 16675

SEQ ID NO: 16677 - protein, 1117 aa, synthetic construct
MALPVTALLLPLALLLHAARPLEEDLKNVFPPEVAVFEPSEAEISHTQKATLVCLATGFYPDHVELSWWVNGKEVHSGVSTDPQPLKEQPALNDSRYCLSSRLRVSATFWQNPRNHFRCQVQFYGLSENDEWTQDRAKPVTQIVSAEAWGRADDVIKIHWQEKKSNTILGSQEGNTMKTNDTYMKFSWLTVPEKSLDKEHRCIVRHENNKNGVDQEIIFPPIKTDVITMDPKDNCSKDANDTLLLQLTNTSAYYMYLLLLLKSVVYFAIITCCLLMAMVKRKDSRGRAKRSGSGATNFSLLKQAGDVEENPGPTSMALPVTALLLPLALLLHAARPQVQLVESGGGLVQAGDSVTLSCTASGRTFSSYALAWFRQRPGKEREFVAGLRWGGPTNYADSVKDRFTISGDSAKHTMYLQMNSLKPEDTAVYYCGYNPGGWAVPSQYEYDSWGQGTQVTVSSGTGGGGSGGGGSGGGGSEFDIQMTQSPSSLSASVGDRVTITCKASDHINNWLAWYQQKPGQAPKLLIYGATTLETGVPSRFSGSGSGTDYTLTISSLQPEDFATYYCQQSWNTPWTFGQGTKLEIKRGGGGSGGGGSGGGGSQVQLQQPGAELVKPGASVKMSCKASGYAFSSYWINWMKQKPGQGLEWIGQIYPGDGDTNYNGKFKGRATLTADTSSSTAYMQLSSLTSEDSAVYFCARSITTVVGCAMDYWGQGTSVTVSSTRIQNPDPAVYQLRDSKSSDKSVCLFTDFDSQTNVSQSKDSDVYITDKTVLDMRSMDFKSNSAVAWSNKSDFACANAFNNSIIPEDTFFPSPESSDSTDHVKPKETENTKQPSKSCHKPKAIVHTEKVNMMSLTVLGLRMLFAKTVAVNFLLTAKLFFLLTARAKRSGSGVKQTLNFDLLKLAGDVESNPGPSRGHMTEYKPTVRLATRDDVPRAVRTLAAAFADYPATRHTVDPDRHIERVTELQELFLTRVGLDIGKVWVADDGAAVAVWTTPESVEAGAVFAEIGPRMAELSGSRLAAQQQMEGLLAPHRPKEPAWFLATVGVSPDHQGKGLGSAVVLPGVEAAERAGVPAFLETSAPRNLPFYERLGFTVTADVEVPEGPRTWCMTRKPGA

SEQ ID NO: 16678 - protein, 1246 aa, synthetic construct
MALPVTALLLPLALLLHAARPLEEDLKNVFPPEVAVFEPSEAEISHTQKATLVCLATGFYPDHVELSWWVNGKEVHSGVSTDPQPLKEQPALNDSRYCLSSRLRVSATFWQNPRNHFRCQVQFYGLSENDEWTQDRAKPVTQIVSAEAWGRADDVIKIHWQEKKSNTILGSQEGNTMKTNDTYMKFSWLTVPEKSLDKEHRCIVRHENNKNGVDQEIIFPPIKTDVITMDPKDNCSKDANDTLLLQLTNTSAYYMYLLLLLKSVVYFAIITCCLLMAMVKRKDSRGRAKRSGSGATNFSLLKQAGDVEENPGPTSMALPVTALLLPLALLLHAARPEVQLLESGGGLVQPGGSLRLSCAASGFTFSSYAMSWVRQAPGKGLEWVSSISGSGDYIYYADSVKGRFTISRDISKNTLYLQMNSLRAEDTAVYYCAKEGTGANSSLADYRGQGTLVTVSSGGGSGGGSQVQLVESGGGLVQAGDSVTLSCTASGRTFSSYALAWFRQRPGKEREFVAGLRWGGPTNYADSVKDRFTISGDSAKHTMYLQMNSLKPEDTAVYYCGYNPGGWAVPSQYEYDSWGQGTQVTVSSGTGGGGSGGGGSGGGGSEFDIQMTQSPSSLSASVGDRVTITCKASDHINNWLAWYQQKPGQAPKLLIYGATTLETGVPSRFSGSGSGTDYTLTISSLQPEDFATYYCQQSWNTPWTFGQGTKLEIKRGGGGSGGGGSGGGGSQVQLQQPGAELVKPGASVKMSCKASGYAFSSYWINWMKQKPGQGLEWIGQIYPGDGDTNYNGKFKGRATLTADTSSSTAYMQLSSLTSEDSAVYFCARSITTVVGCAMDYWGQGTSVTVSSTRIQNPDPAVYQLRDSKSSDKSVCLFTDFDSQTNVSQSKDSDVYITDKTVLDMRSMDFKSNSAVAWSNKSDFACANAFNNSIIPEDTFFPSPESSDSTDHVKPKETENTKQPSKSCHKPKAIVHTEKVNMMSLTVLGLRMLFAKTVAVNFLLTAKLFFLLTARAKRSGSGVKQTLNFDLLKLAGDVESNPGPSRGHMTEYKPTVRLATRDDVPRAVRTLAAAFADYPATRHTVDPDRHIERVTELQELFLTRVGLDIGKVWVADDGAAVAVWTTPESVEAGAVFAEIGPRMAELSGSRLAAQQQMEGLLAPHRPKEPAWFLATVGVSPDHQGKGLGSAVVLPGVEAAERAGVPAFLETSAPRNLPFYERLGFTVTADVEVPEGPRTWCMTRKPGA

SEQ ID NO: 16679 - protein, 1246 aa, synthetic construct; identical to SEQ ID NO: 16678

SEQ ID NO: 16680 - protein, 858 aa, synthetic construct
MALPVTALLLPLALLLHAARPLEEDLKNVFPPEVAVFEPSEAEISHTQKATLVCLATGFYPDHVELSWWVNGKEVHSGVSTDPQPLKEQPALNDSRYCLSSRLRVSATFWQNPRNHFRCQVQFYGLSENDEWTQDRAKPVTQIVSAEAWGRADDVIKIHWQEKKSNTILGSQEGNTMKTNDTYMKFSWLTVPEKSLDKEHRCIVRHENNKNGVDQEIIFPPIKTDVITMDPKDNCSKDANDTLLLQLTNTSAYYMYLLLLLKSVVYFAIITCCLLMAMVKRKDSRGRAKRSGSGATNFSLLKQAGDVEENPGPTSMALPVTALLLPLALLLHAARPDEFGSDLGIKLLFAAAKGQDDEVRILLAAGADVNAKDFEGYTPLHVAAYDGHLEIVEVLLKAGADVNAKDSQGRTPLHEAAYSGHLEIVEVLLKAGADVNAQDDAGETPADLAAAWGHEDIAEVLQKTRIQNPDPAVYQLRDSKSSDKSVCLFTDFDSQTNVSQSKDSDVYITDKTVLDMRSMDFKSNSAVAWSNKSDFACANAFNNSIIPEDTFFPSPESSDSTDHVKPKETENTKQPSKSCHKPKAIVHTEKVNMMSLTVLGLRMLFAKTVAVNFLLTAKLFFLLTARAKRSGSGVKQTLNFDLLKLAGDVESNPGPSRGHMTEYKPTVRLATRDDVPRAVRTLAAAFADYPATRHTVDPDRHIERVTELQELFLTRVGLDIGKVWVADDGAAVAVWTTPESVEAGAVFAEIGPRMAELSGSRLAAQQQMEGLLAPHRPKEPAWFLATVGVSPDHQGKGLGSAVVLPGVEAAERAGVPAFLETSAPRNLPFYERLGFTVTADVEVPEGPRTWCMTRKPGA

SEQ ID NO: 16681 - protein, 787 aa, synthetic construct
MALPVTALLLPLALLLHAARPLEEDLKNVFPPEVAVFEPSEAEISHTQKATLVCLATGFYPDHVELSWWVNGKEVHSGVSTDPQPLKEQPALNDSRYCLSSRLRVSATFWQNPRNHFRCQVQFYGLSENDEWTQDRAKPVTQIVSAEAWGRADDVIKIHWQEKKSNTILGSQEGNTMKTNDTYMKFSWLTVPEKSLDKEHRCIVRHENNKNGVDQEIIFPPIKTDVITMDPKDNCSKDANDTLLLQLTNTSAYYMYLLLLLKSVVYFAIITCCLLMAMVKRKDSRGRAKRSGSGATNFSLLKQAGDVEENPGPTSMDWIWRILFLVGAATGAHSFEGSGFEYAKEMRNAYWEIALLPNLTNQQKRAPIRKLYDDPSQSSELLSEAKKLNDSQTRIQNPDPAVYQLRDSKSSDKSVCLFTDFDSQTNVSQSKDSDVYITDKTVLDMRSMDFKSNSAVAWSNKSDFACANAFNNSIIPEDTFFPSPESSDSTDHVKPKETENTKQPSKSCHKPKAIVHTEKVNMMSLTVLGLRMLFAKTVAVNFLLTAKLFFLLTARAKRSGSGVKQTLNFDLLKLAGDVESNPGPSRGHMTEYKPTVRLATRDDVPRAVRTLAAAFADYPATRHTVDPDRHIERVTELQELFLTRVGLDIGKVWVADDGAAVAVWTTPESVEAGAVFAEIGPRMAELSGSRLAAQQQMEGLLAPHRPKEPAWFLATVGVSPDHQGKGLGSAVVLPGVEAAERAGVPAFLETSAPRNLPFYERLGFTVTADVEVPEGPRTWCMTRKPGA

SEQ ID NO: 16682 - protein, 1009 aa, synthetic construct
MALPVTALLLPLALLLHAARPLEEDLKNVFPPEVAVFEPSEAEISHTQKATLVCLATGFYPDHVELSWWVNGKEVHSGVSTDPQPLKEQPALNDSRYCLSSRLRVSATFWQNPRNHFRCQVQFYGLSENDEWTQDRAKPVTQIVSAEAWGRADDVIKIHWQEKKSNTILGSQEGNTMKTNDTYMKFSWLTVPEKSLDKEHRCIVRHENNKNGVDQEIIFPPIKTDVITMDPKDNCSKDANDTLLLQLTNTSAYYMYLLLLLKSVVYFAIITCCLLMAMVKRKDSRGRAKRSGSGATNFSLLKQAGDVEENPGPTSMALPVTALLLPLALLLHAARPDEFEVQLVESGGGLVQAGGSLRLSCAASGITFSINTMGWYRQAPGKQRELVALISSIGDTYYADSVKGRFTISRDNAKNTVYLQMNSLKPEDTAVYYCKRFRTAAQGTDYWGQGTQVTVSSLEGGGGSGGGGSGGGGSGSGGSGSGGSGSGGSGSGGSFEVQLVESGGGLVQPGGSLRLSCAASGSIFGFNDMAWYRQAPGKQRELVALISRVGVTSSADSVKGRFTISRVNAKDTVYLQMNSLKPEDTAVYYCYMDQRLDGSTLAYWGQGTQVTVSSTRIQNPDPAVYQLRDSKSSDKSVCLFTDFDSQTNVSQSKDSDVYITDKTVLDMRSMDFKSNSAVAWSNKSDFACANAFNNSIIPEDTFFPSPESSDSTDHVKPKETENTKQPSKSCHKPKAIVHTEKVNMMSLTVLGLRMLFAKTVAVNFLLTAKLFFLLTARAKRSGSGVKQTLNFDLLKLAGDVESNPGPSRGHMTEYKPTVRLATRDDVPRAVRTLAAAFADYPATRHTVDPDRHIERVTELQELFLTRVGLDIGKVWVADDGAAVAVWTTPESVEAGAVFAEIGPRMAELSGSRLAAQQQMEGLLAPHRPKEPAWFLATVGVSPDHQGKGLGSAVVLPGVEAAERAGVPAFLETSAPRNLPFYERLGFTVTADVEVPEGPRTWCMTRKPGA

SEQ ID NO: 16683 - protein, 923 aa, synthetic construct
MALPVTALLLPLALLLHAARPLEEDLKNVFPPEVAVFEPSEAEISHTQKATLVCLATGFYPDHVELSWWVNGKEVHSGVSTDPQPLKEQPALNDSRYCLSSRLRVSATFWQNPRNHFRCQVQFYGLSENDEWTQDRAKPVTQIVSAEAWGRADDVIKIHWQEKKSNTILGSQEGNTMKTNDTYMKFSWLTVPEKSLDKEHRCIVRHENNKNGVDQEIIFPPIKTDVITMDPKDNCSKDANDTLLLQLTNTSAYYMYLLLLLKSVVYFAIITCCLLMAMVKRKDSRGRAKRSGSGATNFSLLKQAGDVEENPGPTSMALPVTALLLPLALLLHAARPGMRTEDLPKAVVFLEPQWYRVLEKDSVTLKCQGAYSPEDNSTQWFHNESLISSQASSYFIDAATVDDSGEYRCQTNLSTLSDPVQLEVHIGWLLLQAPRWVFKEEDPIHLRCHSWKNTALHKVTYLQNGKGRKYFHHNSDFYIPKATLKDSGSYFCRGLVGSKNVSSETVNITITQGLAVSTISSFFPPGYQTRIQNPDPAVYQLRDSKSSDKSVCLFTDFDSQTNVSQSKDSDVYITDKTVLDMRSMDFKSNSAVAWSNKSDFACANAFNNSIIPEDTFFPSPESSDSTDHVKPKETENTKQPSKSCHKPKAIVHTEKVNMMSLTVLGLRMLFAKTVAVNFLLTAKLFFLLTARAKRSGSGVKQTLNFDLLKLAGDVESNPGPSRGHMTEYKPTVRLATRDDVPRAVRTLAAAFADYPATRHTVDPDRHIERVTELQELFLTRVGLDIGKVWVADDGAAVAVWTTPESVEAGAVFAEIGPRMAELSGSRLAAQQQMEGLLAPHRPKEPAWFLATVGVSPDHQGKGLGSAVVLPGVEAAERAGVPAFLETSAPRNLPFYERLGFTVTADVEVPEGPRTWCMTRKPGA

SEQ ID NO: 16684 - protein, 925 aa, synthetic construct
MALPVTALLLPLALLLHAARPLEEDLKNVFPPEVAVFEPSEAEISHTQKATLVCLATGFYPDHVELSWWVNGKEVHSGVSTDPQPLKEQPALNDSRYCLSSRLRVSATFWQNPRNHFRCQVQFYGLSENDEWTQDRAKPVTQIVSAEAWGRADDVIKIHWQEKKSNTILGSQEGNTMKTNDTYMKFSWLTVPEKSLDKEHRCIVRHENNKNGVDQEIIFPPIKTDVITMDPKDNCSKDANDTLLLQLTNTSAYYMYLLLLLKSVVYFAIITCCLLMAMVKRKDSRGRAKRSGSGATNFSLLKQAGDVEENPGPTSATMALPVTALLLPLALLLHAARPGMRTEDLPKAVVFLEPQWYRVLEKDSVTLKCQGAYSPEDNSTQWFHNESLISSQASSYFIDAATVDDSGEYRCQTNLSTLSDPVQLEVHIGWLLLQAPRWVFKEEDPIHLRCHSWKNTALHKVTYLQNGKGRKYFHHNSDFYIPKATLKDSGSYFCRGLVGSKNVSSETVNITITQGLAVSTISSFFPPGYQTRIQNPDPAVYQLRDSKSSDKSVCLFTDFDSQTNVSQSKDSDVYITDKTVLDMRSMDFKSNSAVAWSNKSDFACANAFNNSIIPEDTFFPSPESSDSTDHVKPKETENTKQPSKSCHKPKAIVHTEKVNMMSLTVLGLRMLFAKTVAVNFLLTAKLFFLLTARAKRSGSGVKQTLNFDLLKLAGDVESNPGPSRGHMTEYKPTVRLATRDDVPRAVRTLAAAFADYPATRHTVDPDRHIERVTELQELFLTRVGLDIGKVWVADDGAAVAVWTTPESVEAGAVFAEIGPRMAELSGSRLAAQQQMEGLLAPHRPKEPAWFLATVGVSPDHQGKGLGSAVVLPGVEAAERAGVPAFLETSAPRNLPFYERLGFTVTADVEVPEGPRTWCMTRKPGA

SEQ ID NO: 16685 - protein, 973 aa, synthetic construct
MALPVTALLLPLALLLHAARPLEIQNPDPAVYQLRDSKSSDKSVCLFTDFDSQTNVSQSKDSDVYITDKTVLDMRSMDFKSNSAVAWSNKSDFACANAFNNSIIPEDTFFPSPESSDSTDHVKPKETENTKQPSKSCHKPKAIVHTEKVNMMSLTVLGLRMLFAKTVAVNFLLTAKLFFLLTARAKRSGSGATNFSLLKQAGDVEENPGPTSMALPVTALLLPLALLLHAARPDIQMTQTTSSLSASLGDRVTISCRASQDISKYLNWYQQKPDGTVKLLIYHTSRLHSGVPSRFSGSGSGTDYSLTISNLEQEDIATYFCQQGNTLPYTFGGGTKLEITGGGGSGGGGSGGGGSEVKLQESGPGLVAPSQSLSVTCTVSGVSLPDYGVSWIRQPPRKGLEWLGVIWGSETTYYNSALKSRLTIIKDNSKSQVFLKMNSLQTDDTAIYYCAKHYYYGGSYAMDYWGQGTSVTVSSTREDLKNVFPPEVAVFEPSEAEISHTQKATLVCLATGFYPDHVELSWWVNGKEVHSGVSTDPQPLKEQPALNDSRYCLSSRLRVSATFWQNPRNHFRCQVQFYGLSENDEWTQDRAKPVTQIVSAEAWGRADDVIKIHWQEKKSNTILGSQEGNTMKTNDTYMKFSWLTVPEKSLDKEHRCIVRHENNKNGVDQEIIFPPIKTDVITMDPKDNCSKDANDTLLLQLTNTSAYYMYLLLLLKSVVYFAIITCCLLMAMVKRKDSRGRAKRSGSGVKQTLNFDLLKLAGDVESNPGPSRGHMTEYKPTVRLATRDDVPRAVRTLAAAFADYPATRHTVDPDRHIERVTELQELFLTRVGLDIGKVWVADDGAAVAVWTTPESVEAGAVFAEIGPRMAELSGSRLAAQQQMEGLLAPHRPKEPAWFLATVGVSPDHQGKGLGSAVVLPGVEAAERAGVPAFLETSAPRNLPFYERLGFTVTADVEVPEGPRTWCMTRKPGA

SEQ ID NO: 16686 - protein, 974 aa, synthetic construct
MALPVTALLLPLALLLHAARPLEIQNPDPAVYQLRDSKSSDKSVCLFTDFDSQTNVSQSKDSDVYITDKTVLDMRSMDFKSNSAVAWSNKSDFACANAFNNSIIPEDTFFPSPESSDSTDHVKPKETENTKQPSKSCHKPKAIVHTEKVNMMSLTVLGLRMLFAKTVAVNFLLTAKLFFLLTARAKRSGSGATNFSLLKQAGDVEENPGPTSTMALPVTALLLPLALLLHAARPEIVMTQSPATLSLSPGERATLSCRASQDISKYLNWYQQKPGQAPRLLIYHTSRLHSGIPARFSGSGSGTDYTLTISSLQPEDFAVYFCQQGNTLPYTFGQGTKLEIKGGGGSGGGGSGGGGSQVQLQESGPGLVKPSETLSLTCTVSGVSLPDYGVSWIRQPPGKGLEWIGVIWGSETTYYNSSLKSRVTISKDNSKNQVSLKLSSVTAADTAVYYCAKHYYYGGSYAMDYWGQGTLVTVSSTREDLKNVFPPEVAVFEPSEAEISHTQKATLVCLATGFYPDHVELSWWVNGKEVHSGVSTDPQPLKEQPALNDSRYCLSSRLRVSATFWQNPRNHFRCQVQFYGLSENDEWTQDRAKPVTQIVSAEAWGRADDVIKIHWQEKKSNTILGSQEGNTMKTNDTYMKFSWLTVPEKSLDKEHRCIVRHENNKNGVDQEIIFPPIKTDVITMDPKDNCSKDANDTLLLQLTNTSAYYMYLLLLLKSVVYFAIITCCLLMAMVKRKDSRGRAKRSGSGVKQTLNFDLLKLAGDVESNPGPSRGHMTEYKPTVRLATRDDVPRAVRTLAAAFADYPATRHTVDPDRHIERVTELQELFLTRVGLDIGKVWVADDGAAVAVWTTPESVEAGAVFAEIGPRMAELSGSRLAAQQQMEGLLAPHRPKEPAWFLATVGVSPDHQGKGLGSAVVLPGVEAAERAGVPAFLETSAPRNLPFYERLGFTVTADVEVPEGPRTWCMTRKPGA

SEQ ID NO: 16687 - protein, 975 aa, synthetic construct
MALPVTALLLPLALLLHAARPLEIQNPDPAVYQLRDSKSSDKSVCLFTDFDSQTNVSQSKDSDVYITDKTVLDMRSMDFKSNSAVAWSNKSDFACANAFNNSIIPEDTFFPSPESSDSTDHVKPKETENTKQPSKSCHKPKAIVHTEKVNMMSLTVLGLRMLFAKTVAVNFLLTAKLFFLLTARAKRSGSGATNFSLLKQAGDVEENPGPTSTMALPVTALLLPLALLLHAARPDEIVLTQSPATLSLSPGERATLSCSASSSVSYMHWYQQKPGQAPRLLIYDTSKLASGIPARFSGSGSGTDFTLTISSLEPEDVAVYYCFQGSVYPFTFGQGTKLEIKRGGGGSGGGGSGGGGSQVQLQESGPGLVKPSQTLSLTCTVSGGSISTSGMGVGWIRQHPGKGLEWIGHIWWDDDKRYNPALKSRVTISVDTSKNQFSLKLSSVTAADTAVYYCARMELWSYYFDYWGQGTLVTVSSTREDLKNVFPPEVAVFEPSEAEISHTQKATLVCLATGFYPDHVELSWWVNGKEVHSGVSTDPQPLKEQPALNDSRYCLSSRLRVSATFWQNPRNHFRCQVQFYGLSENDEWTQDRAKPVTQIVSAEAWGRADDVIKIHWQEKKSNTILGSQEGNTMKTNDTYMKFSWLTVPEKSLDKEHRCIVRHENNKNGVDQEIIFPPIKTDVITMDPKDNCSKDANDTLLLQLTNTSAYYMYLLLLLKSVVYFAIITCCLLMAMVKRKDSRGRAKRSGSGVKQTLNFDLLKLAGDVESNPGPSRGHMTEYKPTVRLATRDDVPRAVRTLAAAFADYPATRHTVDPDRHIERVTELQELFLTRVGLDIGKVWVADDGAAVAVWTTPESVEAGAVFAEIGPRMAELSGSRLAAQQQMEGLLAPHRPKEPAWFLATVGVSPDHQGKGLGSAVVLPGVEAAERAGVPAFLETSAPRNLPFYERLGFTVTADVEVPEGPRTWCMTRKPGA

SEQ ID NO: 16688 - protein, 971 aa, synthetic construct
MALPVTALLLPLALLLHAARPLEIQNPDPAVYQLRDSKSSDKSVCLFTDFDSQTNVSQSKDSDVYITDKTVLDMRSMDFKSNSAVAWSNKSDFACANAFNNSIIPEDTFFPSPESSDSTDHVKPKETENTKQPSKSCHKPKAIVHTEKVNMMSLTVLGLRMLFAKTVAVNFLLTAKLFFLLTARAKRSGSGATNFSLLKQAGDVEENPGPTSMALPVTALLLPLALLLHAARPDIQMTQSPSSLSASVGDRVTITCRASQDISNYLNWYQQKPGKAPKLLIYYTSRLHSGVPSRFSGSGSGTDFTLTISSLQPEDFATYYCQQGNTLPYTFGQGTKVEIKRGGGGSGGGGSGGGGSEVQLVESGGGLVQPGGSLRLSCAASGFTFSDYFMSWVRQAPGKGLEWVATISNGGTYTYYPDSVKGRFTISRDNSKNTLYLQMNSLRAEDTAVYYCARFDGYIFDYWGQGTLVTVSSTREDLKNVFPPEVAVFEPSEAEISHTQKATLVCLATGFYPDHVELSWWVNGKEVHSGVSTDPQPLKEQPALNDSRYCLSSRLRVSATFWQNPRNHFRCQVQFYGLSENDEWTQDRAKPVTQIVSAEAWGRADDVIKIHWQEKKSNTILGSQEGNTMKTNDTYMKFSWLTVPEKSLDKEHRCIVRHENNKNGVDQEIIFPPIKTDVITMDPKDNCSKDANDTLLLQLTNTSAYYMYLLLLLKSVVYFAIITCCLLMAMVKRKDSRGRAKRSGSGVKQTLNFDLLKLAGDVESNPGPSRGHMTEYKPTVRLATRDDVPRAVRTLAAAFADYPATRHTVDPDRHIERVTELQELFLTRVGLDIGKVWVADDGAAVAVWTTPESVEAGAVFAEIGPRMAELSGSRLAAQQQMEGLLAPHRPKEPAWFLATVGVSPDHQGKGLGSAVVLPGVEAAERAGVPAFLETSAPRNLPFYERLGFTVTADVEVPEGPRTWCMTRKPGA

SEQ ID NO: 16689 - protein, 975 aa, synthetic construct
MALPVTALLLPLALLLHAARPLEIQNPDPAVYQLRDSKSSDKSVCLFTDFDSQTNVSQSKDSDVYITDKTVLDMRSMDFKSNSAVAWSNKSDFACANAFNNSIIPEDTFFPSPESSDSTDHVKPKETENTKQPSKSCHKPKAIVHTEKVNMMSLTVLGLRMLFAKTVAVNFLLTAKLFFLLTARAKRSGSGATNFSLLKQAGDVEENPGPTSMALPVTALLLPLALLLHAARPDIQMTQSPSSLSASVGDRVTITCKASDHINNWLAWYQQKPGQAPKLLIYGATTLETGVPSRFSGSGSGTDYTLTISSLQPEDFATYYCQQSWNTPWTFGQGTKLEIKRGGGGSGGGGSGGGGSQVQLQQPGAELVKPGASVKMSCKASGYAFSSYWINWMKQKPGQGLEWIGQIYPGDGDTNYNGKFKGRATLTADTSSSTAYMQLSSLTSEDSAVYFCARSITTVVGCAMDYWGQGTSVTVSSTREDLKNVFPPEVAVFEPSEAEISHTQKATLVCLATGFYPDHVELSWWVNGKEVHSGVSTDPQPLKEQPALNDSRYCLSSRLRVSATFWQNPRNHFRCQVQFYGLSENDEWTQDRAKPVTQIVSAEAWGRADDVIKIHWQEKKSNTILGSQEGNTMKTNDTYMKFSWLTVPEKSLDKEHRCIVRHENNKNGVDQEIIFPPIKTDVITMDPKDNCSKDANDTLLLQLTNTSAYYMYLLLLLKSVVYFAIITCCLLMAMVKRKDSRGRAKRSGSGVKQTLNFDLLKLAGDVESNPGPSRGHMTEYKPTVRLATRDDVPRAVRTLAAAFADYPATRHTVDPDRHIERVTELQELFLTRVGLDIGKVWVADDGAAVAVWTTPESVEAGAVFAEIGPRMAELSGSRLAAQQQMEGLLAPHRPKEPAWFLATVGVSPDHQGKGLGSAVVLPGVEAAERAGVPAFLETSAPRNLPFYERLGFTVTADVEVPEGPRTWCMTRKPGA

SEQ ID NO: 16690 - protein, 977 aa, synthetic construct
MALPVTALLLPLALLLHAARPLEIQNPDPAVYQLRDSKSSDKSVCLFTDFDSQTNVSQSKDSDVYITDKTVLDMRSMDFKSNSAVAWSNKSDFACANAFNNSIIPEDTFFPSPESSDSTDHVKPKETENTKQPSKSCHKPKAIVHTEKVNMMSLTVLGLRMLFAKTVAVNFLLTAKLFFLLTARAKRSGSGATNFSLLKQAGDVEENPGPTSMALPVTALLLPLALLLHAARPQIVLSQSPAILSASPGEKVTMTCRASSSVSYMHWYQQKPGSSPKPWIYATSNLASGVPARFSGSGSGTSYSFTISRVEAEDAATYYCQQWTFNPPTFGGGTRLEIKRTVAAGGGGSGGGGSGGGGSQAYLQQSGAELVRPGASVKMSCKASGYTFTSYNMHWVKQTPRQGLEWIGGIYPGNGDTSYNQKFKGKATLTVGKSSSTAYMQLSSLTSEDSAVYFCARYDYNYAMDYWGQGTSVTVSSASTREDLKNVFPPEVAVFEPSEAEISHTQKATLVCLATGFYPDHVELSWWVNGKEVHSGVSTDPQPLKEQPALNDSRYCLSSRLRVSATFWQNPRNHFRCQVQFYGLSENDEWTQDRAKPVTQIVSAEAWGRADDVIKIHWQEKKSNTILGSQEGNTMKTNDTYMKFSWLTVPEKSLDKEHRCIVRHENNKNGVDQEIIFPPIKTDVITMDPKDNCSKDANDTLLLQLTNTSAYYMYLLLLLKSVVYFAIITCCLLMAMVKRKDSRGRAKRSGSGVKQTLNFDLLKLAGDVESNPGPSRGHMTEYKPTVRLATRDDVPRAVRTLAAAFADYPATRHTVDPDRHIERVTELQELFLTRVGLDIGKVWVADDGAAVAVWTTPESVEAGAVFAEIGPRMAELSGSRLAAQQQMEGLLAPHRPKEPAWFLATVGVSPDHQGKGLGSAVVLPGVEAAERAGVPAFLETSAPRNLPFYERLGFTVTADVEVPEGPRTWCMTRKPGA

SEQ ID NO: 16691 - protein, 975 aa, synthetic construct
MALPVTALLLPLALLLHAARPLEIQNPDPAVYQLRDSKSSDKSVCLFTDFDSQTNVSQSKDSDVYITDKTVLDMRSMDFKSNSAVAWSNKSDFACANAFNNSIIPEDTFFPSPESSDSTDHVKPKETENTKQPSKSCHKPKAIVHTEKVNMMSLTVLGLRMLFAKTVAVNFLLTAKLFFLLTARAKRSGSGATNFSLLKQAGDVEENPGPTSMALPVTALLLPLALLLHAARPEIVLTQSPATLSLSPGERATLSCRASQSVSSYLAWYQQKPGQAPRLLIYDASNRATGIPARFSGSGSGTDFTLTISSLEPEDFAVYYCQQRSNWPITFGQGTRLEIKGGGGSGGGGSGGGGSEVQLVESGGGLVQPDRSLRLSCAASGFTFHDYAMHWVRQAPGKGLEWVSTISWNSGTIGYADSVKGRFTISRDNAKNSLYLQMNSLRAEDTALYYCAKDIQYGNYYYGMDVWGQGTTVTVSSTREDLKNVFPPEVAVFEPSEAEISHTQKATLVCLATGFYPDHVELSWWVNGKEVHSGVSTDPQPLKEQPALNDSRYCLSSRLRVSATFWQNPRNHFRCQVQFYGLSENDEWTQDRAKPVTQIVSAEAWGRADDVIKIHWQEKKSNTILGSQEGNTMKTNDTYMKFSWLTVPEKSLDKEHRCIVRHENNKNGVDQEIIFPPIKTDVITMDPKDNCSKDANDTLLLQLTNTSAYYMYLLLLLKSVVYFAIITCCLLMAMVKRKDSRGRAKRSGSGVKQTLNFDLLKLAGDVESNPGPSRGHMTEYKPTVRLATRDDVPRAVRTLAAAFADYPATRHTVDPDRHIERVTELQELFLTRVGLDIGKVWVADDGAAVAVWTTPESVEAGAVFAEIGPRMAELSGSRLAAQQQMEGLLAPHRPKEPAWFLATVGVSPDHQGKGLGSAVVLPGVEAAERAGVPAFLETSAPRNLPFYERLGFTVTADVEVPEGPRTWCMTRKPGA

SEQ ID NO: 16692 - protein, 973 aa, synthetic construct
MALPVTALLLPLALLLHAARPLEIQNPDPAVYQLRDSKSSDKSVCLFTDFDSQTNVSQSKDSDVYITDKTVLDMRSMDFKSNSAVAWSNKSDFACANAFNNSIIPEDTFFPSPESSDSTDHVKPKETENTKQPSKSCHKPKAIVHTEKVNMMSLTVLGLRMLFAKTVAVNFLLTAKLFFLLTARAKRSGSGATNFSLLKQAGDVEENPGPTSMALPVTALLLPLALLLHAARPDIQMTQSPSSLSASVGDRVTITCRASQDVNTAVAWYQQKPGKAPKLLIYSASFLESGVPSRFSGSRSGTDFTLTISSLQPEDFATYYCQQHYTTPPTFGQTKVEIKRGGGGSGGGGSGGGGSEVQLVESGGGLVQPGGSLRLSCAASGFNIKDTYIHWVRQAPGKGLEWVARIYPTNGYTRYADSVKGRFTISADTSKNTAYLQMNSLRAEDTAVYYCSRWGGDGFYAMDVWGQGTLVTVSSTREDLKNVFPPEVAVFEPSEAEISHTQKATLVCLATGFYPDHVELSWWVNGKEVHSGVSTDPQPLKEQPALNDSRYCLSSRLRVSATFWQNPRNHFRCQVQFYGLSENDEWTQDRAKPVTQIVSAEAWGRADDVIKIHWQEKKSNTILGSQEGNTMKTNDTYMKFSWLTVPEKSLDKEHRCIVRHENNKNGVDQEIIFPPIKTDVITMDPKDNCSKDANDTLLLQLTNTSAYYMYLLLLLKSVVYFAIITCCLLMAMVKRKDSRGRAKRSGSGVKQTLNFDLLKLAGDVESNPGPSRGHMTEYKPTVRLATRDDVPRAVRTLAAAFADYPATRHTVDPDRHIERVTELQELFLTRVGLDIGKVWVADDGAAVAVWTTPESVEAGAVFAEIGPRMAELSGSRLAAQQQMEGLLAPHRPKEPAWFLATVGVSPDHQGKGLGSAVVLPGVEAAERAGVPAFLETSAPRNLPFYERLGFTVTADVEVPEGPRTWCMTRKPGA

SEQ ID NO: 16693 - protein, 852 aa, synthetic construct
MALPVTALLLPLALLLHAARPLEIQNPDPAVYQLRDSKSSDKSVCLFTDFDSQTNVSQSKDSDVYITDKTVLDMRSMDFKSNSAVAWSNKSDFACANAFNNSIIPEDTFFPSPESSDSTDHVKPKETENTKQPSKSCHKPKAIVHTEKVNMMSLTVLGLRMLFAKTVAVNFLLTAKLFFLLTARAKRSGSGATNFSLLKQAGDVEENPGPTSMALPVTALLLPLALLLHAARPDEFEVQLVESGGGLVQAGGSLRLSCAASGITFSINTMGWYRQAPGKQRELVALISSIGDTYYADSVKGRFTISRDNAKNTVYLQMNSLKPEDTAVYYCKRFRTAAQGTDYWGQGTQVTVSSTREDLKNVFPPEVAVFEPSEAEISHTQKATLVCLATGFYPDHVELSWWVNGKEVHSGVSTDPQPLKEQPALNDSRYCLSSRLRVSATFWQNPRNHFRCQVQFYGLSENDEWTQDRAKPVTQIVSAEAWGRADDVIKIHWQEKKSNTILGSQEGNTMKTNDTYMKFSWLTVPEKSLDKEHRCIVRHENNKNGVDQEIIFPPIKTDVITMDPKDNCSKDANDTLLLQLTNTSAYYMYLLLLLKSVVYFAIITCCLLMAMVKRKDSRGRAKRSGSGVKQTLNFDLLKLAGDVESNPGPSRGHMTEYKPTVRLATRDDVPRAVRTLAAAFADYPATRHTVDPDRHIERVTELQELFLTRVGLDIGKVWVADDGAAVAVWTTPESVEAGAVFAEIGPRMAELSGSRLAAQQQMEGLLAPHRPKEPAWFLATVGVSPDHQGKGLGSAVVLPGVEAAERAGVPAFLETSAPRNLPFYERLGFTVTADVEVPEGPRTWCMTRKPGA

SEQ ID NO: 16694 - protein, 852 aa, synthetic construct; identical to SEQ ID NO: 16693

SEQ ID NO: 16695 - protein, 1117 aa, synthetic construct
MALPVTALLLPLALLLHAARPLEIQNPDPAVYQLRDSKSSDKSVCLFTDFDSQTNVSQSKDSDVYITDKTVLDMRSMDFKSNSAVAWSNKSDFACANAFNNSIIPEDTFFPSPESSDSTDHVKPKETENTKQPSKSCHKPKAIVHTEKVNMMSLTVLGLRMLFAKTVAVNFLLTAKLFFLLTARAKRSGSGATNFSLLKQAGDVEENPGPTSMALPVTALLLPLALLLHAARPQVQLVESGGGLVQAGDSVTLSCTASGRTFSSYALAWFRQRPGKEREFVAGLRWGGPTNYADSVKDRFTISGDSAKHTMYLQMNSLKPEDTAVYYCGYNPGGWAVPSQYEYDSWGQGTQVTVSSGTGGGGSGGGGSGGGGSEFDIQMTQSPSSLSASVGDRVTITCKASDHINNWLAWYQQKPGQAPKLLIYGATTLETGVPSRFSGSGSGTDYTLTISSLQPEDFATYYCQQSWNTPWTFGQGTKLEIKRGGGGSGGGGSGGGGSQVQLQQPGAELVKPGASVKMSCKASGYAFSSYWINWMKQKPGQGLEWIGQIYPGDGDTNYNGKFKGRATLTADTSSSTAYMQLSSLTSEDSAVYFCARSITTVVGCAMDYWGQGTSVTVSSTREDLKNVFPPEVAVFEPSEAEISHTQKATLVCLATGFYPDHVELSWWVNGKEVHSGVSTDPQPLKEQPALNDSRYCLSSRLRVSATFWQNPRNHFRCQVQFYGLSENDEWTQDRAKPVTQIVSAEAWGRADDVIKIHWQEKKSNTILGSQEGNTMKTNDTYMKFSWLTVPEKSLDKEHRCIVRHENNKNGVDQEIIFPPIKTDVITMDPKDNCSKDANDTLLLQLTNTSAYYMYLLLLLKSVVYFAIITCCLLMAMVKRKDSRGRAKRSGSGVKQTLNFDLLKLAGDVESNPGPSRGHMTEYKPTVRLATRDDVPRAVRTLAAAFADYPATRHTVDPDRHIERVTELQELFLTRVGLDIGKVWVADDGAAVAVWTTPESVEAGAVFAEIGPRMAELSGSRLAAQQQMEGLLAPHRPKEPAWFLATVGVSPDHQGKGLGSAVVLPGVEAAERAGVPAFLETSAPRNLPFYERLGFTVTADVEVPEGPRTWCMTRKPGA

SEQ ID NO: 16696 - protein, 1246 aa, synthetic construct
MALPVTALLLPLALLLHAARPLEIQNPDPAVYQLRDSKSSDKSVCLFTDFDSQTNVSQSKDSDVYITDKTVLDMRSMDFKSNSAVAWSNKSDFACANAFNNSIIPEDTFFPSPESSDSTDHVKPKETENTKQPSKSCHKPKAIVHTEKVNMMSLTVLGLRMLFAKTVAVNFLLTAKLFFLLTARAKRSGSGATNFSLLKQAGDVEENPGPTSMALPVTALLLPLALLLHAARPEVQLLESGGGLVQPGGSLRLSCAASGFTFSSYAMSWVRQAPGKGLEWVSSISGSGDYIYYADSVKGRFTISRDISKNTLYLQMNSLRAEDTAVYYCAKEGTGANSSLADYRGQGTLVTVSSGGGSGGGSQVQLVESGGGLVQAGDSVTLSCTASGRTFSSYALAWFRQRPGKEREFVAGLRWGGPTNYADSVKDRFTISGDSAKHTMYLQMNSLKPEDTAVYYCGYNPGGWAVPSQYEYDSWGQGTQVTVSSGTGGGGSGGGGSGGGGSEFDIQMTQSPSSLSASVGDRVTITCKASDHINNWLAWYQQKPGQAPKLLIYGATTLETGVPSRFSGSGSGTDYTLTISSLQPEDFATYYCQQSWNTPWTFGQGTKLEIKRGGGGSGGGGSGGGGSQVQLQQPGAELVKPGASVKMSCKASGYAFSSYWINWMKQKPGQGLEWIGQIYPGDGDTNYNGKFKGRATLTADTSSSTAYMQLSSLTSEDSAVYFCARSITTVVGCAMDYWGQGTSVTVSSTREDLKNVFPPEVAVFEPSEAEISHTQKATLVCLATGFYPDHVELSWWVNGKEVHSGVSTDPQPLKEQPALNDSRYCLSSRLRVSATFWQNPRNHFRCQVQFYGLSENDEWTQDRAKPVTQIVSAEAWGRADDVIKIHWQEKKSNTILGSQEGNTMKTNDTYMKFSWLTVPEKSLDKEHRCIVRHENNKNGVDQEIIFPPIKTDVITMDPKDNCSKDANDTLLLQLTNTSAYYMYLLLLLKSVVYFAIITCCLLMAMVKRKDSRGRAKRSGSGVKQTLNFDLLKLAGDVESNPGPSRGHMTEYKPTVRLATRDDVPRAVRTLAAAFADYPATRHTVDPDRHIERVTELQELFLTRVGLDIGKVWVADDGAAVAVWTTPESVEAGAVFAEIGPRMAELSGSRLAAQQQMEGLLAPHRPKEPAWFLATVGVSPDHQGKGLGSAVVLPGVEAAERAGVPAFLETSAPRNLPFYERLGFTVTADVEVPEGPRTWCMTRKPGA

SEQ ID NO: 16697 - protein, 1246 aa, synthetic construct; identical to SEQ ID NO: 16696

SEQ ID NO: 16698 - protein, 858 aa, synthetic construct
MALPVTALLLPLALLLHAARPLEIQNPDPAVYQLRDSKSSDKSVCLFTDFDSQTNVSQSKDSDVYITDKTVLDMRSMDFKSNSAVAWSNKSDFACANAFNNSIIPEDTFFPSPESSDSTDHVKPKETENTKQPSKSCHKPKAIVHTEKVNMMSLTVLGLRMLFAKTVAVNFLLTAKLFFLLTARAKRSGSGATNFSLLKQAGDVEENPGPTSMALPVTALLLPLALLLHAARPDEFGSDLGIKLLFAAAKGQDDEVRILLAAGADVNAKDFEGYTPLHVAAYDGHLEIVEVLLKAGADVNAKDSQGRTPLHEAAYSGHLEIVEVLLKAGADVNAQDDAGETPADLAAAWGHEDIAEVLQKTREDLKNVFPPEVAVFEPSEAEISHTQKATLVCLATGFYPDHVELSWWVNGKEVHSGVSTDPQPLKEQPALNDSRYCLSSRLRVSATFWQNPRNHFRCQVQFYGLSENDEWTQDRAKPVTQIVSAEAWGRADDVIKIHWQEKKSNTILGSQEGNTMKTNDTYMKFSWLTVPEKSLDKEHRCIVRHENNKNGVDQEIIFPPIKTDVITMDPKDNCSKDANDTLLLQLTNTSAYYMYLLLLLKSVVYFAIITCCLLMAMVKRKDSRGRAKRSGSGVKQTLNFDLLKLAGDVESNPGPSRGHMTEYKPTVRLATRDDVPRAVRTLAAAFADYPATRHTVDPDRHIERVTELQELFLTRVGLDIGKVWVADDGAAVAVWTTPESVEAGAVFAEIGPRMAELSGSRLAAQQQMEGLLAPHRPKEPAWFLATVGVSPDHQGKGLGSAVVLPGVEAAERAGVPAFLETSAPRNLPFYERLGFTVTADVEVPEGPRTWCMTRKPGA

SEQ ID NO: 16699 - protein, 787 aa, synthetic construct
MALPVTALLLPLALLLHAARPLEIQNPDPAVYQLRDSKSSDKSVCLFTDFDSQTNVSQSKDSDVYITDKTVLDMRSMDFKSNSAVAWSNKSDFACANAFNNSIIPEDTFFPSPESSDSTDHVKPKETENTKQPSKSCHKPKAIVHTEKVNMMSLTVLGLRMLFAKTVAVNFLLTAKLFFLLTARAKRSGSGATNFSLLKQAGDVEENPGPTSMDWIWRILFLVGAATGAHSFEGSGFEYAKEMRNAYWEIALLPNLTNQQKRAPIRKLYDDPSQSSELLSEAKKLNDSQTREDLKNVFPPEVAVFEPSEAEISHTQKATLVCLATGFYPDHVELSWWVNGKEVHSGVSTDPQPLKEQPALNDSRYCLSSRLRVSATFWQNPRNHFRCQVQFYGLSENDEWTQDRAKPVTQIVSAEAWGRADDVIKIHWQEKKSNTILGSQEGNTMKTNDTYMKFSWLTVPEKSLDKEHRCIVRHENNKNGVDQEIIFPPIKTDVITMDPKDNCSKDANDTLLLQLTNTSAYYMYLLLLLKSVVYFAIITCCLLMAMVKRKDSRGRAKRSGSGVKQTLNFDLLKLAGDVESNPGPSRGHMTEYKPTVRLATRDDVPRAVRTLAAAFADYPATRHTVDPDRHIERVTELQELFLTRVGLDIGKVWVADDGAAVAVWTTPESVEAGAVFAEIGPRMAELSGSRLAAQQQMEGLLAPHRPKEPAWFLATVGVSPDHQGKGLGSAVVLPGVEAAERAGVPAFLETSAPRNLPFYERLGFTVTADVEVPEGPRTWCMTRKPGA

SEQ ID NO: 16700 - protein, 1009 aa, synthetic construct
MALPVTALLLPLALLLHAARPLEIQNPDPAVYQLRDSKSSDKSVCLFTDFDSQTNVSQSKDSDVYITDKTVLDMRSMDFKSNSAVAWSNKSDFACANAFNNSIIPEDTFFPSPESSDSTDHVKPKETENTKQPSKSCHKPKAIVHTEKVNMMSLTVLGLRMLFAKTVAVNFLLTAKLFFLLTARAKRSGSGATNFSLLKQAGDVEENPGPTSMALPVTALLLPLALLLHAARPDEFEVQLVESGGGLVQAGGSLRLSCAASGITFSINTMGWYRQAPGKQRELVALISSIGDTYYADSVKGRFTISRDNAKNTVYLQMNSLKPEDTAVYYCKRFRTAAQGTDYWGQGTQVTVSSLEGGGGSGGGGSGGGGSGSGGSGSGGSGSGGSGSGGSFEVQLVESGGGLVQPGGSLRLSCAASGSIFGFNDMAWYRQAPGKQRELVALISRVGVTSSADSVKGRFTISRVNAKDTVYLQMNSLKPEDTAVYYCYMDQRLDGSTLAYWGQGTQVTVSSTREDLKNVFPPEVAVFEPSEAEISHTQKATLVCLATGFYPDHVELSWWVNGKEVHSGVSTDPQPLKEQPALNDSRYCLSSRLRVSATFWQNPRNHFRCQVQFYGLSENDEWTQDRAKPVTQIVSAEAWGRADDVIKIHWQEKKSNTILGSQEGNTMKTNDTYMKFSWLTVPEKSLDKEHRCIVRHENNKNGVDQEIIFPPIKTDVITMDPKDNCSKDANDTLLLQLTNTSAYYMYLLLLLKSVVYFAIITCCLLMAMVKRKDSRGRAKRSGSGVKQTLNFDLLKLAGDVESNPGPSRGHMTEYKPTVRLATRDDVPRAVRTLAAAFADYPATRHTVDPDRHIERVTELQELFLTRVGLDIGKVWVADDGAAVAVWTTPESVEAGAVFAEIGPRMAELSGSRLAAQQQMEGLLAPHRPKEPAWFLATVGVSPDHQGKGLGSAVVLPGVEAAERAGVPAFLETSAPRNLPFYERLGFTVTADVEVPEGPRTWCMTRKPGA

SEQ ID NO: 16701 - protein, 923 aa, synthetic construct
MALPVTALLLPLALLLHAARPLEIQNPDPAVYQLRDSKSSDKSVCLFTDFDSQTNVSQSKDSDVYITDKTVLDMRSMDFKSNSAVAWSNKSDFACANAFNNSIIPEDTFFPSPESSDSTDHVKPKETENTKQPSKSCHKPKAIVHTEKVNMMSLTVLGLRMLFAKTVAVNFLLTAKLFFLLTARAKRSGSGATNFSLLKQAGDVEENPGPTSMALPVTALLLPLALLLHAARPGMRTEDLPKAVVFLEPQWYRVLEKDSVTLKCQGAYSPEDNSTQWFHNESLISSQASSYFIDAATVDDSGEYRCQTNLSTLSDPVQLEVHIGWLLLQAPRWVFKEEDPIHLRCHSWKNTALHKVTYLQNGKGRKYFHHNSDFYIPKATLKDSGSYFCRGLVGSKNVSSETVNITITQGLAVSTISSFFPPGYQTREDLKNVFPPEVAVFEPSEAEISHTQKATLVCLATGFYPDHVELSWWVNGKEVHSGVSTDPQPLKEQPALNDSRYCLSSRLRVSATFWQNPRNHFRCQVQFYGLSENDEWTQDRAKPVTQIVSAEAWGRADDVIKIHWQEKKSNTILGSQEGNTMKTNDTYMKFSWLTVPEKSLDKEHRCIVRHENNKNGVDQEIIFPPIKTDVITMDPKDNCSKDANDTLLLQLTNTSAYYMYLLLLLKSVVYFAIITCCLLMAMVKRKDSRGRAKRSGSGVKQTLNFDLLKLAGDVESNPGPSRGHMTEYKPTVRLATRDDVPRAVRTLAAAFADYPATRHTVDPDRHIERVTELQELFLTRVGLDIGKVWVADDGAAVAVWTTPESVEAGAVFAEIGPRMAELSGSRLAAQQQMEGLLAPHRPKEPAWFLATVGVSPDHQGKGLGSAVVLPGVEAAERAGVPAFLETSAPRNLPFYERLGFTVTADVEVPEGPRTWCMTRKPGA

SEQ ID NO: 16702 - protein, 925 aa, synthetic construct
MALPVTALLLPLALLLHAARPLEIQNPDPAVYQLRDSKSSDKSVCLFTDFDSQTNVSQSKDSDVYITDKTVLDMRSMDFKSNSAVAWSNKSDFACANAFNNSIIPEDTFFPSPESSDSTDHVKPKETENTKQPSKSCHKPKAIVHTEKVNMMSLTVLGLRMLFAKTVAVNFLLTAKLFFLLTARAKRSGSGATNFSLLKQAGDVEENPGPTSATMALPVTALLLPLALLLHAARPGMRTEDLPKAVVFLEPQWYRVLEKDSVTLKCQGAYSPEDNSTQWFHNESLISSQASSYFIDAATVDDSGEYRCQTNLSTLSDPVQLEVHIGWLLLQAPRWVFKEEDPIHLRCHSWKNTALHKVTYLQNGKGRKYFHHNSDFYIPKATLKDSGSYFCRGLVGSKNVSSETVNITITQGLAVSTISSFFPPGYQTREDLKNVFPPEVAVFEPSEAEISHTQKATLVCLATGFYPDHVELSWWVNGKEVHSGVSTDPQPLKEQPALNDSRYCLSSRLRVSATFWQNPRNHFRCQVQFYGLSENDEWTQDRAKPVTQIVSAEAWGRADDVIKIHWQEKKSNTILGSQEGNTMKTNDTYMKFSWLTVPEKSLDKEHRCIVRHENNKNGVDQEIIFPPIKTDVITMDPKDNCSKDANDTLLLQLTNTSAYYMYLLLLLKSVVYFAIITCCLLMAMVKRKDSRGRAKRSGSGVKQTLNFDLLKLAGDVESNPGPSRGHMTEYKPTVRLATRDDVPRAVRTLAAAFADYPATRHTVDPDRHIERVTELQELFLTRVGLDIGKVWVADDGAAVAVWTTPESVEAGAVFAEIGPRMAELSGSRLAAQQQMEGLLAPHRPKEPAWFLATVGVSPDHQGKGLGSAVVLPGVEAAERAGVPAFLETSAPRNLPFYERLGFTVTADVEVPEGPRTWCMTRKPGA

SEQ ID NO: 16703 - protein, 971 aa, synthetic construct
MALPVTALLLPLALLLHAARPLEEDLKNVFPPEVAVFEPSEAEISHTQKATLVCLATGFYPDHVELSWWVNGKEVHSGVCTDPQPLKEQPALNDSRYCLSSRLRVSATFWQNPRNHFRCQVQFYGLSENDEWTQDRAKPVTQIVSAEAWGRADDVIKIHWQEKKSNTILGSQEGNTMKTNDTYMKFSWLTVPEKSLDKEHRCIVRHENNKNGVDQEIIFPPIKTDVITMDPKDNCSKDANDTLLLQLTNTSAYYMYLLLLLKSVVYFAIITCCLLRRTAFCCNGEKSRAKRSGSGATNFSLLKQAGDVEENPGPTSMALPVTALLLPLALLLHAARPDIQMTQTTSSLSASLGDRVTISCRASQDISKYLNWYQQKPDGTVKLLIYHTSRLHSGVPSRFSGSGSGTDYSLTISNLEQEDIATYFCQQGNTLPYTFGGGTKLEITGGGGSGGGGSGGGGSEVKLQESGPGLVAPSQSLSVTCTVSGVSLPDYGVSWIRQPPRKGLEWLGVIWGSETTYYNSALKSRLTIIKDNSKSQVFLKMNSLQTDDTAIYYCAKHYYYGGSYAMDYWGQGTSVTVSSTRIQNPDPAVYQLRDSKSSDKSVCLFTDFDSQTNVSQSKDSDVYITDKCVLDMRSMDFKSNSAVAWSNKSDFACANAFNNSIIPEDTFFPSPESSDSTDHVKPKETENTKQPSKSCHKPKAIVHTEKVNMMSLTVLGLRMLFAKTVAVNFLLTAKLFFLRAKRSGSGVKQTLNFDLLKLAGDVESNPGPSRGHMTEYKPTVRLATRDDVPRAVRTLAAAFADYPATRHTVDPDRHIERVTELQELFLTRVGLDIGKVWVADDGAAVAVWTTPESVEAGAVFAEIGPRMAELSGSRLAAQQQMEGLLAPHRPKEPAWFLATVGVSPDHQGKGLGSAVVLPGVEAAERAGVPAFLETSAPRNLPFYERLGFTVTADVEVPEGPRTWCMTRKPGA

SEQ ID NO: 16704 - protein, 972 aa, synthetic construct
MALPVTALLLPLALLLHAARPLEEDLKNVFPPEVAVFEPSEAEISHTQKATLVCLATGFYPDHVELSWWVNGKEVHSGVCTDPQPLKEQPALNDSRYCLSSRLRVSATFWQNPRNHFRCQVQFYGLSENDEWTQDRAKPVTQIVSAEAWGRADDVIKIHWQEKKSNTILGSQEGNTMKTNDTYMKFSWLTVPEKSLDKEHRCIVRHENNKNGVDQEIIFPPIKTDVITMDPKDNCSKDANDTLLLQLTNTSAYYMYLLLLLKSVVYFAIITCCLLRRTAFCCNGEKSRAKRSGSGATNFSLLKQAGDVEENPGPTSTMALPVTALLLPLALLLHAARPEIVMTQSPATLSLSPGERATLSCRASQDISKYLNWYQQKPGQAPRLLIYHTSRLHSGIPARFSGSGSGTDYTLTISSLQPEDFAVYFCQQGNTLPYTFGQGTKLEIKGGGGSGGGGSGGGGSQVQLQESGPGLVKPSETLSLTCTVSGVSLPDYGVSWIRQPPGKGLEWIGVIWGSETTYYNSSLKSRVTISKDNSKNQVSLKLSSVTAADTAVYYCAKHYYYGGSYAMDYWGQGTLVTVSSTRIQNPDPAVYQLRDSKSSDKSVCLFTDFDSQTNVSQSKDSDVYITDKCVLDMRSMDFKSNSAVAWSNKSDFACANAFNNSIIPEDTFFPSPESSDSTDHVKPKETENTKQPSKSCHKPKAIVHTEKVNMMSLTVLGLRMLFAKTVAVNFLLTAKLFFLRAKRSGSGVKQTLNFDLLKLAGDVESNPGPSRGHMTEYKPTVRLATRDDVPRAVRTLAAAFADYPATRHTVDPDRHIERVTELQELFLTRVGLDIGKVWVADDGAAVAVWTTPESVEAGAVFAEIGPRMAELSGSRLAAQQQMEGLLAPHRPKEPAWFLATVGVSPDHQGKGLGSAVVLPGVEAAERAGVPAFLETSAPRNLPFYERLGFTVTADVEVPEGPRTWCMTRKPGA

SEQ ID NO: 16705 - protein, 973 aa, synthetic construct
MALPVTALLLPLALLLHAARPLEEDLKNVFPPEVAVFEPSEAEISHTQKATLVCLATGFYPDHVELSWWVNGKEVHSGVCTDPQPLKEQPALNDSRYCLSSRLRVSATFWQNPRNHFRCQVQFYGLSENDEWTQDRAKPVTQIVSAEAWGRADDVIKIHWQEKKSNTILGSQEGNTMKTNDTYMKFSWLTVPEKSLDKEHRCIVRHENNKNGVDQEIIFPPIKTDVITMDPKDNCSKDANDTLLLQLTNTSAYYMYLLLLLKSVVYFAIITCCLLRRTAFCCNGEKSRAKRSGSGATNFSLLKQAGDVEENPGPTSTMALPVTALLLPLALLLHAARPDEIVLTQSPATLSLSPGERATLSCSASSSVSYMHWYQQKPGQAPRLLIYDTSKLASGIPARFSGSGSGTDFTLTISSLEPEDVAVYYCFQGSVYPFTFGQGTKLEIKRGGGGSGGGGSGGGGSQVQLQESGPGLVKPSQTLSLTCTVSGGSISTSGMGVGWIRQHPGKGLEWIGHIWWDDDKRYNPALKSRVTISVDTSKNQFSLKLSSVTAADTAVYYCARMELWSYYFDYWGQGTLVTVSSTRIQNPDPAVYQLRDSKSSDKSVCLFTDFDSQTNVSQSKDSDVYITDKCVLDMRSMDFKSNSAVAWSNKSDFACANAFNNSIIPEDTFFPSPESSDSTDHVKPKETENTKQPSKSCHKPKAIVHTEKVNMMSLTVLGLRMLFAKTVAVNFLLTAKLFFLRAKRSGSGVKQTLNFDLLKLAGDVESNPGPSRGHMTEYKPTVRLATRDDVPRAVRTLAAAFADYPATRHTVDPDRHIERVTELQELFLTRVGLDIGKVWVADDGAAVAVWTTPESVEAGAVFAEIGPRMAELSGSRLAAQQQMEGLLAPHRPKEPAWFLATVGVSPDHQGKGLGSAVVLPGVEAAERAGVPAFLETSAPRNLPFYERLGFTVTADVEVPEGPRTWCMTRKPGA

SEQ ID NO: 16706 - protein, 969 aa, synthetic construct
MALPVTALLLPLALLLHAARPLEEDLKNVFPPEVAVFEPSEAEISHTQKATLVCLATGFYPDHVELSWWVNGKEVHSGVCTDPQPLKEQPALNDSRYCLSSRLRVSATFWQNPRNHFRCQVQFYGLSENDEWTQDRAKPVTQIVSAEAWGRADDVIKIHWQEKKSNTILGSQEGNTMKTNDTYMKFSWLTVPEKSLDKEHRCIVRHENNKNGVDQEIIFPPIKTDVITMDPKDNCSKDANDTLLLQLTNTSAYYMYLLLLLKSVVYFAIITCCLLRRTAFCCNGEKSRAKRSGSGATNFSLLKQAGDVEENPGPTSMALPVTALLLPLALLLHAARPDIQMTQSPSSLSASVGDRVTITCRASQDISNYLNWYQQKPGKAPKLLIYYTSRLHSGVPSRFSGSGSGTDFTLTISSLQPEDFATYYCQQGNTLPYTFGQGTKVEIKRGGGGSGGGGSGGGGSEVQLVESGGGLVQPGGSLRLSCAASGFTFSDYFMSWVRQAPGKGLEWVATISNGGTYTYYPDSVKGRFTISRDNSKNTLYLQMNSLRAEDTAVYYCARFDGYIFDYWGQGTLVTVSSTRIQNPDPAVYQLRDSKSSDKSVCLFTDFDSQTNVSQSKDSDVYITDKCVLDMRSMDFKSNSAVAWSNKSDFACANAFNNSIIPEDTFFPSPESSDSTDHVKPKETENTKQPSKSCHKPKAIVHTEKVNMMSLTVLGLRMLFAKTVAVNFLLTAKLFFLRAKRSGSGVKQTLNFDLLKLAGDVESNPGPSRGHMTEYKPTVRLATRDDVPRAVRTLAAAFADYPATRHTVDPDRHIERVTELQELFLTRVGLDIGKVWVADDGAAVAVWTTPESVEAGAVFAEIGPRMAELSGSRLAAQQQMEGLLAPHRPKEPAWFLATVGVSPDHQGKGLGSAVVLPGVEAAERAGVPAFLETSAPRNLPFYERLGFTVTADVEVPEGPRTWCMTRKPGA

SEQ ID NO: 16707 - protein, 973 aa, synthetic construct
MALPVTALLLPLALLLHAARPLEEDLKNVFPPEVAVFEPSEAEISHTQKATLVCLATGFYPDHVELSWWVNGKEVHSGVCTDPQPLKEQPALNDSRYCLSSRLRVSATFWQNPRNHFRCQVQFYGLSENDEWTQDRAKPVTQIVSAEAWGRADDVIKIHWQEKKSNTILGSQEGNTMKTNDTYMKFSWLTVPEKSLDKEHRCIVRHENNKNGVDQEIIFPPIKTDVITMDPKDNCSKDANDTLLLQLTNTSAYYMYLLLLLKSVVYFAIITCCLLRRTAFCCNGEKSRAKRSGSGATNFSLLKQAGDVEENPGPTSMALPVTALLLPLALLLHAARPDIQMTQSPSSLSASVGDRVTITCKASDHINNWLAWYQQKPGQAPKLLIYGATTLETGVPSRFSGSGSGTDYTLTISSLQPEDFATYYCQQSWNTPWTFGQGTKLEIKRGGGGSGGGGSGGGGSQVQLQQPGAELVKPGASVKMSCKASGYAFSSYWINWMKQKPGQGLEWIGQIYPGDGDTNYNGKFKGRATLTADTSSSTAYMQLSSLTSEDSAVYFCARSITTVVGCAMDYWGQGTSVTVSSTRIQNPDPAVYQLRDSKSSDKSVCLFTDFDSQTNVSQSKDSDVYITDKCVLDMRSMDFKSNSAVAWSNKSDFACANAFNNSIIPEDTFFPSPESSDSTDHVKPKETENTKQPSKSCHKPKAIVHTEKVNMMSLTVLGLRMLFAKTVAVNFLLTAKLFFLRAKRSGSGVKQTLNFDLLKLAGDVESNPGPSRGHMTEYKPTVRLATRDDVPRAVRTLAAAFADYPATRHTVDPDRHIERVTELQELFLTRVGLDIGKVWVADDGAAVAVWTTPESVEAGAVFAEIGPRMAELSGSRLAAQQQMEGLLAPHRPKEPAWFLATVGVSPDHQGKGLGSAVVLPGVEAAERAGVPAFLETSAPRNLPFYERLGFTVTADVEVPEGPRTWCMTRKPGA

SEQ ID NO: 16708 - protein, 975 aa, synthetic construct
MALPVTALLLPLALLLHAARPLEEDLKNVFPPEVAVFEPSEAEISHTQKATLVCLATGFYPDHVELSWWVNGKEVHSGVCTDPQPLKEQPALNDSRYCLSSRLRVSATFWQNPRNHFRCQVQFYGLSENDEWTQDRAKPVTQIVSAEAWGRADDVIKIHWQEKKSNTILGSQEGNTMKTNDTYMKFSWLTVPEKSLDKEHRCIVRHENNKNGVDQEIIFPPIKTDVITMDPKDNCSKDANDTLLLQLTNTSAYYMYLLLLLKSVVYFAIITCCLLRRTAFCCNGEKSRAKRSGSGATNFSLLKQAGDVEENPGPTSMALPVTALLLPLALLLHAARPQIVLSQSPAILSASPGEKVTMTCRASSSVSYMHWYQQKPGSSPKPWIYATSNLASGVPARFSGSGSGTSYSFTISRVEAEDAATYYCQQWTFNPPTFGGGTRLEIKRTVAAGGGGSGGGGSGGGGSQAYLQQSGAELVRPGASVKMSCKASGYTFTSYNMHWVKQTPRQGLEWIGGIYPGNGDTSYNQKFKGKATLTVGKSSSTAYMQLSSLTSEDSAVYFCARYDYNYAMDYWGQGTSVTVSSASTRIQNPDPAVYQLRDSKSSDKSVCLFTDFDSQTNVSQSKDSDVYITDKCVLDMRSMDFKSNSAVAWSNKSDFACANAFNNSIIPEDTFFPSPESSDSTDHVKPKETENTKQPSKSCHKPKAIVHTEKVNMMSLTVLGLRMLFAKTVAVNFLLTAKLFFLRAKRSGSGVKQTLNFDLLKLAGDVESNPGPSRGHMTEYKPTVRLATRDDVPRAVRTLAAAFADYPATRHTVDPDRHIERVTELQELFLTRVGLDIGKVWVADDGAAVAVWTTPESVEAGAVFAEIGPRMAELSGSRLAAQQQMEGLLAPHRPKEPAWFLATVGVSPDHQGKGLGSAVVLPGVEAAERAGVPAFLETSAPRNLPFYERLGFTVTADVEVPEGPRTWCMTRKPGA

SEQ ID NO: 16709 - protein, 973 aa, synthetic construct
MALPVTALLLPLALLLHAARPLEEDLKNVFPPEVAVFEPSEAEISHTQKATLVCLATGFYPDHVELSWWVNGKEVHSGVCTDPQPLKEQPALNDSRYCLSSRLRVSATFWQNPRNHFRCQVQFYGLSENDEWTQDRAKPVTQIVSAEAWGRADDVIKIHWQEKKSNTILGSQEGNTMKTNDTYMKFSWLTVPEKSLDKEHRCIVRHENNKNGVDQEIIFPPIKTDVITMDPKDNCSKDANDTLLLQLTNTSAYYMYLLLLLKSVVYFAIITCCLLRRTAFCCNGEKSRAKRSGSGATNFSLLKQAGDVEENPGPTSMALPVTALLLPLALLLHAARPEIVLTQSPATLSLSPGERATLSCRASQSVSSYLAWYQQKPGQAPRLLIYDASNRATGIPARFSGSGSGTDFTLTISSLEPEDFAVYYCQQRSNWPITFGQGTRLEIKGGGGSGGGGSGGGGSEVQLVESGGGLVQPDRSLRLSCAASGFTFHDYAMHWVRQAPGKGLEWVSTISWNSGTIGYADSVKGRFTISRDNAKNSLYLQMNSLRAEDTALYYCAKDIQYGNYYYGMDVWGQGTTVTVSSTRIQNPDPAVYQLRDSKSSDKSVCLFTDFDSQTNVSQSKDSDVYITDKCVLDMRSMDFKSNSAVAWSNKSDFACANAFNNSIIPEDTFFPSPESSDSTDHVKPKETENTKQPSKSCHKPKAIVHTEKVNMMSLTVLGLRMLFAKTVAVNFLLTAKLFFLRAKRSGSGVKQTLNFDLLKLAGDVESNPGPSRGHMTEYKPTVRLATRDDVPRAVRTLAAAFADYPATRHTVDPDRHIERVTELQELFLTRVGLDIGKVWVADDGAAVAVWTTPESVEAGAVFAEIGPRMAELSGSRLAAQQQMEGLLAPHRPKEPAWFLATVGVSPDHQGKGLGSAVVLPGVEAAERAGVPAFLETSAPRNLPFYERLGFTVTADVEVPEGPRTWCMTRKPGA

SEQ ID NO: 16710 - protein, 971 aa, synthetic construct
MALPVTALLLPLALLLHAARPLEEDLKNVFPPEVAVFEPSEAEISHTQKATLVCLATGFYPDHVELSWWVNGKEVHSGVCTDPQPLKEQPALNDSRYCLSSRLRVSATFWQNPRNHFRCQVQFYGLSENDEWTQDRAKPVTQIVSAEAWGRADDVIKIHWQEKKSNTILGSQEGNTMKTNDTYMKFSWLTVPEKSLDKEHRCIVRHENNKNGVDQEIIFPPIKTDVITMDPKDNCSKDANDTLLLQLTNTSAYYMYLLLLLKSVVYFAIITCCLLRRTAFCCNGEKSRAKRSGSGATNFSLLKQAGDVEENPGPTSMALPVTALLLPLALLLHAARPDIQMTQSPSSLSASVGDRVTITCRASQDVNTAVAWYQQKPGKAPKLLIYSASFLESGVPSRFSGSRSGTDFTLTISSLQPEDFATYYCQQHYTTPPTFGQTKVEIKRGGGGSGGGGSGGGGSEVQLVESGGGLVQPGGSLRLSCAASGFNIKDTYIHWVRQAPGKGLEWVARIYPTNGYTRYADSVKGRFTISADTSKNTAYLQMNSLRAEDTAVYYCSRWGGDGFYAMDVWGQGTLVTVSSTRIQNPDPAVYQLRDSKSSDKSVCLFTDFDSQTNVSQSKDSDVYITDKCVLDMRSMDFKSNSAVAWSNKSDFACANAFNNSIIPEDTFFPSPESSDSTDHVKPKETENTKQPSKSCHKPKAIVHTEKVNMMSLTVLGLRMLFAKTVAVNFLLTAKLFFLRAKRSGSGVKQTLNFDLLKLAGDVESNPGPSRGHMTEYKPTVRLATRDDVPRAVRTLAAAFADYPATRHTVDPDRHIERVTELQELFLTRVGLDIGKVWVADDGAAVAVWTTPESVEAGAVFAEIGPRMAELSGSRLAAQQQMEGLLAPHRPKEPAWFLATVGVSPDHQGKGLGSAVVLPGVEAAERAGVPAFLETSAPRNLPFYERLGFTVTADVEVPEGPRTWCMTRKPGA

SEQ ID NO: 16711 - protein, 850 aa, synthetic construct
MALPVTALLLPLALLLHAARPLEEDLKNVFPPEVAVFEPSEAEISHTQKATLVCLATGFYPDHVELSWWVNGKEVHSGVCTDPQPLKEQPALNDSRYCLSSRLRVSATFWQNPRNHFRCQVQFYGLSENDEWTQDRAKPVTQIVSAEAWGRADDVIKIHWQEKKSNTILGSQEGNTMKTNDTYMKFSWLTVPEKSLDKEHRCIVRHENNKNGVDQEIIFPPIKTDVITMDPKDNCSKDANDTLLLQLTNTSAYYMYLLLLLKSVVYFAIITCCLLRRTAFCCNGEKSRAKRSGSGATNFSLLKQAGDVEENPGPTSMALPVTALLLPLALLLHAARPDEFEVQLVESGGGLVQAGGSLRLSCAASGITFSINTMGWYRQAPGKQRELVALISSIGDTYYADSVKGRFTISRDNAKNTVYLQMNSLKPEDTAVYYCKRFRTAAQGTDYWGQGTQVTVSSTRIQNPDPAVYQLRDSKSSDKSVCLFTDFDSQTNVSQSKDSDVYITDKCVLDMRSMDFKSNSAVAWSNKSDFACANAFNNSIIPEDTFFPSPESSDSTDHVKPKETENTKQPSKSCHKPKAIVHTEKVNMMSLTVLGLRMLFAKTVAVNFLLTAKLFFLRAKRSGSGVKQTLNFDLLKLAGDVESNPGPSRGHMTEYKPTVRLATRDDVPRAVRTLAAAFADYPATRHTVDPDRHIERVTELQELFLTRVGLDIGKVWVADDGAAVAVWTTPESVEAGAVFAEIGPRMAELSGSRLAAQQQMEGLLAPHRPKEPAWFLATVGVSPDHQGKGLGSAVVLPGVEAAERAGVPAFLETSAPRNLPFYERLGFTVTADVEVPEGPRTWCMTRKPGA

SEQ ID NO: 16712 - protein, 850 aa, synthetic construct; identical to SEQ ID NO: 16711

SEQ ID NO: 16713 - protein, 1115 aa, synthetic construct
MALPVTALLLPLALLLHAARPLEEDLKNVFPPEVAVFEPSEAEISHTQKATLVCLATGFYPDHVELSWWVNGKEVHSGVCTDPQPLKEQPALNDSRYCLSSRLRVSATFWQNPRNHFRCQVQFYGLSENDEWTQDRAKPVTQIVSAEAWGRADDVIKIHWQEKKSNTILGSQEGNTMKTNDTYMKFSWLTVPEKSLDKEHRCIVRHENNKNGVDQEIIFPPIKTDVITMDPKDNCSKDANDTLLLQLTNTSAYYMYLLLLLKSVVYFAIITCCLLRRTAFCCNGEKSRAKRSGSGATNFSLLKQAGDVEENPGPTSMALPVTALLLPLALLLHAARPQVQLVESGGGLVQAGDSVTLSCTASGRTFSSYALAWFRQRPGKEREFVAGLRWGGPTNYADSVKDRFTISGDSAKHTMYLQMNSLKPEDTAVYYCGYNPGGWAVPSQYEYDSWGQGTQVTVSSGTGGGGSGGGGSGGGGSEFDIQMTQSPSSLSASVGDRVTITCKASDHINNWLAWYQQKPGQAPKLLIYGATTLETGVPSRFSGSGSGTDYTLTISSLQPEDFATYYCQQSWNTPWTFGQGTKLEIKRGGGGSGGGGSGGGGSQVQLQQPGAELVKPGASVKMSCKASGYAFSSYWINWMKQKPGQGLEWIGQIYPGDGDTNYNGKFKGRATLTADTSSSTAYMQLSSLTSEDSAVYFCARSITTVVGCAMDYWGQGTSVTVSSTRIQNPDPAVYQLRDSKSSDKSVCLFTDFDSQTNVSQSKDSDVYITDKCVLDMRSMDFKSNSAVAWSNKSDFACANAFNNSIIPEDTFFPSPESSDSTDHVKPKETENTKQPSKSCHKPKAIVHTEKVNMMSLTVLGLRMLFAKTVAVNFLLTAKLFFLRAKRSGSGVKQTLNFDLLKLAGDVESNPGPSRGHMTEYKPTVRLATRDDVPRAVRTLAAAFADYPATRHTVDPDRHIERVTELQELFLTRVGLDIGKVWVADDGAAVAVWTTPESVEAGAVFAEIGPRMAELSGSRLAAQQQMEGLLAPHRPKEPAWFLATVGVSPDHQGKGLGSAVVLPGVEAAERAGVPAFLETSAPRNLPFYERLGFTVTADVEVPEGPRTWCMTRKPGA

SEQ ID NO: 16714 - protein, 1244 aa, synthetic construct
MALPVTALLLPLALLLHAARPLEEDLKNVFPPEVAVFEPSEAEISHTQKATLVCLATGFYPDHVELSWWVNGKEVHSGVCTDPQPLKEQPALNDSRYCLSSRLRVSATFWQNPRNHFRCQVQFYGLSENDEWTQDRAKPVTQIVSAEAWGRADDVIKIHWQEKKSNTILGSQEGNTMKTNDTYMKFSWLTVPEKSLDKEHRCIVRHENNKNGVDQEIIFPPIKTDVITMDPKDNCSKDANDTLLLQLTNTSAYYMYLLLLLKSVVYFAIITCCLLRRTAFCCNGEKSRAKRSGSGATNFSLLKQAGDVEENPGPTSMALPVTALLLPLALLLHAARPEVQLLESGGGLVQPGGSLRLSCAASGFTFSSYAMSWVRQAPGKGLEWVSSISGSGDYIYYADSVKGRFTISRDISKNTLYLQMNSLRAEDTAVYYCAKEGTGANSSLADYRGQGTLVTVSSGGGSGGGSQVQLVESGGGLVQAGDSVTLSCTASGRTFSSYALAWFRQRPGKEREFVAGLRWGGPTNYADSVKDRFTISGDSAKHTMYLQMNSLKPEDTAVYYCGYNPGGWAVPSQYEYDSWGQGTQVTVSSGTGGGGSGGGGSGGGGSEFDIQMTQSPSSLSASVGDRVTITCKASDHINNWLAWYQQKPGQAPKLLIYGATTLETGVPSRFSGSGSGTDYTLTISSLQPEDFATYYCQQSWNTPWTFGQGTKLEIKRGGGGSGGGGSGGGGSQVQLQQPGAELVKPGASVKMSCKASGYAFSSYWINWMKQKPGQGLEWIGQIYPGDGDTNYNGKFKGRATLTADTSSSTAYMQLSSLTSEDSAVYFCARSITTVVGCAMDYWGQGTSVTVSSTRIQNPDPAVYQLRDSKSSDKSVCLFTDFDSQTNVSQSKDSDVYITDKCVLDMRSMDFKSNSAVAWSNKSDFACANAFNNSIIPEDTFFPSPESSDSTDHVKPKETENTKQPSKSCHKPKAIVHTEKVNMMSLTVLGLRMLFAKTVAVNFLLTAKLFFLRAKRSGSGVKQTLNFDLLKLAGDVESNPGPSRGHMTEYKPTVRLATRDDVPRAVRTLAAAFADYPATRHTVDPDRHIERVTELQELFLTRVGLDIGKVWVADDGAAVAVWTTPESVEAGAVFAEIGPRMAELSGSRLAAQQQMEGLLAPHRPKEPAWFLATVGVSPDHQGKGLGSAVVLPGVEAAERAGVPAFLETSAPRNLPFYERLGFTVTADVEVPEGPRTWCMTRKPGA

SEQ ID NO: 16715 - protein, 1244 aa, synthetic construct; identical to SEQ ID NO: 16714

SEQ ID NO: 16716 - protein, 856 aa, synthetic construct
MALPVTALLLPLALLLHAARPLEEDLKNVFPPEVAVFEPSEAEISHTQKATLVCLATGFYPDHVELSWWVNGKEVHSGVCTDPQPLKEQPALNDSRYCLSSRLRVSATFWQNPRNHFRCQVQFYGLSENDEWTQDRAKPVTQIVSAEAWGRADDVIKIHWQEKKSNTILGSQEGNTMKTNDTYMKFSWLTVPEKSLDKEHRCIVRHENNKNGVDQEIIFPPIKTDVITMDPKDNCSKDANDTLLLQLTNTSAYYMYLLLLLKSVVYFAIITCCLLRRTAFCCNGEKSRAKRSGSGATNFSLLKQAGDVEENPGPTSMALPVTALLLPLALLLHAARPDEFGSDLGIKLLFAAAKGQDDEVRILLAAGADVNAKDFEGYTPLHVAAYDGHLEIVEVLLKAGADVNAKDSQGRTPLHEAAYSGHLEIVEVLLKAGADVNAQDDAGETPADLAAAWGHEDIAEVLQKTRIQNPDPAVYQLRDSKSSDKSVCLFTDFDSQTNVSQSKDSDVYITDKCVLDMRSMDFKSNSAVAWSNKSDFACANAFNNSIIPEDTFFPSPESSDSTDHVKPKETENTKQPSKSCHKPKAIVHTEKVNMMSLTVLGLRMLFAKTVAVNFLLTAKLFFLRAKRSGSGVKQTLNFDLLKLAGDVESNPGPSRGHMTEYKPTVRLATRDDVPRAVRTLAAAFADYPATRHTVDPDRHIERVTELQELFLTRVGLDIGKVWVADDGAAVAVWTTPESVEAGAVFAEIGPRMAELSGSRLAAQQQMEGLLAPHRPKEPAWFLATVGVSPDHQGKGLGSAVVLPGVEAAERAGVPAFLETSAPRNLPFYERLGFTVTADVEVPEGPRTWCMTRKPGA

SEQ ID NO: 16717 - protein, 785 aa, synthetic construct
MALPVTALLLPLALLLHAARPLEEDLKNVFPPEVAVFEPSEAEISHTQKATLVCLATGFYPDHVELSWWVNGKEVHSGVCTDPQPLKEQPALNDSRYCLSSRLRVSATFWQNPRNHFRCQVQFYGLSENDEWTQDRAKPVTQIVSAEAWGRADDVIKIHWQEKKSNTILGSQEGNTMKTNDTYMKFSWLTVPEKSLDKEHRCIVRHENNKNGVDQEIIFPPIKTDVITMDPKDNCSKDANDTLLLQLTNTSAYYMYLLLLLKSVVYFAIITCCLLRRTAFCCNGEKSRAKRSGSGATNFSLLKQAGDVEENPGPTSMDWIWRILFLVGAATGAHSFEGSGFEYAKEMRNAYWEIALLPNLTNQQKRAPIRKLYDDPSQSSELLSEAKKLNDSQTRIQNPDPAVYQLRDSKSSDKSVCLFTDFDSQTNVSQSKDSDVYITDKCVLDMRSMDFKSNSAVAWSNKSDFACANAFNNSIIPEDTFFPSPESSDSTDHVKPKETENTKQPSKSCHKPKAIVHTEKVNMMSLTVLGLRMLFAKTVAVNFLLTAKLFFLRAKRSGSGVKQTLNFDLLKLAGDVESNPGPSRGHMTEYKPTVRLATRDDVPRAVRTLAAAFADYPATRHTVDPDRHIERVTELQELFLTRVGLDIGKVWVADDGAAVAVWTTPESVEAGAVFAEIGPRMAELSGSRLAAQQQMEGLLAPHRPKEPAWFLATVGVSPDHQGKGLGSAVVLPGVEAAERAGVPAFLETSAPRNLPFYERLGFTVTADVEVPEGPRTWCMTRKPGA

SEQ ID NO: 16718 - protein, 1007 aa, synthetic construct
MALPVTALLLPLALLLHAARPLEEDLKNVFPPEVAVFEPSEAEISHTQKATLVCLATGFYPDHVELSWWVNGKEVHSGVCTDPQPLKEQPALNDSRYCLSSRLRVSATFWQNPRNHFRCQVQFYGLSENDEWTQDRAKPVTQIVSAEAWGRADDVIKIHWQEKKSNTILGSQEGNTMKTNDTYMKFSWLTVPEKSLDKEHRCIVRHENNKNGVDQEIIFPPIKTDVITMDPKDNCSKDANDTLLLQLTNTSAYYMYLLLLLKSVVYFAIITCCLLRRTAFCCNGEKSRAKRSGSGATNFSLLKQAGDVEENPGPTSMALPVTALLLPLALLLHAARPDEFEVQLVESGGGLVQAGGSLRLSCAASGITFSINTMGWYRQAPGKQRELVALISSIGDTYYADSVKGRFTISRDNAKNTVYLQMNSLKPEDTAVYYCKRFRTAAQGTDYWGQGTQVTVSSLEGGGGSGGGGSGGGGSGSGGSGSGGSGSGGSGSGGSFEVQLVESGGGLVQPGGSLRLSCAASGSIFGFNDMAWYRQAPGKQRELVALISRVGVTSSADSVKGRFTISRVNAKDTVYLQMNSLKPEDTAVYYCYMDQRLDGSTLAYWGQGTQVTVSSTRIQNPDPAVYQLRDSKSSDKSVCLFTDFDSQTNVSQSKDSDVYITDKCVLDMRSMDFKSNSAVAWSNKSDFACANAFNNSIIPEDTFFPSPESSDSTDHVKPKETENTKQPSKSCHKPKAIVHTEKVNMMSLTVLGLRMLFAKTVAVNFLLTAKLFFLRAKRSGSGVKQTLNFDLLKLAGDVESNPGPSRGHMTEYKPTVRLATRDDVPRAVRTLAAAFADYPATRHTVDPDRHIERVTELQELFLTRVGLDIGKVWVADDGAAVAVWTTPESVEAGAVFAEIGPRMAELSGSRLAAQQQMEGLLAPHRPKEPAWFLATVGVSPDHQGKGLGSAVVLPGVEAAERAGVPAFLETSAPRNLPFYERLGFTVTADVEVPEGPRTWCMTRKPGA

SEQ ID NO: 16719 - protein, 921 aa, synthetic construct
MALPVTALLLPLALLLHAARPLEEDLKNVFPPEVAVFEPSEAEISHTQKATLVCLATGFYPDHVELSWWVNGKEVHSGVCTDPQPLKEQPALNDSRYCLSSRLRVSATFWQNPRNHFRCQVQFYGLSENDEWTQDRAKPVTQIVSAEAWGRADDVIKIHWQEKKSNTILGSQEGNTMKTNDTYMKFSWLTVPEKSLDKEHRCIVRHENNKNGVDQEIIFPPIKTDVITMDPKDNCSKDANDTLLLQLTNTSAYYMYLLLLLKSVVYFAIITCCLLRRTAFCCNGEKSRAKRSGSGATNFSLLKQAGDVEENPGPTSMALPVTALLLPLALLLHAARPGMRTEDLPKAVVFLEPQWYRVLEKDSVTLKCQGAYSPEDNSTQWFHNESLISSQASSYFIDAATVDDSGEYRCQTNLSTLSDPVQLEVHIGWLLLQAPRWVFKEEDPIHLRCHSWKNTALHKVTYLQNGKGRKYFHHNSDFYIPKATLKDSGSYFCRGLVGSKNVSSETVNITITQGLAVSTISSFFPPGYQTRIQNPDPAVYQLRDSKSSDKSVCLFTDFDSQTNVSQSKDSDVYITDKCVLDMRSMDFKSNSAVAWSNKSDFACANAFNNSIIPEDTFFPSPESSDSTDHVKPKETENTKQPSKSCHKPKAIVHTEKVNMMSLTVLGLRMLFAKTVAVNFLLTAKLFFLRAKRSGSGVKQTLNFDLLKLAGDVESNPGPSRGHMTEYKPTVRLATRDDVPRAVRTLAAAFADYPATRHTVDPDRHIERVTELQELFLTRVGLDIGKVWVADDGAAVAVWTTPESVEAGAVFAEIGPRMAELSGSRLAAQQQMEGLLAPHRPKEPAWFLATVGVSPDHQGKGLGSAVVLPGVEAAERAGVPAFLETSAPRNLPFYERLGFTVTADVEVPEGPRTWCMTRKPGA

SEQ ID NO: 16720 - protein, 923 aa, synthetic construct
MALPVTALLLPLALLLHAARPLEEDLKNVFPPEVAVFEPSEAEISHTQKATLVCLATGFYPDHVELSWWVNGKEVHSGVCTDPQPLKEQPALNDSRYCLSSRLRVSATFWQNPRNHFRCQVQFYGLSENDEWTQDRAKPVTQIVSAEAWGRADDVIKIHWQEKKSNTILGSQEGNTMKTNDTYMKFSWLTVPEKSLDKEHRCIVRHENNKNGVDQEIIFPPIKTDVITMDPKDNCSKDANDTLLLQLTNTSAYYMYLLLLLKSVVYFAIITCCLLRRTAFCCNGEKSRAKRSGSGATNFSLLKQAGDVEENPGPTSATMALPVTALLLPLALLLHAARPGMRTEDLPKAVVFLEPQWYRVLEKDSVTLKCQGAYSPEDNSTQWFHNESLISSQASSYFIDAATVDDSGEYRCQTNLSTLSDPVQLEVHIGWLLLQAPRWVFKEEDPIHLRCHSWKNTALHKVTYLQNGKGRKYFHHNSDFYIPKATLKDSGSYFCRGLVGSKNVSSETVNITITQGLAVSTISSFFPPGYQTRIQNPDPAVYQLRDSKSSDKSVCLFTDFDSQTNVSQSKDSDVYITDKCVLDMRSMDFKSNSAVAWSNKSDFACANAFNNSIIPEDTFFPSPESSDSTDHVKPKETENTKQPSKSCHKPKAIVHTEKVNMMSLTVLGLRMLFAKTVAVNFLLTAKLFFLRAKRSGSGVKQTLNFDLLKLAGDVESNPGPSRGHMTEYKPTVRLATRDDVPRAVRTLAAAFADYPATRHTVDPDRHIERVTELQELFLTRVGLDIGKVWVADDGAAVAVWTTPESVEAGAVFAEIGPRMAELSGSRLAAQQQMEGLLAPHRPKEPAWFLATVGVSPDHQGKGLGSAVVLPGVEAAERAGVPAFLETSAPRNLPFYERLGFTVTADVEVPEGPRTWCMTRKPGA

SEQ ID NO: 16721 - protein, 971 aa, synthetic construct
MALPVTALLLPLALLLHAARPLEIQNPDPAVYQLRDSKSSDKSVCLFTDFDSQTNVSQSKDSDVYITDKCVLDMRSMDFKSNSAVAWSNKSDFACANAFNNSIIPEDTFFPSPESSDSTDHVKPKETENTKQPSKSCHKPKAIVHTEKVNMMSLTVLGLRMLFAKTVAVNFLLTAKLFFLRAKRSGSGATNFSLLKQAGDVEENPGPTSMALPVTALLLPLALLLHAARPDIQMTQTTSSLSASLGDRVTISCRASQDISKYLNWYQQKPDGTVKLLIYHTSRLHSGVPSRFSGSGSGTDYSLTISNLEQEDIATYFCQQGNTLPYTFGGGTKLEITGGGGSGGGGSGGGGSEVKLQESGPGLVAPSQSLSVTCTVSGVSLPDYGVSWIRQPPRKGLEWLGVIWGSETTYYNSALKSRLTIIKDNSKSQVFLKMNSLQTDDTAIYYCAKHYYYGGSYAMDYWGQGTSVTVSSTREDLKNVFPPEVAVFEPSEAEISHTQKATLVCLATGFYPDHVELSWWVNGKEVHSGVCTDPQPLKEQPALNDSRYCLSSRLRVSATFWQNPRNHFRCQVQFYGLSENDEWTQDRAKPVTQIVSAEAWGRADDVIKIHWQEKKSNTILGSQEGNTMKTNDTYMKFSWLTVPEKSLDKEHRCIVRHENNKNGVDQEIIFPPIKTDVITMDPKDNCSKDANDTLLLQLTNTSAYYMYLLLLLKSVVYFAIITCCLLRRTAFCCNGEKSRAKRSGSGVKQTLNFDLLKLAGDVESNPGPSRGHMTEYKPTVRLATRDDVPRAVRTLAAAFADYPATRHTVDPDRHIERVTELQELFLTRVGLDIGKVWVADDGAAVAVWTTPESVEAGAVFAEIGPRMAELSGSRLAAQQQMEGLLAPHRPKEPAWFLATVGVSPDHQGKGLGSAVVLPGVEAAERAGVPAFLETSAPRNLPFYERLGFTVTADVEVPEGPRTWCMTRKPGA

SEQ ID NO: 16722 - protein, 972 aa, synthetic construct
MALPVTALLLPLALLLHAARPLEIQNPDPAVYQLRDSKSSDKSVCLFTDFDSQTNVSQSKDSDVYITDKCVLDMRSMDFKSNSAVAWSNKSDFACANAFNNSIIPEDTFFPSPESSDSTDHVKPKETENTKQPSKSCHKPKAIVHTEKVNMMSLTVLGLRMLFAKTVAVNFLLTAKLFFLRAKRSGSGATNFSLLKQAGDVEENPGPTSTMALPVTALLLPLALLLHAARPEIVMTQSPATLSLSPGERATLSCRASQDISKYLNWYQQKPGQAPRLLIYHTSRLHSGIPARFSGSGSGTDYTLTISSLQPEDFAVYFCQQGNTLPYTFGQGTKLEIKGGGGSGGGGSGGGGSQVQLQESGPGLVKPSETLSLTCTVSGVSLPDYGVSWIRQPPGKGLEWIGVIWGSETTYYNSSLKSRVTISKDNSKNQVSLKLSSVTAADTAVYYCAKHYYYGGSYAMDYWGQGTLVTVSSTREDLKNVFPPEVAVFEPSEAEISHTQKATLVCLATGFYPDHVELSWWVNGKEVHSGVCTDPQPLKEQPALNDSRYCLSSRLRVSATFWQNPRNHFRCQVQFYGLSENDEWTQDRAKPVTQIVSAEAWGRADDVIKIHWQEKKSNTILGSQEGNTMKTNDTYMKFSWLTVPEKSLDKEHRCIVRHENNKNGVDQEIIFPPIKTDVITMDPKDNCSKDANDTLLLQLTNTSAYYMYLLLLLKSVVYFAIITCCLLRRTAFCCNGEKSRAKRSGSGVKQTLNFDLLKLAGDVESNPGPSRGHMTEYKPTVRLATRDDVPRAVRTLAAAFADYPATRHTVDPDRHIERVTELQELFLTRVGLDIGKVWVADDGAAVAVWTTPESVEAGAVFAEIGPRMAELSGSRLAAQQQMEGLLAPHRPKEPAWFLATVGVSPDHQGKGLGSAVVLPGVEAAERAGVPAFLETSAPRNLPFYERLGFTVTADVEVPEGPRTWCMTRKPGA

SEQ ID NO: 16723 - protein, 973 aa, synthetic construct
MALPVTALLLPLALLLHAARPLEIQNPDPAVYQLRDSKSSDKSVCLFTDFDSQTNVSQSKDSDVYITDKCVLDMRSMDFKSNSAVAWSNKSDFACANAFNNSIIPEDTFFPSPESSDSTDHVKPKETENTKQPSKSCHKPKAIVHTEKVNMMSLTVLGLRMLFAKTVAVNFLLTAKLFFLRAKRSGSGATNFSLLKQAGDVEENPGPTSTMALPVTALLLPLALLLHAARPDEIVLTQSPATLSLSPGERATLSCSASSSVSYMHWYQQKPGQAPRLLIYDTSKLASGIPARFSGSGSGTDFTLTISSLEPEDVAVYYCFQGSVYPFTFGQGTKLEIKRGGGGSGGGGSGGGGSQVQLQESGPGLVKPSQTLSLTCTVSGGSISTSGMGVGWIRQHPGKGLEWIGHIWWDDDKRYNPALKSRVTISVDTSKNQFSLKLSSVTAADTAVYYCARMELWSYYFDYWGQGTLVTVSSTREDLKNVFPPEVAVFEPSEAEISHTQKATLVCLATGFYPDHVELSWWVNGKEVHSGVCTDPQPLKEQPALNDSRYCLSSRLRVSATFWQNPRNHFRCQVQFYGLSENDEWTQDRAKPVTQIVSAEAWGRADDVIKIHWQEKKSNTILGSQEGNTMKTNDTYMKFSWLTVPEKSLDKEHRCIVRHENNKNGVDQEIIFPPIKTDVITMDPKDNCSKDANDTLLLQLTNTSAYYMYLLLLLKSVVYFAIITCCLLRRTAFCCNGEKSRAKRSGSGVKQTLNFDLLKLAGDVESNPGPSRGHMTEYKPTVRLATRDDVPRAVRTLAAAFADYPATRHTVDPDRHIERVTELQELFLTRVGLDIGKVWVADDGAAVAVWTTPESVEAGAVFAEIGPRMAELSGSRLAAQQQMEGLLAPHRPKEPAWFLATVGVSPDHQGKGLGSAVVLPGVEAAERAGVPAFLETSAPRNLPFYERLGFTVTADVEVPEGPRTWCMTRKPGA

SEQ ID NO: 16724 - protein, 969 aa, synthetic construct
MALPVTALLLPLALLLHAARPLEIQNPDPAVYQLRDSKSSDKSVCLFTDFDSQTNVSQSKDSDVYITDKCVLDMRSMDFKSNSAVAWSNKSDFACANAFNNSIIPEDTFFPSPESSDSTDHVKPKETENTKQPSKSCHKPKAIVHTEKVNMMSLTVLGLRMLFAKTVAVNFLLTAKLFFLRAKRSGSGATNFSLLKQAGDVEENPGPTSMALPVTALLLPLALLLHAARPDIQMTQSPSSLSASVGDRVTITCRASQDISNYLNWYQQKPGKAPKLLIYYTSRLHSGVPSRFSGSGSGTDFTLTISSLQPEDFATYYCQQGNTLPYTFGQGTKVEIKRGGGGSGGGGSGGGGSEVQLVESGGGLVQPGGSLRLSCAASGFTFSDYFMSWVRQAPGKGLEWVATISNGGTYTYYPDSVKGRFTISRDNSKNTLYLQMNSLRAEDTAVYYCARFDGYIFDYWGQGTLVTVSSTREDLKNVFPPEVAVFEPSEAEISHTQKATLVCLATGFYPDHVELSWWVNGKEVHSGVCTDPQPLKEQPALNDSRYCLSSRLRVSATFWQNPRNHFRCQVQFYGLSENDEWTQDRAKPVTQIVSAEAWGRADDVIKIHWQEKKSNTILGSQEGNTMKTNDTYMKFSWLTVPEKSLDKEHRCIVRHENNKNGVDQEIIFPPIKTDVITMDPKDNCSKDANDTLLLQLTNTSAYYMYLLLLLKSVVYFAIITCCLLRRTAFCCNGEKSRAKRSGSGVKQTLNFDLLKLAGDVESNPGPSRGHMTEYKPTVRLATRDDVPRAVRTLAAAFADYPATRHTVDPDRHIERVTELQELFLTRVGLDIGKVWVADDGAAVAVWTTPESVEAGAVFAEIGPRMAELSGSRLAAQQQMEGLLAPHRPKEPAWFLATVGVSPDHQGKGLGSAVVLPGVEAAERAGVPAFLETSAPRNLPFYERLGFTVTADVEVPEGPRTWCMTRKPGA

SEQ ID NO: 16725 - protein, 973 aa, synthetic construct
MALPVTALLLPLALLLHAARPLEIQNPDPAVYQLRDSKSSDKSVCLFTDFDSQTNVSQSKDSDVYITDKCVLDMRSMDFKSNSAVAWSNKSDFACANAFNNSIIPEDTFFPSPESSDSTDHVKPKETENTKQPSKSCHKPKAIVHTEKVNMMSLTVLGLRMLFAKTVAVNFLLTAKLFFLRAKRSGSGATNFSLLKQAGDVEENPGPTSMALPVTALLLPLALLLHAARPDIQMTQSPSSLSASVGDRVTITCKASDHINNWLAWYQQKPGQAPKLLIYGATTLETGVPSRFSGSGSGTDYTLTISSLQPEDFATYYCQQSWNTPWTFGQGTKLEIKRGGGGSGGGGSGGGGSQVQLQQPGAELVKPGASVKMSCKASGYAFSSYWINWMKQKPGQGLEWIGQIYPGDGDTNYNGKFKGRATLTADTSSSTAYMQLSSLTSEDSAVYFCARSITTVVGCAMDYWGQGTSVTVSSTREDLKNVFPPEVAVFEPSEAEISHTQKATLVCLATGFYPDHVELSWWVNGKEVHSGVCTDPQPLKEQPALNDSRYCLSSRLRVSATFWQNPRNHFRCQVQFYGLSENDEWTQDRAKPVTQIVSAEAWGRADDVIKIHWQEKKSNTILGSQEGNTMKTNDTYMKFSWLTVPEKSLDKEHRCIVRHENNKNGVDQEIIFPPIKTDVITMDPKDNCSKDANDTLLLQLTNTSAYYMYLLLLLKSVVYFAIITCCLLRRTAFCCNGEKSRAKRSGSGVKQTLNFDLLKLAGDVESNPGPSRGHMTEYKPTVRLATRDDVPRAVRTLAAAFADYPATRHTVDPDRHIERVTELQELFLTRVGLDIGKVWVADDGAAVAVWTTPESVEAGAVFAEIGPRMAELSGSRLAAQQQMEGLLAPHRPKEPAWFLATVGVSPDHQGKGLGSAVVLPGVEAAERAGVPAFLETSAPRNLPFYERLGFTVTADVEVPEGPRTWCMTRKPGA

SEQ ID NO: 16726 - protein, 975 aa, synthetic construct
MALPVTALLLPLALLLHAARPLEIQNPDPAVYQLRDSKSSDKSVCLFTDFDSQTNVSQSKDSDVYITDKCVLDMRSMDFKSNSAVAWSNKSDFACANAFNNSIIPEDTFFPSPESSDSTDHVKPKETENTKQPSKSCHKPKAIVHTEKVNMMSLTVLGLRMLFAKTVAVNFLLTAKLFFLRAKRSGSGATNFSLLKQAGDVEENPGPTSMALPVTALLLPLALLLHAARPQIVLSQSPAILSASPGEKVTMTCRASSSVSYMHWYQQKPGSSPKPWIYATSNLASGVPARFSGSGSGTSYSFTISRVEAEDAATYYCQQWTFNPPTFGGGTRLEIKRTVAAGGGGSGGGGSGGGGSQAYLQQSGAELVRPGASVKMSCKASGYTFTSYNMHWVKQTPRQGLEWIGGIYPGNGDTSYNQKFKGKATLTVGKSSSTAYMQLSSLTSEDSAVYFCARYDYNYAMDYWGQGTSVTVSSASTREDLKNVFPPEVAVFEPSEAEISHTQKATLVCLATGFYPDHVELSWWVNGKEVHSGVCTDPQPLKEQPALNDSRYCLSSRLRVSATFWQNPRNHFRCQVQFYGLSENDEWTQDRAKPVTQIVSAEAWGRADDVIKIHWQEKKSNTILGSQEGNTMKTNDTYMKFSWLTVPEKSLDKEHRCIVRHENNKNGVDQEIIFPPIKTDVITMDPKDNCSKDANDTLLLQLTNTSAYYMYLLLLLKSVVYFAIITCCLLRRTAFCCNGEKSRAKRSGSGVKQTLNFDLLKLAGDVESNPGPSRGHMTEYKPTVRLATRDDVPRAVRTLAAAFADYPATRHTVDPDRHIERVTELQELFLTRVGLDIGKVWVADDGAAVAVWTTPESVEAGAVFAEIGPRMAELSGSRLAAQQQMEGLLAPHRPKEPAWFLATVGVSPDHQGKGLGSAVVLPGVEAAERAGVPAFLETSAPRNLPFYERLGFTVTADVEVPEGPRTWCMTRKPGA

SEQ ID NO: 16727 - protein, 973 aa, synthetic construct
MALPVTALLLPLALLLHAARPLEIQNPDPAVYQLRDSKSSDKSVCLFTDFDSQTNVSQSKDSDVYITDKCVLDMRSMDFKSNSAVAWSNKSDFACANAFNNSIIPEDTFFPSPESSDSTDHVKPKETENTKQPSKSCHKPKAIVHTEKVNMMSLTVLGLRMLFAKTVAVNFLLTAKLFFLRAKRSGSGATNFSLLKQAGDVEENPGPTSMALPVTALLLPLALLLHAARPEIVLTQSPATLSLSPGERATLSCRASQSVSSYLAWYQQKPGQAPRLLIYDASNRATGIPARFSGSGSGTDFTLTISSLEPEDFAVYYCQQRSNWPITFGQGTRLEIKGGGGSGGGGSGGGGSEVQLVESGGGLVQPDRSLRLSCAASGFTFHDYAMHWVRQAPGKGLEWVSTISWNSGTIGYADSVKGRFTISRDNAKNSLYLQMNSLRAEDTALYYCAKDIQYGNYYYGMDVWGQGTTVTVSSTREDLKNVFPPEVAVFEPSEAEISHTQKATLVCLATGFYPDHVELSWWVNGKEVHSGVCTDPQPLKEQPALNDSRYCLSSRLRVSATFWQNPRNHFRCQVQFYGLSENDEWTQDRAKPVTQIVSAEAWGRADDVIKIHWQEKKSNTILGSQEGNTMKTNDTYMKFSWLTVPEKSLDKEHRCIVRHENNKNGVDQEIIFPPIKTDVITMDPKDNCSKDANDTLLLQLTNTSAYYMYLLLLLKSVVYFAIITCCLLRRTAFCCNGEKSRAKRSGSGVKQTLNFDLLKLAGDVESNPGPSRGHMTEYKPTVRLATRDDVPRAVRTLAAAFADYPATRHTVDPDRHIERVTELQELFLTRVGLDIGKVWVADDGAAVAVWTTPESVEAGAVFAEIGPRMAELSGSRLAAQQQMEGLLAPHRPKEPAWFLATVGVSPDHQGKGLGSAVVLPGVEAAERAGVPAFLETSAPRNLPFYERLGFTVTADVEVPEGPRTWCMTRKPGA

SEQ ID NO: 16728 - protein, 971 aa, synthetic construct
MALPVTALLLPLALLLHAARPLEIQNPDPAVYQLRDSKSSDKSVCLFTDFDSQTNVSQSKDSDVYITDKCVLDMRSMDFKSNSAVAWSNKSDFACANAFNNSIIPEDTFFPSPESSDSTDHVKPKETENTKQPSKSCHKPKAIVHTEKVNMMSLTVLGLRMLFAKTVAVNFLLTAKLFFLRAKRSGSGATNFSLLKQAGDVEENPGPTSMALPVTALLLPLALLLHAARPDIQMTQSPSSLSASVGDRVTITCRASQDVNTAVAWYQQKPGKAPKLLIYSASFLESGVPSRFSGSRSGTDFTLTISSLQPEDFATYYCQQHYTTPPTFGQTKVEIKRGGGGSGGGGSGGGGSEVQLVESGGGLVQPGGSLRLSCAASGFNIKDTYIHWVRQAPGKGLEWVARIYPTNGYTRYADSVKGRFTISADTSKNTAYLQMNSLRAEDTAVYYCSRWGGDGFYAMDVWGQGTLVTVSSTREDLKNVFPPEVAVFEPSEAEISHTQKATLVCLATGFYPDHVELSWWVNGKEVHSGVCTDPQPLKEQPALNDSRYCLSSRLRVSATFWQNPRNHFRCQVQFYGLSENDEWTQDRAKPVTQIVSAEAWGRADDVIKIHWQEKKSNTILGSQEGNTMKTNDTYMKFSWLTVPEKSLDKEHRCIVRHENNKNGVDQEIIFPPIKTDVITMDPKDNCSKDANDTLLLQLTNTSAYYMYLLLLLKSVVYFAIITCCLLRRTAFCCNGEKSRAKRSGSGVKQTLNFDLLKLAGDVESNPGPSRGHMTEYKPTVRLATRDDVPRAVRTLAAAFADYPATRHTVDPDRHIERVTELQELFLTRVGLDIGKVWVADDGAAVAVWTTPESVEAGAVFAEIGPRMAELSGSRLAAQQQMEGLLAPHRPKEPAWFLATVGVSPDHQGKGLGSAVVLPGVEAAERAGVPAFLETSAPRNLPFYERLGFTVTADVEVPEGPRTWCMTRKPGA

SEQ ID NO: 16729 - protein, 850 aa, synthetic construct
MALPVTALLLPLALLLHAARPLEIQNPDPAVYQLRDSKSSDKSVCLFTDFDSQTNVSQSKDSDVYITDKCVLDMRSMDFKSNSAVAWSNKSDFACANAFNNSIIPEDTFFPSPESSDSTDHVKPKETENTKQPSKSCHKPKAIVHTEKVNMMSLTVLGLRMLFAKTVAVNFLLTAKLFFLRAKRSGSGATNFSLLKQAGDVEENPGPTSMALPVTALLLPLALLLHAARPDEFEVQLVESGGGLVQAGGSLRLSCAASGITFSINTMGWYRQAPGKQRELVALISSIGDTYYADSVKGRFTISRDNAKNTVYLQMNSLKPEDTAVYYCKRFRTAAQGTDYWGQGTQVTVSSTREDLKNVFPPEVAVFEPSEAEISHTQKATLVCLATGFYPDHVELSWWVNGKEVHSGVCTDPQPLKEQPALNDSRYCLSSRLRVSATFWQNPRNHFRCQVQFYGLSENDEWTQDRAKPVTQIVSAEAWGRADDVIKIHWQEKKSNTILGSQEGNTMKTNDTYMKFSWLTVPEKSLDKEHRCIVRHENNKNGVDQEIIFPPIKTDVITMDPKDNCSKDANDTLLLQLTNTSAYYMYLLLLLKSVVYFAIITCCLLRRTAFCCNGEKSRAKRSGSGVKQTLNFDLLKLAGDVESNPGPSRGHMTEYKPTVRLATRDDVPRAVRTLAAAFADYPATRHTVDPDRHIERVTELQELFLTRVGLDIGKVWVADDGAAVAVWTTPESVEAGAVFAEIGPRMAELSGSRLAAQQQMEGLLAPHRPKEPAWFLATVGVSPDHQGKGLGSAVVLPGVEAAERAGVPAFLETSAPRNLPFYERLGFTVTADVEVPEGPRTWCMTRKPGA

SEQ ID NO: 16730 - protein, 850 aa, synthetic construct; identical to SEQ ID NO: 16729

SEQ ID NO: 16731 - protein, 1115 aa, synthetic construct
MALPVTALLLPLALLLHAARPLEIQNPDPAVYQLRDSKSSDKSVCLFTDFDSQTNVSQSKDSDVYITDKCVLDMRSMDFKSNSAVAWSNKSDFACANAFNNSIIPEDTFFPSPESSDSTDHVKPKETENTKQPSKSCHKPKAIVHTEKVNMMSLTVLGLRMLFAKTVAVNFLLTAKLFFLRAKRSGSGATNFSLLKQAGDVEENPGPTSMALPVTALLLPLALLLHAARPQVQLVESGGGLVQAGDSVTLSCTASGRTFSSYALAWFRQRPGKEREFVAGLRWGGPTNYADSVKDRFTISGDSAKHTMYLQMNSLKPEDTAVYYCGYNPGGWAVPSQYEYDSWGQGTQVTVSSGTGGGGSGGGGSGGGGSEFDIQMTQSPSSLSASVGDRVTITCKASDHINNWLAWYQQKPGQAPKLLIYGATTLETGVPSRFSGSGSGTDYTLTISSLQPEDFATYYCQQSWNTPWTFGQGTKLEIKRGGGGSGGGGSGGGGSQVQLQQPGAELVKPGASVKMSCKASGYAFSSYWINWMKQKPGQGLEWIGQIYPGDGDTNYNGKFKGRATLTADTSSSTAYMQLSSLTSEDSAVYFCARSITTVVGCAMDYWGQGTSVTVSSTREDLKNVFPPEVAVFEPSEAEISHTQKATLVCLATGFYPDHVELSWWVNGKEVHSGVCTDPQPLKEQPALNDSRYCLSSRLRVSATFWQNPRNHFRCQVQFYGLSENDEWTQDRAKPVTQIVSAEAWGRADDVIKIHWQEKKSNTILGSQEGNTMKTNDTYMKFSWLTVPEKSLDKEHRCIVRHENNKNGVDQEIIFPPIKTDVITMDPKDNCSKDANDTLLLQLTNTSAYYMYLLLLLKSVVYFAIITCCLLRRTAFCCNGEKSRAKRSGSGVKQTLNFDLLKLAGDVESNPGPSRGHMTEYKPTVRLATRDDVPRAVRTLAAAFADYPATRHTVDPDRHIERVTELQELFLTRVGLDIGKVWVADDGAAVAVWTTPESVEAGAVFAEIGPRMAELSGSRLAAQQQMEGLLAPHRPKEPAWFLATVGVSPDHQGKGLGSAVVLPGVEAAERAGVPAFLETSAPRNLPFYERLGFTVTADVEVPEGPRTWCMTRKPGA

SEQ ID NO: 16732 - protein, 1244 aa, synthetic construct
MALPVTALLLPLALLLHAARPLEIQNPDPAVYQLRDSKSSDKSVCLFTDFDSQTNVSQSKDSDVYITDKCVLDMRSMDFKSNSAVAWSNKSDFACANAFNNSIIPEDTFFPSPESSDSTDHVKPKETENTKQPSKSCHKPKAIVHTEKVNMMSLTVLGLRMLFAKTVAVNFLLTAKLFFLRAKRSGSGATNFSLLKQAGDVEENPGPTSMALPVTALLLPLALLLHAARPEVQLLESGGGLVQPGGSLRLSCAASGFTFSSYAMSWVRQAPGKGLEWVSSISGSGDYIYYADSVKGRFTISRDISKNTLYLQMNSLRAEDTAVYYCAKEGTGANSSLADYRGQGTLVTVSSGGGSGGGSQVQLVESGGGLVQAGDSVTLSCTASGRTFSSYALAWFRQRPGKEREFVAGLRWGGPTNYADSVKDRFTISGDSAKHTMYLQMNSLKPEDTAVYYCGYNPGGWAVPSQYEYDSWGQGTQVTVSSGTGGGGSGGGGSGGGGSEFDIQMTQSPSSLSASVGDRVTITCKASDHINNWLAWYQQKPGQAPKLLIYGATTLETGVPSRFSGSGSGTDYTLTISSLQPEDFATYYCQQSWNTPWTFGQGTKLEIKRGGGGSGGGGSGGGGSQVQLQQPGAELVKPGASVKMSCKASGYAFSSYWINWMKQKPGQGLEWIGQIYPGDGDTNYNGKFKGRATLTADTSSSTAYMQLSSLTSEDSAVYFCARSITTVVGCAMDYWGQGTSVTVSSTREDLKNVFPPEVAVFEPSEAEISHTQKATLVCLATGFYPDHVELSWWVNGKEVHSGVCTDPQPLKEQPALNDSRYCLSSRLRVSATFWQNPRNHFRCQVQFYGLSENDEWTQDRAKPVTQIVSAEAWGRADDVIKIHWQEKKSNTILGSQEGNTMKTNDTYMKFSWLTVPEKSLDKEHRCIVRHENNKNGVDQEIIFPPIKTDVITMDPKDNCSKDANDTLLLQLTNTSAYYMYLLLLLKSVVYFAIITCCLLRRTAFCCNGEKSRAKRSGSGVKQTLNFDLLKLAGDVESNPGPSRGHMTEYKPTVRLATRDDVPRAVRTLAAAFADYPATRHTVDPDRHIERVTELQELFLTRVGLDIGKVWVADDGAAVAVWTTPESVEAGAVFAEIGPRMAELSGSRLAAQQQMEGLLAPHRPKEPAWFLATVGVSPDHQGKGLGSAVVLPGVEAAERAGVPAFLETSAPRNLPFYERLGFTVTADVEVPEGPRTWCMTRKPGA

SEQ ID NO: 16733 - protein, 1244 aa, synthetic construct; identical to SEQ ID NO: 16732

SEQ ID NO: 16734 - protein, 856 aa, synthetic construct
MALPVTALLLPLALLLHAARPLEIQNPDPAVYQLRDSKSSDKSVCLFTDFDSQTNVSQSKDSDVYITDKCVLDMRSMDFKSNSAVAWSNKSDFACANAFNNSIIPEDTFFPSPESSDSTDHVKPKETENTKQPSKSCHKPKAIVHTEKVNMMSLTVLGLRMLFAKTVAVNFLLTAKLFFLRAKRSGSGATNFSLLKQAGDVEENPGPTSMALPVTALLLPLALLLHAARPDEFGSDLGIKLLFAAAKGQDDEVRILLAAGADVNAKDFEGYTPLHVAAYDGHLEIVEVLLKAGADVNAKDSQGRTPLHEAAYSGHLEIVEVLLKAGADVNAQDDAGETPADLAAAWGHEDIAEVLQKTREDLKNVFPPEVAVFEPSEAEISHTQKATLVCLATGFYPDHVELSWWVNGKEVHSGVCTDPQPLKEQPALNDSRYCLSSRLRVSATFWQNPRNHFRCQVQFYGLSENDEWTQDRAKPVTQIVSAEAWGRADDVIKIHWQEKKSNTILGSQEGNTMKTNDTYMKFSWLTVPEKSLDKEHRCIVRHENNKNGVDQEIIFPPIKTDVITMDPKDNCSKDANDTLLLQLTNTSAYYMYLLLLLKSVVYFAIITCCLLRRTAFCCNGEKSRAKRSGSGVKQTLNFDLLKLAGDVESNPGPSRGHMTEYKPTVRLATRDDVPRAVRTLAAAFADYPATRHTVDPDRHIERVTELQELFLTRVGLDIGKVWVADDGAAVAVWTTPESVEAGAVFAEIGPRMAELSGSRLAAQQQMEGLLAPHRPKEPAWFLATVGVSPDHQGKGLGSAVVLPGVEAAERAGVPAFLETSAPRNLPFYERLGFTVTADVEVPEGPRTWCMTRKPGA

SEQ ID NO: 16735 - protein, 785 aa, synthetic construct
MALPVTALLLPLALLLHAARPLEIQNPDPAVYQLRDSKSSDKSVCLFTDFDSQTNVSQSKDSDVYITDKCVLDMRSMDFKSNSAVAWSNKSDFACANAFNNSIIPEDTFFPSPESSDSTDHVKPKETENTKQPSKSCHKPKAIVHTEKVNMMSLTVLGLRMLFAKTVAVNFLLTAKLFFLRAKRSGSGATNFSLLKQAGDVEENPGPTSMDWIWRILFLVGAATGAHSFEGSGFEYAKEMRNAYWEIALLPNLTNQQKRAPIRKLYDDPSQSSELLSEAKKLNDSQTREDLKNVFPPEVAVFEPSEAEISHTQKATLVCLATGFYPDHVELSWWVNGKEVHSGVCTDPQPLKEQPALNDSRYCLSSRLRVSATFWQNPRNHFRCQVQFYGLSENDEWTQDRAKPVTQIVSAEAWGRADDVIKIHWQEKKSNTILGSQEGNTMKTNDTYMKFSWLTVPEKSLDKEHRCIVRHENNKNGVDQEIIFPPIKTDVITMDPKDNCSKDANDTLLLQLTNTSAYYMYLLLLLKSVVYFAIITCCLLRRTAFCCNGEKSRAKRSGSGVKQTLNFDLLKLAGDVESNPGPSRGHMTEYKPTVRLATRDDVPRAVRTLAAAFADYPATRHTVDPDRHIERVTELQELFLTRVGLDIGKVWVADDGAAVAVWTTPESVEAGAVFAEIGPRMAELSGSRLAAQQQMEGLLAPHRPKEPAWFLATVGVSPDHQGKGLGSAVVLPGVEAAERAGVPAFLETSAPRNLPFYERLGFTVTADVEVPEGPRTWCMTRKPGA

SEQ ID NO: 16736 - protein, 1007 aa, synthetic construct
MALPVTALLLPLALLLHAARPLEIQNPDPAVYQLRDSKSSDKSVCLFTDFDSQTNVSQSKDSDVYITDKCVLDMRSMDFKSNSAVAWSNKSDFACANAFNNSIIPEDTFFPSPESSDSTDHVKPKETENTKQPSKSCHKPKAIVHTEKVNMMSLTVLGLRMLFAKTVAVNFLLTAKLFFLRAKRSGSGATNFSLLKQAGDVEENPGPTSMALPVTALLLPLALLLHAARPDEFEVQLVESGGGLVQAGGSLRLSCAASGITFSINTMGWYRQAPGKQRELVALISSIGDTYYADSVKGRFTISRDNAKNTVYLQMNSLKPEDTAVYYCKRFRTAAQGTDYWGQGTQVTVSSLEGGGGSGGGGSGGGGSGSGGSGSGGSGSGGSGSGGSFEVQLVESGGGLVQPGGSLRLSCAASGSIFGFNDMAWYRQAPGKQRELVALISRVGVTSSADSVKGRFTISRVNAKDTVYLQMNSLKPEDTAVYYCYMDQRLDGSTLAYWGQGTQVTVSSTREDLKNVFPPEVAVFEPSEAEISHTQKATLVCLATGFYPDHVELSWWVNGKEVHSGVCTDPQPLKEQPALNDSRYCLSSRLRVSATFWQNPRNHFRCQVQFYGLSENDEWTQDRAKPVTQIVSAEAWGRADDVIKIHWQEKKSNTILGSQEGNTMKTNDTYMKFSWLTVPEKSLDKEHRCIVRHENNKNGVDQEIIFPPIKTDVITMDPKDNCSKDANDTLLLQLTNTSAYYMYLLLLLKSVVYFAIITCCLLRRTAFCCNGEKSRAKRSGSGVKQTLNFDLLKLAGDVESNPGPSRGHMTEYKPTVRLATRDDVPRAVRTLAAAFADYPATRHTVDPDRHIERVTELQELFLTRVGLDIGKVWVADDGAAVAVWTTPESVEAGAVFAEIGPRMAELSGSRLAAQQQMEGLLAPHRPKEPAWFLATVGVSPDHQGKGLGSAVVLPGVEAAERAGVPAFLETSAPRNLPFYERLGFTVTADVEVPEGPRTWCMTRKPGA

SEQ ID NO: 16737 - protein, 921 aa, synthetic construct
MALPVTALLLPLALLLHAARPLEIQNPDPAVYQLRDSKSSDKSVCLFTDFDSQTNVSQSKDSDVYITDKCVLDMRSMDFKSNSAVAWSNKSDFACANAFNNSIIPEDTFFPSPESSDSTDHVKPKETENTKQPSKSCHKPKAIVHTEKVNMMSLTVLGLRMLFAKTVAVNFLLTAKLFFLRAKRSGSGATNFSLLKQAGDVEENPGPTSMALPVTALLLPLALLLHAARPGMRTEDLPKAVVFLEPQWYRVLEKDSVTLKCQGAYSPEDNSTQWFHNESLISSQASSYFIDAATVDDSGEYRCQTNLSTLSDPVQLEVHIGWLLLQAPRWVFKEEDPIHLRCHSWKNTALHKVTYLQNGKGRKYFHHNSDFYIPKATLKDSGSYFCRGLVGSKNVSSETVNITITQGLAVSTISSFFPPGYQTREDLKNVFPPEVAVFEPSEAEISHTQKATLVCLATGFYPDHVELSWWVNGKEVHSGVCTDPQPLKEQPALNDSRYCLSSRLRVSATFWQNPRNHFRCQVQFYGLSENDEWTQDRAKPVTQIVSAEAWGRADDVIKIHWQEKKSNTILGSQEGNTMKTNDTYMKFSWLTVPEKSLDKEHRCIVRHENNKNGVDQEIIFPPIKTDVITMDPKDNCSKDANDTLLLQLTNTSAYYMYLLLLLKSVVYFAIITCCLLRRTAFCCNGEKSRAKRSGSGVKQTLNFDLLKLAGDVESNPGPSRGHMTEYKPTVRLATRDDVPRAVRTLAAAFADYPATRHTVDPDRHIERVTELQELFLTRVGLDIGKVWVADDGAAVAVWTTPESVEAGAVFAEIGPRMAELSGSRLAAQQQMEGLLAPHRPKEPAWFLATVGVSPDHQGKGLGSAVVLPGVEAAERAGVPAFLETSAPRNLPFYERLGFTVTADVEVPEGPRTWCMTRKPGA

SEQ ID NO: 16738 - protein, 923 aa, synthetic construct
MALPVTALLLPLALLLHAARPLEIQNPDPAVYQLRDSKSSDKSVCLFTDFDSQTNVSQSKDSDVYITDKCVLDMRSMDFKSNSAVAWSNKSDFACANAFNNSIIPEDTFFPSPESSDSTDHVKPKETENTKQPSKSCHKPKAIVHTEKVNMMSLTVLGLRMLFAKTVAVNFLLTAKLFFLRAKRSGSGATNFSLLKQAGDVEENPGPTSATMALPVTALLLPLALLLHAARPGMRTEDLPKAVVFLEPQWYRVLEKDSVTLKCQGAYSPEDNSTQWFHNESLISSQASSYFIDAATVDDSGEYRCQTNLSTLSDPVQLEVHIGWLLLQAPRWVFKEEDPIHLRCHSWKNTALHKVTYLQNGKGRKYFHHNSDFYIPKATLKDSGSYFCRGLVGSKNVSSETVNITITQGLAVSTISSFFPPGYQTREDLKNVFPPEVAVFEPSEAEISHTQKATLVCLATGFYPDHVELSWWVNGKEVHSGVCTDPQPLKEQPALNDSRYCLSSRLRVSATFWQNPRNHFRCQVQFYGLSENDEWTQDRAKPVTQIVSAEAWGRADDVIKIHWQEKKSNTILGSQEGNTMKTNDTYMKFSWLTVPEKSLDKEHRCIVRHENNKNGVDQEIIFPPIKTDVITMDPKDNCSKDANDTLLLQLTNTSAYYMYLLLLLKSVVYFAIITCCLLRRTAFCCNGEKSRAKRSGSGVKQTLNFDLLKLAGDVESNPGPSRGHMTEYKPTVRLATRDDVPRAVRTLAAAFADYPATRHTVDPDRHIERVTELQELFLTRVGLDIGKVWVADDGAAVAVWTTPESVEAGAVFAEIGPRMAELSGSRLAAQQQMEGLLAPHRPKEPAWFLATVGVSPDHQGKGLGSAVVLPGVEAAERAGVPAFLETSAPRNLPFYERLGFTVTADVEVPEGPRTWCMTRKPGA

SEQ ID NO: 16739 - protein, 971 aa, synthetic construct
MALPVTALLLPLALLLHAARPLEEDLKNVFPPEVAVFEPSEAEISHTQKATLVCLATGFYPDHVELSWWVNGKEVHSGVSTDPQPLKEQPALNDSRYCLSSRLRVSATFWQNPRNHFRCQVQFYGLSENDEWTQDRAKPVTQIVSAEAWGRADDVIKIHWQEKKSNTILGSQEGNTMKTNDTYMKFSWLTVPEKSLDKEHRCIVRHENNKNGVDQEIIFPPIKTDVITMDPKDNCSKDANDTLLLQLTNTSAYYMYLLLLLKSVVYFAIITCCLLRRTAFCCNGEKSRAKRSGSGATNFSLLKQAGDVEENPGPTSMALPVTALLLPLALLLHAARPDIQMTQTTSSLSASLGDRVTISCRASQDISKYLNWYQQKPDGTVKLLIYHTSRLHSGVPSRFSGSGSGTDYSLTISNLEQEDIATYFCQQGNTLPYTFGGGTKLEITGGGGSGGGGSGGGGSEVKLQESGPGLVAPSQSLSVTCTVSGVSLPDYGVSWIRQPPRKGLEWLGVIWGSETTYYNSALKSRLTIIKDNSKSQVFLKMNSLQTDDTAIYYCAKHYYYGGSYAMDYWGQGTSVTVSSTRIQNPDPAVYQLRDSKSSDKSVCLFTDFDSQTNVSQSKDSDVYITDKTVLDMRSMDFKSNSAVAWSNKSDFACANAFNNSIIPEDTFFPSPESSDSTDHVKPKETENTKQPSKSCHKPKAIVHTEKVNMMSLTVLGLRMLFAKTVAVNFLLTAKLFFLRAKRSGSGVKQTLNFDLLKLAGDVESNPGPSRGHMTEYKPTVRLATRDDVPRAVRTLAAAFADYPATRHTVDPDRHIERVTELQELFLTRVGLDIGKVWVADDGAAVAVWTTPESVEAGAVFAEIGPRMAELSGSRLAAQQQMEGLLAPHRPKEPAWFLATVGVSPDHQGKGLGSAVVLPGVEAAERAGVPAFLETSAPRNLPFYERLGFTVTADVEVPEGPRTWCMTRKPGA

SEQ ID NO: 16740 - protein, 972 aa, synthetic construct
MALPVTALLLPLALLLHAARPLEEDLKNVFPPEVAVFEPSEAEISHTQKATLVCLATGFYPDHVELSWWVNGKEVHSGVSTDPQPLKEQPALNDSRYCLSSRLRVSATFWQNPRNHFRCQVQFYGLSENDEWTQDRAKPVTQIVSAEAWGRADDVIKIHWQEKKSNTILGSQEGNTMKTNDTYMKFSWLTVPEKSLDKEHRCIVRHENNKNGVDQEIIFPPIKTDVITMDPKDNCSKDANDTLLLQLTNTSAYYMYLLLLLKSVVYFAIITCCLLRRTAFCCNGEKSRAKRSGSGATNFSLLKQAGDVEENPGPTSTMALPVTALLLPLALLLHAARPEIVMTQSPATLSLSPGERATLSCRASQDISKYLNWYQQKPGQAPRLLIYHTSRLHSGIPARFSGSGSGTDYTLTISSLQPEDFAVYFCQQGNTLPYTFGQGTKLEIKGGGGSGGGGSGGGGSQVQLQESGPGLVKPSETLSLTCTVSGVSLPDYGVSWIRQPPGKGLEWIGVIWGSETTYYNSSLKSRVTISKDNSKNQVSLKLSSVTAADTAVYYCAKHYYYGGSYAMDYWGQGTLVTVSSTRIQNPDPAVYQLRDSKSSDKSVCLFTDFDSQTNVSQSKDSDVYITDKTVLDMRSMDFKSNSAVAWSNKSDFACANAFNNSIIPEDTFFPSPESSDSTDHVKPKETENTKQPSKSCHKPKAIVHTEKVNMMSLTVLGLRMLFAKTVAVNFLLTAKLFFLRAKRSGSGVKQTLNFDLLKLAGDVESNPGPSRGHMTEYKPTVRLATRDDVPRAVRTLAAAFADYPATRHTVDPDRHIERVTELQELFLTRVGLDIGKVWVADDGAAVAVWTTPESVEAGAVFAEIGPRMAELSGSRLAAQQQMEGLLAPHRPKEPAWFLATVGVSPDHQGKGLGSAVVLPGVEAAERAGVPAFLETSAPRNLPFYERLGFTVTADVEVPEGPRTWCMTRKPGA

SEQ ID NO: 16741 - protein, 973 aa, synthetic construct
MALPVTALLLPLALLLHAARPLEEDLKNVFPPEVAVFEPSEAEISHTQKATLVCLATGFYPDHVELSWWVNGKEVHSGVSTDPQPLKEQPALNDSRYCLSSRLRVSATFWQNPRNHFRCQVQFYGLSENDEWTQDRAKPVTQIVSAEAWGRADDVIKIHWQEKKSNTILGSQEGNTMKTNDTYMKFSWLTVPEKSLDKEHRCIVRHENNKNGVDQEIIFPPIKTDVITMDPKDNCSKDANDTLLLQLTNTSAYYMYLLLLLKSVVYFAIITCCLLRRTAFCCNGEKSRAKRSGSGATNFSLLKQAGDVEENPGPTSTMALPVTALLLPLALLLHAARPDEIVLTQSPATLSLSPGERATLSCSASSSVSYMHWYQQKPGQAPRLLIYDTSKLASGIPARFSGSGSGTDFTLTISSLEPEDVAVYYCFQGSVYPFTFGQGTKLEIKRGGGGSGGGGSGGGGSQVQLQESGPGLVKPSQTLSLTCTVSGGSISTSGMGVGWIRQHPGKGLEWIGHIWWDDDKRYNPALKSRVTISVDTSKNQFSLKLSSVTAADTAVYYCARMELWSYYFDYWGQGTLVTVSSTRIQNPDPAVYQLRDSKSSDKSVCLFTDFDSQTNVSQSKDSDVYITDKTVLDMRSMDFKSNSAVAWSNKSDFACANAFNNSIIPEDTFFPSPESSDSTDHVKPKETENTKQPSKSCHKPKAIVHTEKVNMMSLTVLGLRMLFAKTVAVNFLLTAKLFFLRAKRSGSGVKQTLNFDLLKLAGDVESNPGPSRGHMTEYKPTVRLATRDDVPRAVRTLAAAFADYPATRHTVDPDRHIERVTELQELFLTRVGLDIGKVWVADDGAAVAVWTTPESVEAGAVFAEIGPRMAELSGSRLAAQQQMEGLLAPHRPKEPAWFLATVGVSPDHQGKGLGSAVVLPGVEAAERAGVPAFLETSAPRNLPFYERLGFTVTADVEVPEGPRTWCMTRKPGA

SEQ ID NO: 16742 - protein, 969 aa, synthetic construct
MALPVTALLLPLALLLHAARPLEEDLKNVFPPEVAVFEPSEAEISHTQKATLVCLATGFYPDHVELSWWVNGKEVHSGVSTDPQPLKEQPALNDSRYCLSSRLRVSATFWQNPRNHFRCQVQFYGLSENDEWTQDRAKPVTQIVSAEAWGRADDVIKIHWQEKKSNTILGSQEGNTMKTNDTYMKFSWLTVPEKSLDKEHRCIVRHENNKNGVDQEIIFPPIKTDVITMDPKDNCSKDANDTLLLQLTNTSAYYMYLLLLLKSVVYFAIITCCLLRRTAFCCNGEKSRAKRSGSGATNFSLLKQAGDVEENPGPTSMALPVTALLLPLALLLHAARPDIQMTQSPSSLSASVGDRVTITCRASQDISNYLNWYQQKPGKAPKLLIYYTSRLHSGVPSRFSGSGSGTDFTLTISSLQPEDFATYYCQQGNTLPYTFGQGTKVEIKRGGGGSGGGGSGGGGSEVQLVESGGGLVQPGGSLRLSCAASGFTFSDYFMSWVRQAPGKGLEWVATISNGGTYTYYPDSVKGRFTISRDNSKNTLYLQMNSLRAEDTAVYYCARFDGYIFDYWGQGTLVTVSSTRIQNPDPAVYQLRDSKSSDKSVCLFTDFDSQTNVSQSKDSDVYITDKTVLDMRSMDFKSNSAVAWSNKSDFACANAFNNSIIPEDTFFPSPESSDSTDHVKPKETENTKQPSKSCHKPKAIVHTEKVNMMSLTVLGLRMLFAKTVAVNFLLTAKLFFLRAKRSGSGVKQTLNFDLLKLAGDVESNPGPSRGHMTEYKPTVRLATRDDVPRAVRTLAAAFADYPATRHTVDPDRHIERVTELQELFLTRVGLDIGKVWVADDGAAVAVWTTPESVEAGAVFAEIGPRMAELSGSRLAAQQQMEGLLAPHRPKEPAWFLATVGVSPDHQGKGLGSAVVLPGVEAAERAGVPAFLETSAPRNLPFYERLGFTVTADVEVPEGPRTWCMTRKPGA

SEQ ID NO: 16743 - protein, 973 aa, synthetic construct
MALPVTALLLPLALLLHAARPLEEDLKNVFPPEVAVFEPSEAEISHTQKATLVCLATGFYPDHVELSWWVNGKEVHSGVSTDPQPLKEQPALNDSRYCLSSRLRVSATFWQNPRNHFRCQVQFYGLSENDEWTQDRAKPVTQIVSAEAWGRADDVIKIHWQEKKSNTILGSQEGNTMKTNDTYMKFSWLTVPEKSLDKEHRCIVRHENNKNGVDQEIIFPPIKTDVITMDPKDNCSKDANDTLLLQLTNTSAYYMYLLLLLKSVVYFAIITCCLLRRTAFCCNGEKSRAKRSGSGATNFSLLKQAGDVEENPGPTSMALPVTALLLPLALLLHAARPDIQMTQSPSSLSASVGDRVTITCKASDHINNWLAWYQQKPGQAPKLLIYGATTLETGVPSRFSGSGSGTDYTLTISSLQPEDFATYYCQQSWNTPWTFGQGTKLEIKRGGGGSGGGGSGGGGSQVQLQQPGAELVKPGASVKMSCKASGYAFSSYWINWMKQKPGQGLEWIGQIYPGDGDTNYNGKFKGRATLTADTSSSTAYMQLSSLTSEDSAVYFCARSITTVVGCAMDYWGQGTSVTVSSTRIQNPDPAVYQLRDSKSSDKSVCLFTDFDSQTNVSQSKDSDVYITDKTVLDMRSMDFKSNSAVAWSNKSDFACANAFNNSIIPEDTFFPSPESSDSTDHVKPKETENTKQPSKSCHKPKAIVHTEKVNMMSLTVLGLRMLFAKTVAVNFLLTAKLFFLRAKRSGSGVKQTLNFDLLKLAGDVESNPGPSRGHMTEYKPTVRLATRDDVPRAVRTLAAAFADYPATRHTVDPDRHIERVTELQELFLTRVGLDIGKVWVADDGAAVAVWTTPESVEAGAVFAEIGPRMAELSGSRLAAQQQMEGLLAPHRPKEPAWFLATVGVSPDHQGKGLGSAVVLPGVEAAERAGVPAFLETSAPRNLPFYERLGFTVTADVEVPEGPRTWCMTRKPGA

SEQ ID NO: 16744 - protein, 975 aa, synthetic construct
MALPVTALLLPLALLLHAARPLEEDLKNVFPPEVAVFEPSEAEISHTQKATLVCLATGFYPDHVELSWWVNGKEVHSGVSTDPQPLKEQPALNDSRYCLSSRLRVSATFWQNPRNHFRCQVQFYGLSENDEWTQDRAKPVTQIVSAEAWGRADDVIKIHWQEKKSNTILGSQEGNTMKTNDTYMKFSWLTVPEKSLDKEHRCIVRHENNKNGVDQEIIFPPIKTDVITMDPKDNCSKDANDTLLLQLTNTSAYYMYLLLLLKSVVYFAIITCCLLRRTAFCCNGEKSRAKRSGSGATNFSLLKQAGDVEENPGPTSMALPVTALLLPLALLLHAARPQIVLSQSPAILSASPGEKVTMTCRASSSVSYMHWYQQKPGSSPKPWIYATSNLASGVPARFSGSGSGTSYSFTISRVEAEDAATYYCQQWTFNPPTFGGGTRLEIKRTVAAGGGGSGGGGSGGGGSQAYLQQSGAELVRPGASVKMSCKASGYTFTSYNMHWVKQTPRQGLEWIGGIYPGNGDTSYNQKFKGKATLTVGKSSSTAYMQLSSLTSEDSAVYFCARYDYNYAMDYWGQGTSVTVSSASTRIQNPDPAVYQLRDSKSSDKSVCLFTDFDSQTNVSQSKDSDVYITDKTVLDMRSMDFKSNSAVAWSNKSDFACANAFNNSIIPEDTFFPSPESSDSTDHVKPKETENTKQPSKSCHKPKAIVHTEKVNMMSLTVLGLRMLFAKTVAVNFLLTAKLFFLRAKRSGSGVKQTLNFDLLKLAGDVESNPGPSRGHMTEYKPTVRLATRDDVPRAVRTLAAAFADYPATRHTVDPDRHIERVTELQELFLTRVGLDIGKVWVADDGAAVAVWTTPESVEAGAVFAEIGPRMAELSGSRLAAQQQMEGLLAPHRPKEPAWFLATVGVSPDHQGKGLGSAVVLPGVEAAERAGVPAFLETSAPRNLPFYERLGFTVTADVEVPEGPRTWCMTRKPGA

SEQ ID NO: 16745 - protein, 973 aa, synthetic construct
MALPVTALLLPLALLLHAARPLEEDLKNVFPPEVAVFEPSEAEISHTQKATLVCLATGFYPDHVELSWWVNGKEVHSGVSTDPQPLKEQPALNDSRYCLSSRLRVSATFWQNPRNHFRCQVQFYGLSENDEWTQDRAKPVTQIVSAEAWGRADDVIKIHWQEKKSNTILGSQEGNTMKTNDTYMKFSWLTVPEKSLDKEHRCIVRHENNKNGVDQEIIFPPIKTDVITMDPKDNCSKDANDTLLLQLTNTSAYYMYLLLLLKSVVYFAIITCCLLRRTAFCCNGEKSRAKRSGSGATNFSLLKQAGDVEENPGPTSMALPVTALLLPLALLLHAARPEIVLTQSPATLSLSPGERATLSCRASQSVSSYLAWYQQKPGQAPRLLIYDASNRATGIPARFSGSGSGTDFTLTISSLEPEDFAVYYCQQRSNWPITFGQGTRLEIKGGGGSGGGGSGGGGSEVQLVESGGGLVQPDRSLRLSCAASGFTFHDYAMHWVRQAPGKGLEWVSTISWNSGTIGYADSVKGRFTISRDNAKNSLYLQMNSLRAEDTALYYCAKDIQYGNYYYGMDVWGQGTTVTVSSTRIQNPDPAVYQLRDSKSSDKSVCLFTDFDSQTNVSQSKDSDVYITDKTVLDMRSMDFKSNSAVAWSNKSDFACANAFNNSIIPEDTFFPSPESSDSTDHVKPKETENTKQPSKSCHKPKAIVHTEKVNMMSLTVLGLRMLFAKTVAVNFLLTAKLFFLRAKRSGSGVKQTLNFDLLKLAGDVESNPGPSRGHMTEYKPTVRLATRDDVPRAVRTLAAAFADYPATRHTVDPDRHIERVTELQELFLTRVGLDIGKVWVADDGAAVAVWTTPESVEAGAVFAEIGPRMAELSGSRLAAQQQMEGLLAPHRPKEPAWFLATVGVSPDHQGKGLGSAVVLPGVEAAERAGVPAFLETSAPRNLPFYERLGFTVTADVEVPEGPRTWCMTRKPGA

SEQ ID NO: 16746 - protein, 971 aa, synthetic construct
MALPVTALLLPLALLLHAARPLEEDLKNVFPPEVAVFEPSEAEISHTQKATLVCLATGFYPDHVELSWWVNGKEVHSGVSTDPQPLKEQPALNDSRYCLSSRLRVSATFWQNPRNHFRCQVQFYGLSENDEWTQDRAKPVTQIVSAEAWGRADDVIKIHWQEKKSNTILGSQEGNTMKTNDTYMKFSWLTVPEKSLDKEHRCIVRHENNKNGVDQEIIFPPIKTDVITMDPKDNCSKDANDTLLLQLTNTSAYYMYLLLLLKSVVYFAIITCCLLRRTAFCCNGEKSRAKRSGSGATNFSLLKQAGDVEENPGPTSMALPVTALLLPLALLLHAARPDIQMTQSPSSLSASVGDRVTITCRASQDVNTAVAWYQQKPGKAPKLLIYSASFLESGVPSRFSGSRSGTDFTLTISSLQPEDFATYYCQQHYTTPPTFGQTKVEIKRGGGGSGGGGSGGGGSEVQLVESGGGLVQPGGSLRLSCAASGFNIKDTYIHWVRQAPGKGLEWVARIYPTNGYTRYADSVKGRFTISADTSKNTAYLQMNSLRAEDTAVYYCSRWGGDGFYAMDVWGQGTLVTVSSTRIQNPDPAVYQLRDSKSSDKSVCLFTDFDSQTNVSQSKDSDVYITDKTVLDMRSMDFKSNSAVAWSNKSDFACANAFNNSIIPEDTFFPSPESSDSTDHVKPKETENTKQPSKSCHKPKAIVHTEKVNMMSLTVLGLRMLFAKTVAVNFLLTAKLFFLRAKRSGSGVKQTLNFDLLKLAGDVESNPGPSRGHMTEYKPTVRLATRDDVPRAVRTLAAAFADYPATRHTVDPDRHIERVTELQELFLTRVGLDIGKVWVADDGAAVAVWTTPESVEAGAVFAEIGPRMAELSGSRLAAQQQMEGLLAPHRPKEPAWFLATVGVSPDHQGKGLGSAVVLPGVEAAERAGVPAFLETSAPRNLPFYERLGFTVTADVEVPEGPRTWCMTRKPGA

SEQ ID NO: 16747 - protein, 850 aa, synthetic construct
MALPVTALLLPLALLLHAARPLEEDLKNVFPPEVAVFEPSEAEISHTQKATLVCLATGFYPDHVELSWWVNGKEVHSGVSTDPQPLKEQPALNDSRYCLSSRLRVSATFWQNPRNHFRCQVQFYGLSENDEWTQDRAKPVTQIVSAEAWGRADDVIKIHWQEKKSNTILGSQEGNTMKTNDTYMKFSWLTVPEKSLDKEHRCIVRHENNKNGVDQEIIFPPIKTDVITMDPKDNCSKDANDTLLLQLTNTSAYYMYLLLLLKSVVYFAIITCCLLRRTAFCCNGEKSRAKRSGSGATNFSLLKQAGDVEENPGPTSMALPVTALLLPLALLLHAARPDEFEVQLVESGGGLVQAGGSLRLSCAASGITFSINTMGWYRQAPGKQRELVALISSIGDTYYADSVKGRFTISRDNAKNTVYLQMNSLKPEDTAVYYCKRFRTAAQGTDYWGQGTQVTVSSTRIQNPDPAVYQLRDSKSSDKSVCLFTDFDSQTNVSQSKDSDVYITDKTVLDMRSMDFKSNSAVAWSNKSDFACANAFNNSIIPEDTFFPSPESSDSTDHVKPKETENTKQPSKSCHKPKAIVHTEKVNMMSLTVLGLRMLFAKTVAVNFLLTAKLFFLRAKRSGSGVKQTLNFDLLKLAGDVESNPGPSRGHMTEYKPTVRLATRDDVPRAVRTLAAAFADYPATRHTVDPDRHIERVTELQELFLTRVGLDIGKVWVADDGAAVAVWTTPESVEAGAVFAEIGPRMAELSGSRLAAQQQMEGLLAPHRPKEPAWFLATVGVSPDHQGKGLGSAVVLPGVEAAERAGVPAFLETSAPRNLPFYERLGFTVTADVEVPEGPRTWCMTRKPGA

SEQ ID NO: 16748 - protein, 850 aa, synthetic construct; identical to SEQ ID NO: 16747

SEQ ID NO: 16749 - protein, 1115 aa, synthetic construct
MALPVTALLLPLALLLHAARPLEEDLKNVFPPEVAVFEPSEAEISHTQKATLVCLATGFYPDHVELSWWVNGKEVHSGVSTDPQPLKEQPALNDSRYCLSSRLRVSATFWQNPRNHFRCQVQFYGLSENDEWTQDRAKPVTQIVSAEAWGRADDVIKIHWQEKKSNTILGSQEGNTMKTNDTYMKFSWLTVPEKSLDKEHRCIVRHENNKNGVDQEIIFPPIKTDVITMDPKDNCSKDANDTLLLQLTNTSAYYMYLLLLLKSVVYFAIITCCLLRRTAFCCNGEKSRAKRSGSGATNFSLLKQAGDVEENPGPTSMALPVTALLLPLALLLHAARPQVQLVESGGGLVQAGDSVTLSCTASGRTFSSYALAWFRQRPGKEREFVAGLRWGGPTNYADSVKDRFTISGDSAKHTMYLQMNSLKPEDTAVYYCGYNPGGWAVPSQYEYDSWGQGTQVTVSSGTGGGGSGGGGSGGGGSEFDIQMTQSPSSLSASVGDRVTITCKASDHINNWLAWYQQKPGQAPKLLIYGATTLETGVPSRFSGSGSGTDYTLTISSLQPEDFATYYCQQSWNTPWTFGQGTKLEIKRGGGGSGGGGSGGGGSQVQLQQPGAELVKPGASVKMSCKASGYAFSSYWINWMKQKPGQGLEWIGQIYPGDGDTNYNGKFKGRATLTADTSSSTAYMQLSSLTSEDSAVYFCARSITTVVGCAMDYWGQGTSVTVSSTRIQNPDPAVYQLRDSKSSDKSVCLFTDFDSQTNVSQSKDSDVYITDKTVLDMRSMDFKSNSAVAWSNKSDFACANAFNNSIIPEDTFFPSPESSDSTDHVKPKETENTKQPSKSCHKPKAIVHTEKVNMMSLTVLGLRMLFAKTVAVNFLLTAKLFFLRAKRSGSGVKQTLNFDLLKLAGDVESNPGPSRGHMTEYKPTVRLATRDDVPRAVRTLAAAFADYPATRHTVDPDRHIERVTELQELFLTRVGLDIGKVWVADDGAAVAVWTTPESVEAGAVFAEIGPRMAELSGSRLAAQQQMEGLLAPHRPKEPAWFLATVGVSPDHQGKGLGSAVVLPGVEAAERAGVPAFLETSAPRNLPFYERLGFTVTADVEVPEGPRTWCMTRKPGA

SEQ ID NO: 16750 - protein, 1244 aa, synthetic construct
MALPVTALLLPLALLLHAARPLEEDLKNVFPPEVAVFEPSEAEISHTQKATLVCLATGFYPDHVELSWWVNGKEVHSGVSTDPQPLKEQPALNDSRYCLSSRLRVSATFWQNPRNHFRCQVQFYGLSENDEWTQDRAKPVTQIVSAEAWGRADDVIKIHWQEKKSNTILGSQEGNTMKTNDTYMKFSWLTVPEKSLDKEHRCIVRHENNKNGVDQEIIFPPIKTDVITMDPKDNCSKDANDTLLLQLTNTSAYYMYLLLLLKSVVYFAIITCCLLRRTAFCCNGEKSRAKRSGSGATNFSLLKQAGDVEENPGPTSMALPVTALLLPLALLLHAARPEVQLLESGGGLVQPGGSLRLSCAASGFTFSSYAMSWVRQAPGKGLEWVSSISGSGDYIYYADSVKGRFTISRDISKNTLYLQMNSLRAEDTAVYYCAKEGTGANSSLADYRGQGTLVTVSSGGGSGGGSQVQLVESGGGLVQAGDSVTLSCTASGRTFSSYALAWFRQRPGKEREFVAGLRWGGPTNYADSVKDRFTISGDSAKHTMYLQMNSLKPEDTAVYYCGYNPGGWAVPSQYEYDSWGQGTQVTVSSGTGGGGSGGGGSGGGGSEFDIQMTQSPSSLSASVGDRVTITCKASDHINNWLAWYQQKPGQAPKLLIYGATTLETGVPSRFSGSGSGTDYTLTISSLQPEDFATYYCQQSWNTPWTFGQGTKLEIKRGGGGSGGGGSGGGGSQVQLQQPGAELVKPGASVKMSCKASGYAFSSYWINWMKQKPGQGLEWIGQIYPGDGDTNYNGKFKGRATLTADTSSSTAYMQLSSLTSEDSAVYFCARSITTVVGCAMDYWGQGTSVTVSSTRIQNPDPAVYQLRDSKSSDKSVCLFTDFDSQTNVSQSKDSDVYITDKTVLDMRSMDFKSNSAVAWSNKSDFACANAFNNSIIPEDTFFPSPESSDSTDHVKPKETENTKQPSKSCHKPKAIVHTEKVNMMSLTVLGLRMLFAKTVAVNFLLTAKLFFLRAKRSGSGVKQTLNFDLLKLAGDVESNPGPSRGHMTEYKPTVRLATRDDVPRAVRTLAAAFADYPATRHTVDPDRHIERVTELQELFLTRVGLDIGKVWVADDGAAVAVWTTPESVEAGAVFAEIGPRMAELSGSRLAAQQQMEGLLAPHRPKEPAWFLATVGVSPDHQGKGLGSAVVLPGVEAAERAGVPAFLETSAPRNLPFYERLGFTVTADVEVPEGPRTWCMTRKPGA

SEQ ID NO: 16751 - protein, 1244 aa, synthetic construct; identical to SEQ ID NO: 16750

SEQ ID NO: 16752 - protein, 856 aa, synthetic construct
MALPVTALLLPLALLLHAARPLEEDLKNVFPPEVAVFEPSEAEISHTQKATLVCLATGFYPDHVELSWWVNGKEVHSGVSTDPQPLKEQPALNDSRYCLSSRLRVSATFWQNPRNHFRCQVQFYGLSENDEWTQDRAKPVTQIVSAEAWGRADDVIKIHWQEKKSNTILGSQEGNTMKTNDTYMKFSWLTVPEKSLDKEHRCIVRHENNKNGVDQEIIFPPIKTDVITMDPKDNCSKDANDTLLLQLTNTSAYYMYLLLLLKSVVYFAIITCCLLRRTAFCCNGEKSRAKRSGSGATNFSLLKQAGDVEENPGPTSMALPVTALLLPLALLLHAARPDEFGSDLGIKLLFAAAKGQDDEVRILLAAGADVNAKDFEGYTPLHVAAYDGHLEIVEVLLKAGADVNAKDSQGRTPLHEAAYSGHLEIVEVLLKAGADVNAQDDAGETPADLAAAWGHEDIAEVLQKTRIQNPDPAVYQLRDSKSSDKSVCLFTDFDSQTNVSQSKDSDVYITDKTVLDMRSMDFKSNSAVAWSNKSDFACANAFNNSIIPEDTFFPSPESSDSTDHVKPKETENTKQPSKSCHKPKAIVHTEKVNMMSLTVLGLRMLFAKTVAVNFLLTAKLFFLRAKRSGSGVKQTLNFDLLKLAGDVESNPGPSRGHMTEYKPTVRLATRDDVPRAVRTLAAAFADYPATRHTVDPDRHIERVTELQELFLTRVGLDIGKVWVADDGAAVAVWTTPESVEAGAVFAEIGPRMAELSGSRLAAQQQMEGLLAPHRPKEPAWFLATVGVSPDHQGKGLGSAVVLPGVEAAERAGVPAFLETSAPRNLPFYERLGFTVTADVEVPEGPRTWCMTRKPGA

SEQ ID NO: 16753 - protein, 785 aa, synthetic construct
MALPVTALLLPLALLLHAARPLEEDLKNVFPPEVAVFEPSEAEISHTQKATLVCLATGFYPDHVELSWWVNGKEVHSGVSTDPQPLKEQPALNDSRYCLSSRLRVSATFWQNPRNHFRCQVQFYGLSENDEWTQDRAKPVTQIVSAEAWGRADDVIKIHWQEKKSNTILGSQEGNTMKTNDTYMKFSWLTVPEKSLDKEHRCIVRHENNKNGVDQEIIFPPIKTDVITMDPKDNCSKDANDTLLLQLTNTSAYYMYLLLLLKSVVYFAIITCCLLRRTAFCCNGEKSRAKRSGSGATNFSLLKQAGDVEENPGPTSMDWIWRILFLVGAATGAHSFEGSGFEYAKEMRNAYWEIALLPNLTNQQKRAPIRKLYDDPSQSSELLSEAKKLNDSQTRIQNPDPAVYQLRDSKSSDKSVCLFTDFDSQTNVSQSKDSDVYITDKTVLDMRSMDFKSNSAVAWSNKSDFACANAFNNSIIPEDTFFPSPESSDSTDHVKPKETENTKQPSKSCHKPKAIVHTEKVNMMSLTVLGLRMLFAKTVAVNFLLTAKLFFLRAKRSGSGVKQTLNFDLLKLAGDVESNPGPSRGHMTEYKPTVRLATRDDVPRAVRTLAAAFADYPATRHTVDPDRHIERVTELQELFLTRVGLDIGKVWVADDGAAVAVWTTPESVEAGAVFAEIGPRMAELSGSRLAAQQQMEGLLAPHRPKEPAWFLATVGVSPDHQGKGLGSAVVLPGVEAAERAGVPAFLETSAPRNLPFYERLGFTVTADVEVPEGPRTWCMTRKPGA

SEQ ID NO: 16754 - protein, 1007 aa, synthetic construct
MALPVTALLLPLALLLHAARPLEEDLKNVFPPEVAVFEPSEAEISHTQKATLVCLATGFYPDHVELSWWVNGKEVHSGVSTDPQPLKEQPALNDSRYCLSSRLRVSATFWQNPRNHFRCQVQFYGLSENDEWTQDRAKPVTQIVSAEAWGRADDVIKIHWQEKKSNTILGSQEGNTMKTNDTYMKFSWLTVPEKSLDKEHRCIVRHENNKNGVDQEIIFPPIKTDVITMDPKDNCSKDANDTLLLQLTNTSAYYMYLLLLLKSVVYFAIITCCLLRRTAFCCNGEKSRAKRSGSGATNFSLLKQAGDVEENPGPTSMALPVTALLLPLALLLHAARPDEFEVQLVESGGGLVQAGGSLRLSCAASGITFSINTMGWYRQAPGKQRELVALISSIGDTYYADSVKGRFTISRDNAKNTVYLQMNSLKPEDTAVYYCKRFRTAAQGTDYWGQGTQVTVSSLEGGGGSGGGGSGGGGSGSGGSGSGGSGSGGSGSGGSFEVQLVESGGGLVQPGGSLRLSCAASGSIFGFNDMAWYRQAPGKQRELVALISRVGVTSSADSVKGRFTISRVNAKDTVYLQMNSLKPEDTAVYYCYMDQRLDGSTLAYWGQGTQVTVSSTRIQNPDPAVYQLRDSKSSDKSVCLFTDFDSQTNVSQSKDSDVYITDKTVLDMRSMDFKSNSAVAWSNKSDFACANAFNNSIIPEDTFFPSPESSDSTDHVKPKETENTKQPSKSCHKPKAIVHTEKVNMMSLTVLGLRMLFAKTVAVNFLLTAKLFFLRAKRSGSGVKQTLNFDLLKLAGDVESNPGPSRGHMTEYKPTVRLATRDDVPRAVRTLAAAFADYPATRHTVDPDRHIERVTELQELFLTRVGLDIGKVWVADDGAAVAVWTTPESVEAGAVFAEIGPRMAELSGSRLAAQQQMEGLLAPHRPKEPAWFLATVGVSPDHQGKGLGSAVVLPGVEAAERAGVPAFLETSAPRNLPFYERLGFTVTADVEVPEGPRTWCMTRKPGA

SEQ ID NO: 16755 - protein, 921 aa, synthetic construct
MALPVTALLLPLALLLHAARPLEEDLKNVFPPEVAVFEPSEAEISHTQKATLVCLATGFYPDHVELSWWVNGKEVHSGVSTDPQPLKEQPALNDSRYCLSSRLRVSATFWQNPRNHFRCQVQFYGLSENDEWTQDRAKPVTQIVSAEAWGRADDVIKIHWQEKKSNTILGSQEGNTMKTNDTYMKFSWLTVPEKSLDKEHRCIVRHENNKNGVDQEIIFPPIKTDVITMDPKDNCSKDANDTLLLQLTNTSAYYMYLLLLLKSVVYFAIITCCLLRRTAFCCNGEKSRAKRSGSGATNFSLLKQAGDVEENPGPTSMALPVTALLLPLALLLHAARPGMRTEDLPKAVVFLEPQWYRVLEKDSVTLKCQGAYSPEDNSTQWFHNESLISSQASSYFIDAATVDDSGEYRCQTNLSTLSDPVQLEVHIGWLLLQAPRWVFKEEDPIHLRCHSWKNTALHKVTYLQNGKGRKYFHHNSDFYIPKATLKDSGSYFCRGLVGSKNVSSETVNITITQGLAVSTISSFFPPGYQTRIQNPDPAVYQLRDSKSSDKSVCLFTDFDSQTNVSQSKDSDVYITDKTVLDMRSMDFKSNSAVAWSNKSDFACANAFNNSIIPEDTFFPSPESSDSTDHVKPKETENTKQPSKSCHKPKAIVHTEKVNMMSLTVLGLRMLFAKTVAVNFLLTAKLFFLRAKRSGSGVKQTLNFDLLKLAGDVESNPGPSRGHMTEYKPTVRLATRDDVPRAVRTLAAAFADYPATRHTVDPDRHIERVTELQELFLTRVGLDIGKVWVADDGAAVAVWTTPESVEAGAVFAEIGPRMAELSGSRLAAQQQMEGLLAPHRPKEPAWFLATVGVSPDHQGKGLGSAVVLPGVEAAERAGVPAFLETSAPRNLPFYERLGFTVTADVEVPEGPRTWCMTRKPGA

SEQ ID NO: 16756 - protein, 923 aa, synthetic construct
MALPVTALLLPLALLLHAARPLEEDLKNVFPPEVAVFEPSEAEISHTQKATLVCLATGFYPDHVELSWWVNGKEVHSGVSTDPQPLKEQPALNDSRYCLSSRLRVSATFWQNPRNHFRCQVQFYGLSENDEWTQDRAKPVTQIVSAEAWGRADDVIKIHWQEKKSNTILGSQEGNTMKTNDTYMKFSWLTVPEKSLDKEHRCIVRHENNKNGVDQEIIFPPIKTDVITMDPKDNCSKDANDTLLLQLTNTSAYYMYLLLLLKSVVYFAIITCCLLRRTAFCCNGEKSRAKRSGSGATNFSLLKQAGDVEENPGPTSATMALPVTALLLPLALLLHAARPGMRTEDLPKAVVFLEPQWYRVLEKDSVTLKCQGAYSPEDNSTQWFHNESLISSQASSYFIDAATVDDSGEYRCQTNLSTLSDPVQLEVHIGWLLLQAPRWVFKEEDPIHLRCHSWKNTALHKVTYLQNGKGRKYFHHNSDFYIPKATLKDSGSYFCRGLVGSKNVSSETVNITITQGLAVSTISSFFPPGYQTRIQNPDPAVYQLRDSKSSDKSVCLFTDFDSQTNVSQSKDSDVYITDKTVLDMRSMDFKSNSAVAWSNKSDFACANAFNNSIIPEDTFFPSPESSDSTDHVKPKETENTKQPSKSCHKPKAIVHTEKVNMMSLTVLGLRMLFAKTVAVNFLLTAKLFFLRAKRSGSGVKQTLNFDLLKLAGDVESNPGPSRGHMTEYKPTVRLATRDDVPRAVRTLAAAFADYPATRHTVDPDRHIERVTELQELFLTRVGLDIGKVWVADDGAAVAVWTTPESVEAGAVFAEIGPRMAELSGSRLAAQQQMEGLLAPHRPKEPAWFLATVGVSPDHQGKGLGSAVVLPGVEAAERAGVPAFLETSAPRNLPFYERLGFTVTADVEVPEGPRTWCMTRKPGA

SEQ ID NO: 16757 - protein, 971 aa, synthetic construct
MALPVTALLLPLALLLHAARPLEIQNPDPAVYQLRDSKSSDKSVCLFTDFDSQTNVSQSKDSDVYITDKTVLDMRSMDFKSNSAVAWSNKSDFACANAFNNSIIPEDTFFPSPESSDSTDHVKPKETENTKQPSKSCHKPKAIVHTEKVNMMSLTVLGLRMLFAKTVAVNFLLTAKLFFLRAKRSGSGATNFSLLKQAGDVEENPGPTSMALPVTALLLPLALLLHAARPDIQMTQTTSSLSASLGDRVTISCRASQDISKYLNWYQQKPDGTVKLLIYHTSRLHSGVPSRFSGSGSGTDYSLTISNLEQEDIATYFCQQGNTLPYTFGGGTKLEITGGGGSGGGGSGGGGSEVKLQESGPGLVAPSQSLSVTCTVSGVSLPDYGVSWIRQPPRKGLEWLGVIWGSETTYYNSALKSRLTIIKDNSKSQVFLKMNSLQTDDTAIYYCAKHYYYGGSYAMDYWGQGTSVTVSSTREDLKNVFPPEVAVFEPSEAEISHTQKATLVCLATGFYPDHVELSWWVNGKEVHSGVSTDPQPLKEQPALNDSRYCLSSRLRVSATFWQNPRNHFRCQVQFYGLSENDEWTQDRAKPVTQIVSAEAWGRADDVIKIHWQEKKSNTILGSQEGNTMKTNDTYMKFSWLTVPEKSLDKEHRCIVRHENNKNGVDQEIIFPPIKTDVITMDPKDNCSKDANDTLLLQLTNTSAYYMYLLLLLKSVVYFAIITCCLLRRTAFCCNGEKSRAKRSGSGVKQTLNFDLLKLAGDVESNPGPSRGHMTEYKPTVRLATRDDVPRAVRTLAAAFADYPATRHTVDPDRHIERVTELQELFLTRVGLDIGKVWVADDGAAVAVWTTPESVEAGAVFAEIGPRMAELSGSRLAAQQQMEGLLAPHRPKEPAWFLATVGVSPDHQGKGLGSAVVLPGVEAAERAGVPAFLETSAPRNLPFYERLGFTVTADVEVPEGPRTWCMTRKPGA

SEQ ID NO: 16758 - protein, 972 aa, synthetic construct
MALPVTALLLPLALLLHAARPLEIQNPDPAVYQLRDSKSSDKSVCLFTDFDSQTNVSQSKDSDVYITDKTVLDMRSMDFKSNSAVAWSNKSDFACANAFNNSIIPEDTFFPSPESSDSTDHVKPKETENTKQPSKSCHKPKAIVHTEKVNMMSLTVLGLRMLFAKTVAVNFLLTAKLFFLRAKRSGSGATNFSLLKQAGDVEENPGPTSTMALPVTALLLPLALLLHAARPEIVMTQSPATLSLSPGERATLSCRASQDISKYLNWYQQKPGQAPRLLIYHTSRLHSGIPARFSGSGSGTDYTLTISSLQPEDFAVYFCQQGNTLPYTFGQGTKLEIKGGGGSGGGGSGGGGSQVQLQESGPGLVKPSETLSLTCTVSGVSLPDYGVSWIRQPPGKGLEWIGVIWGSETTYYNSSLKSRVTISKDNSKNQVSLKLSSVTAADTAVYYCAKHYYYGGSYAMDYWGQGTLVTVSSTREDLKNVFPPEVAVFEPSEAEISHTQKATLVCLATGFYPDHVELSWWVNGKEVHSGVSTDPQPLKEQPALNDSRYCLSSRLRVSATFWQNPRNHFRCQVQFYGLSENDEWTQDRAKPVTQIVSAEAWGRADDVIKIHWQEKKSNTILGSQEGNTMKTNDTYMKFSWLTVPEKSLDKEHRCIVRHENNKNGVDQEIIFPPIKTDVITMDPKDNCSKDANDTLLLQLTNTSAYYMYLLLLLKSVVYFAIITCCLLRRTAFCCNGEKSRAKRSGSGVKQTLNFDLLKLAGDVESNPGPSRGHMTEYKPTVRLATRDDVPRAVRTLAAAFADYPATRHTVDPDRHIERVTELQELFLTRVGLDIGKVWVADDGAAVAVWTTPESVEAGAVFAEIGPRMAELSGSRLAAQQQMEGLLAPHRPKEPAWFLATVGVSPDHQGKGLGSAVVLPGVEAAERAGVPAFLETSAPRNLPFYERLGFTVTADVEVPEGPRTWCMTRKPGA

SEQ ID NO: 16759 - protein, 973 aa, synthetic construct
MALPVTALLLPLALLLHAARPLEIQNPDPAVYQLRDSKSSDKSVCLFTDFDSQTNVSQSKDSDVYITDKTVLDMRSMDFKSNSAVAWSNKSDFACANAFNNSIIPEDTFFPSPESSDSTDHVKPKETENTKQPSKSCHKPKAIVHTEKVNMMSLTVLGLRMLFAKTVAVNFLLTAKLFFLRAKRSGSGATNFSLLKQAGDVEENPGPTSTMALPVTALLLPLALLLHAARPDEIVLTQSPATLSLSPGERATLSCSASSSVSYMHWYQQKPGQAPRLLIYDTSKLASGIPARFSGSGSGTDFTLTISSLEPEDVAVYYCFQGSVYPFTFGQGTKLEIKRGGGGSGGGGSGGGGSQVQLQESGPGLVKPSQTLSLTCTVSGGSISTSGMGVGWIRQHPGKGLEWIGHIWWDDDKRYNPALKSRVTISVDTSKNQFSLKLSSVTAADTAVYYCARMELWSYYFDYWGQGTLVTVSSTREDLKNVFPPEVAVFEPSEAEISHTQKATLVCLATGFYPDHVELSWWVNGKEVHSGVSTDPQPLKEQPALNDSRYCLSSRLRVSATFWQNPRNHFRCQVQFYGLSENDEWTQDRAKPVTQIVSAEAWGRADDVIKIHWQEKKSNTILGSQEGNTMKTNDTYMKFSWLTVPEKSLDKEHRCIVRHENNKNGVDQEIIFPPIKTDVITMDPKDNCSKDANDTLLLQLTNTSAYYMYLLLLLKSVVYFAIITCCLLRRTAFCCNGEKSRAKRSGSGVKQTLNFDLLKLAGDVESNPGPSRGHMTEYKPTVRLATRDDVPRAVRTLAAAFADYPATRHTVDPDRHIERVTELQELFLTRVGLDIGKVWVADDGAAVAVWTTPESVEAGAVFAEIGPRMAELSGSRLAAQQQMEGLLAPHRPKEPAWFLATVGVSPDHQGKGLGSAVVLPGVEAAERAGVPAFLETSAPRNLPFYERLGFTVTADVEVPEGPRTWCMTRKPGA

SEQ ID NO: 16760 - protein, 969 aa, synthetic construct
MALPVTALLLPLALLLHAARPLEIQNPDPAVYQLRDSKSSDKSVCLFTDFDSQTNVSQSKDSDVYITDKTVLDMRSMDFKSNSAVAWSNKSDFACANAFNNSIIPEDTFFPSPESSDSTDHVKPKETENTKQPSKSCHKPKAIVHTEKVNMMSLTVLGLRMLFAKTVAVNFLLTAKLFFLRAKRSGSGATNFSLLKQAGDVEENPGPTSMALPVTALLLPLALLLHAARPDIQMTQSPSSLSASVGDRVTITCRASQDISNYLNWYQQKPGKAPKLLIYYTSRLHSGVPSRFSGSGSGTDFTLTISSLQPEDFATYYCQQGNTLPYTFGQGTKVEIKRGGGGSGGGGSGGGGSEVQLVESGGGLVQPGGSLRLSCAASGFTFSDYFMSWVRQAPGKGLEWVATISNGGTYTYYPDSVKGRFTISRDNSKNTLYLQMNSLRAEDTAVYYCARFDGYIFDYWGQGTLVTVSSTREDLKNVFPPEVAVFEPSEAEISHTQKATLVCLATGFYPDHVELSWWVNGKEVHSGVSTDPQPLKEQPALNDSRYCLSSRLRVSATFWQNPRNHFRCQVQFYGLSENDEWTQDRAKPVTQIVSAEAWGRADDVIKIHWQEKKSNTILGSQEGNTMKTNDTYMKFSWLTVPEKSLDKEHRCIVRHENNKNGVDQEIIFPPIKTDVITMDPKDNCSKDANDTLLLQLTNTSAYYMYLLLLLKSVVYFAIITCCLLRRTAFCCNGEKSRAKRSGSGVKQTLNFDLLKLAGDVESNPGPSRGHMTEYKPTVRLATRDDVPRAVRTLAAAFADYPATRHTVDPDRHIERVTELQELFLTRVGLDIGKVWVADDGAAVAVWTTPESVEAGAVFAEIGPRMAELSGSRLAAQQQMEGLLAPHRPKEPAWFLATVGVSPDHQGKGLGSAVVLPGVEAAERAGVPAFLETSAPRNLPFYERLGFTVTADVEVPEGPRTWCMTRKPGA

SEQ ID NO: 16761 - protein, 973 aa, synthetic construct
MALPVTALLLPLALLLHAARPLEIQNPDPAVYQLRDSKSSDKSVCLFTDFDSQTNVSQSKDSDVYITDKTVLDMRSMDFKSNSAVAWSNKSDFACANAFNNSIIPEDTFFPSPESSDSTDHVKPKETENTKQPSKSCHKPKAIVHTEKVNMMSLTVLGLRMLFAKTVAVNFLLTAKLFFLRAKRSGSGATNFSLLKQAGDVEENPGPTSMALPVTALLLPLALLLHAARPDIQMTQSPSSLSASVGDRVTITCKASDHINNWLAWYQQKPGQAPKLLIYGATTLETGVPSRFSGSGSGTDYTLTISSLQPEDFATYYCQQSWNTPWTFGQGTKLEIKRGGGGSGGGGSGGGGSQVQLQQPGAELVKPGASVKMSCKASGYAFSSYWINWMKQKPGQGLEWIGQIYPGDGDTNYNGKFKGRATLTADTSSSTAYMQLSSLTSEDSAVYFCARSITTVVGCAMDYWGQGTSVTVSSTREDLKNVFPPEVAVFEPSEAEISHTQKATLVCLATGFYPDHVELSWWVNGKEVHSGVSTDPQPLKEQPALNDSRYCLSSRLRVSATFWQNPRNHFRCQVQFYGLSENDEWTQDRAKPVTQIVSAEAWGRADDVIKIHWQEKKSNTILGSQEGNTMKTNDTYMKFSWLTVPEKSLDKEHRCIVRHENNKNGVDQEIIFPPIKTDVITMDPKDNCSKDANDTLLLQLTNTSAYYMYLLLLLKSVVYFAIITCCLLRRTAFCCNGEKSRAKRSGSGVKQTLNFDLLKLAGDVESNPGPSRGHMTEYKPTVRLATRDDVPRAVRTLAAAFADYPATRHTVDPDRHIERVTELQELFLTRVGLDIGKVWVADDGAAVAVWTTPESVEAGAVFAEIGPRMAELSGSRLAAQQQMEGLLAPHRPKEPAWFLATVGVSPDHQGKGLGSAVVLPGVEAAERAGVPAFLETSAPRNLPFYERLGFTVTADVEVPEGPRTWCMTRKPGA

SEQ ID NO: 16762 - protein, 975 aa, synthetic construct
MALPVTALLLPLALLLHAARPLEIQNPDPAVYQLRDSKSSDKSVCLFTDFDSQTNVSQSKDSDVYITDKTVLDMRSMDFKSNSAVAWSNKSDFACANAFNNSIIPEDTFFPSPESSDSTDHVKPKETENTKQPSKSCHKPKAIVHTEKVNMMSLTVLGLRMLFAKTVAVNFLLTAKLFFLRAKRSGSGATNFSLLKQAGDVEENPGPTSMALPVTALLLPLALLLHAARPQIVLSQSPAILSASPGEKVTMTCRASSSVSYMHWYQQKPGSSPKPWIYATSNLASGVPARFSGSGSGTSYSFTISRVEAEDAATYYCQQWTFNPPTFGGGTRLEIKRTVAAGGGGSGGGGSGGGGSQAYLQQSGAELVRPGASVKMSCKASGYTFTSYNMHWVKQTPRQGLEWIGGIYPGNGDTSYNQKFKGKATLTVGKSSSTAYMQLSSLTSEDSAVYFCARYDYNYAMDYWGQGTSVTVSSASTREDLKNVFPPEVAVFEPSEAEISHTQKATLVCLATGFYPDHVELSWWVNGKEVHSGVSTDPQPLKEQPALNDSRYCLSSRLRVSATFWQNPRNHFRCQVQFYGLSENDEWTQDRAKPVTQIVSAEAWGRADDVIKIHWQEKKSNTILGSQEGNTMKTNDTYMKFSWLTVPEKSLDKEHRCIVRHENNKNGVDQEIIFPPIKTDVITMDPKDNCSKDANDTLLLQLTNTSAYYMYLLLLLKSVVYFAIITCCLLRRTAFCCNGEKSRAKRSGSGVKQTLNFDLLKLAGDVESNPGPSRGHMTEYKPTVRLATRDDVPRAVRTLAAAFADYPATRHTVDPDRHIERVTELQELFLTRVGLDIGKVWVADDGAAVAVWTTPESVEAGAVFAEIGPRMAELSGSRLAAQQQMEGLLAPHRPKEPAWFLATVGVSPDHQGKGLGSAVVLPGVEAAERAGVPAFLETSAPRNLPFYERLGFTVTADVEVPEGPRTWCMTRKPGA

SEQ ID NO: 16763 - protein, 973 aa, synthetic construct
MALPVTALLLPLALLLHAARPLEIQNPDPAVYQLRDSKSSDKSVCLFTDFDSQTNVSQSKDSDVYITDKTVLDMRSMDFKSNSAVAWSNKSDFACANAFNNSIIPEDTFFPSPESSDSTDHVKPKETENTKQPSKSCHKPKAIVHTEKVNMMSLTVLGLRMLFAKTVAVNFLLTAKLFFLRAKRSGSGATNFSLLKQAGDVEENPGPTSMALPVTALLLPLALLLHAARPEIVLTQSPATLSLSPGERATLSCRASQSVSSYLAWYQQKPGQAPRLLIYDASNRATGIPARFSGSGSGTDFTLTISSLEPEDFAVYYCQQRSNWPITFGQGTRLEIKGGGGSGGGGSGGGGSEVQLVESGGGLVQPDRSLRLSCAASGFTFHDYAMHWVRQAPGKGLEWVSTISWNSGTIGYADSVKGRFTISRDNAKNSLYLQMNSLRAEDTALYYCAKDIQYGNYYYGMDVWGQGTTVTVSSTREDLKNVFPPEVAVFEPSEAEISHTQKATLVCLATGFYPDHVELSWWVNGKEVHSGVSTDPQPLKEQPALNDSRYCLSSRLRVSATFWQNPRNHFRCQVQFYGLSENDEWTQDRAKPVTQIVSAEAWGRADDVIKIHWQEKKSNTILGSQEGNTMKTNDTYMKFSWLTVPEKSLDKEHRCIVRHENNKNGVDQEIIFPPIKTDVITMDPKDNCSKDANDTLLLQLTNTSAYYMYLLLLLKSVVYFAIITCCLLRRTAFCCNGEKSRAKRSGSGVKQTLNFDLLKLAGDVESNPGPSRGHMTEYKPTVRLATRDDVPRAVRTLAAAFADYPATRHTVDPDRHIERVTELQELFLTRVGLDIGKVWVADDGAAVAVWTTPESVEAGAVFAEIGPRMAELSGSRLAAQQQMEGLLAPHRPKEPAWFLATVGVSPDHQGKGLGSAVVLPGVEAAERAGVPAFLETSAPRNLPFYERLGFTVTADVEVPEGPRTWCMTRKPGA

SEQ ID NO: 16764 - protein, 971 aa, synthetic construct
MALPVTALLLPLALLLHAARPLEIQNPDPAVYQLRDSKSSDKSVCLFTDFDSQTNVSQSKDSDVYITDKTVLDMRSMDFKSNSAVAWSNKSDFACANAFNNSIIPEDTFFPSPESSDSTDHVKPKETENTKQPSKSCHKPKAIVHTEKVNMMSLTVLGLRMLFAKTVAVNFLLTAKLFFLRAKRSGSGATNFSLLKQAGDVEENPGPTSMALPVTALLLPLALLLHAARPDIQMTQSPSSLSASVGDRVTITCRASQDVNTAVAWYQQKPGKAPKLLIYSASFLESGVPSRFSGSRSGTDFTLTISSLQPEDFATYYCQQHYTTPPTFGQTKVEIKRGGGGSGGGGSGGGGSEVQLVESGGGLVQPGGSLRLSCAASGFNIKDTYIHWVRQAPGKGLEWVARIYPTNGYTRYADSVKGRFTISADTSKNTAYLQMNSLRAEDTAVYYCSRWGGDGFYAMDVWGQGTLVTVSSTREDLKNVFPPEVAVFEPSEAEISHTQKATLVCLATGFYPDHVELSWWVNGKEVHSGVSTDPQPLKEQPALNDSRYCLSSRLRVSATFWQNPRNHFRCQVQFYGLSENDEWTQDRAKPVTQIVSAEAWGRADDVIKIHWQEKKSNTILGSQEGNTMKTNDTYMKFSWLTVPEKSLDKEHRCIVRHENNKNGVDQEIIFPPIKTDVITMDPKDNCSKDANDTLLLQLTNTSAYYMYLLLLLKSVVYFAIITCCLLRRTAFCCNGEKSRAKRSGSGVKQTLNFDLLKLAGDVESNPGPSRGHMTEYKPTVRLATRDDVPRAVRTLAAAFADYPATRHTVDPDRHIERVTELQELFLTRVGLDIGKVWVADDGAAVAVWTTPESVEAGAVFAEIGPRMAELSGSRLAAQQQMEGLLAPHRPKEPAWFLATVGVSPDHQGKGLGSAVVLPGVEAAERAGVPAFLETSAPRNLPFYERLGFTVTADVEVPEGPRTWCMTRKPGA

SEQ ID NO: 16765 - protein, 850 aa, synthetic construct
MALPVTALLLPLALLLHAARPLEIQNPDPAVYQLRDSKSSDKSVCLFTDFDSQTNVSQSKDSDVYITDKTVLDMRSMDFKSNSAVAWSNKSDFACANAFNNSIIPEDTFFPSPESSDSTDHVKPKETENTKQPSKSCHKPKAIVHTEKVNMMSLTVLGLRMLFAKTVAVNFLLTAKLFFLRAKRSGSGATNFSLLKQAGDVEENPGPTSMALPVTALLLPLALLLHAARPDEFEVQLVESGGGLVQAGGSLRLSCAASGITFSINTMGWYRQAPGKQRELVALISSIGDTYYADSVKGRFTISRDNAKNTVYLQMNSLKPEDTAVYYCKRFRTAAQGTDYWGQGTQVTVSSTREDLKNVFPPEVAVFEPSEAEISHTQKATLVCLATGFYPDHVELSWWVNGKEVHSGVSTDPQPLKEQPALNDSRYCLSSRLRVSATFWQNPRNHFRCQVQFYGLSENDEWTQDRAKPVTQIVSAEAWGRADDVIKIHWQEKKSNTILGSQEGNTMKTNDTYMKFSWLTVPEKSLDKEHRCIVRHENNKNGVDQEIIFPPIKTDVITMDPKDNCSKDANDTLLLQLTNTSAYYMYLLLLLKSVVYFAIITCCLLRRTAFCCNGEKSRAKRSGSGVKQTLNFDLLKLAGDVESNPGPSRGHMTEYKPTVRLATRDDVPRAVRTLAAAFADYPATRHTVDPDRHIERVTELQELFLTRVGLDIGKVWVADDGAAVAVWTTPESVEAGAVFAEIGPRMAELSGSRLAAQQQMEGLLAPHRPKEPAWFLATVGVSPDHQGKGLGSAVVLPGVEAAERAGVPAFLETSAPRNLPFYERLGFTVTADVEVPEGPRTWCMTRKPGA

SEQ ID NO: 16766 - protein, 850 aa, synthetic construct; identical to SEQ ID NO: 16765

SEQ ID NO: 16767 - protein, 1115 aa, synthetic construct
MALPVTALLLPLALLLHAARPLEIQNPDPAVYQLRDSKSSDKSVCLFTDFDSQTNVSQSKDSDVYITDKTVLDMRSMDFKSNSAVAWSNKSDFACANAFNNSIIPEDTFFPSPESSDSTDHVKPKETENTKQPSKSCHKPKAIVHTEKVNMMSLTVLGLRMLFAKTVAVNFLLTAKLFFLRAKRSGSGATNFSLLKQAGDVEENPGPTSMALPVTALLLPLALLLHAARPQVQLVESGGGLVQAGDSVTLSCTASGRTFSSYALAWFRQRPGKEREFVAGLRWGGPTNYADSVKDRFTISGDSAKHTMYLQMNSLKPEDTAVYYCGYNPGGWAVPSQYEYDSWGQGTQVTVSSGTGGGGSGGGGSGGGGSEFDIQMTQSPSSLSASVGDRVTITCKASDHINNWLAWYQQKPGQAPKLLIYGATTLETGVPSRFSGSGSGTDYTLTISSLQPEDFATYYCQQSWNTPWTFGQGTKLEIKRGGGGSGGGGSGGGGSQVQLQQPGAELVKPGASVKMSCKASGYAFSSYWINWMKQKPGQGLEWIGQIYPGDGDTNYNGKFKGRATLTADTSSSTAYMQLSSLTSEDSAVYFCARSITTVVGCAMDYWGQGTSVTVSSTREDLKNVFPPEVAVFEPSEAEISHTQKATLVCLATGFYPDHVELSWWVNGKEVHSGVSTDPQPLKEQPALNDSRYCLSSRLRVSATFWQNPRNHFRCQVQFYGLSENDEWTQDRAKPVTQIVSAEAWGRADDVIKIHWQEKKSNTILGSQEGNTMKTNDTYMKFSWLTVPEKSLDKEHRCIVRHENNKNGVDQEIIFPPIKTDVITMDPKDNCSKDANDTLLLQLTNTSAYYMYLLLLLKSVVYFAIITCCLLRRTAFCCNGEKSRAKRSGSGVKQTLNFDLLKLAGDVESNPGPSRGHMTEYKPTVRLATRDDVPRAVRTLAAAFADYPATRHTVDPDRHIERVTELQELFLTRVGLDIGKVWVADDGAAVAVWTTPESVEAGAVFAEIGPRMAELSGSRLAAQQQMEGLLAPHRPKEPAWFLATVGVSPDHQGKGLGSAVVLPGVEAAERAGVPAFLETSAPRNLPFYERLGFTVTADVEVPEGPRTWCMTRKPGA

SEQ ID NO: 16768 - protein, 1244 aa, synthetic construct
MALPVTALLLPLALLLHAARPLEIQNPDPAVYQLRDSKSSDKSVCLFTDFDSQTNVSQSKDSDVYITDKTVLDMRSMDFKSNSAVAWSNKSDFACANAFNNSIIPEDTFFPSPESSDSTDHVKPKETENTKQPSKSCHKPKAIVHTEKVNMMSLTVLGLRMLFAKTVAVNFLLTAKLFFLRAKRSGSGATNFSLLKQAGDVEENPGPTSMALPVTALLLPLALLLHAARPEVQLLESGGGLVQPGGSLRLSCAASGFTFSSYAMSWVRQAPGKGLEWVSSISGSGDYIYYADSVKGRFTISRDISKNTLYLQMNSLRAEDTAVYYCAKEGTGANSSLADYRGQGTLVTVSSGGGSGGGSQVQLVESGGGLVQAGDSVTLSCTASGRTFSSYALAWFRQRPGKEREFVAGLRWGGPTNYADSVKDRFTISGDSAKHTMYLQMNSLKPEDTAVYYCGYNPGGWAVPSQYEYDSWGQGTQVTVSSGTGGGGSGGGGSGGGGSEFDIQMTQSPSSLSASVGDRVTITCKASDHINNWLAWYQQKPGQAPKLLIYGATTLETGVPSRFSGSGSGTDYTLTISSLQPEDFATYYCQQSWNTPWTFGQGTKLEIKRGGGGSGGGGSGGGGSQVQLQQPGAELVKPGASVKMSCKASGYAFSSYWINWMKQKPGQGLEWIGQIYPGDGDTNYNGKFKGRATLTADTSSSTAYMQLSSLTSEDSAVYFCARSITTVVGCAMDYWGQGTSVTVSSTREDLKNVFPPEVAVFEPSEAEISHTQKATLVCLATGFYPDHVELSWWVNGKEVHSGVSTDPQPLKEQPALNDSRYCLSSRLRVSATFWQNPRNHFRCQVQFYGLSENDEWTQDRAKPVTQIVSAEAWGRADDVIKIHWQEKKSNTILGSQEGNTMKTNDTYMKFSWLTVPEKSLDKEHRCIVRHENNKNGVDQEIIFPPIKTDVITMDPKDNCSKDANDTLLLQLTNTSAYYMYLLLLLKSVVYFAIITCCLLRRTAFCCNGEKSRAKRSGSGVKQTLNFDLLKLAGDVESNPGPSRGHMTEYKPTVRLATRDDVPRAVRTLAAAFADYPATRHTVDPDRHIERVTELQELFLTRVGLDIGKVWVADDGAAVAVWTTPESVEAGAVFAEIGPRMAELSGSRLAAQQQMEGLLAPHRPKEPAWFLATVGVSPDHQGKGLGSAVVLPGVEAAERAGVPAFLETSAPRNLPFYERLGFTVTADVEVPEGPRTWCMTRKPGA

SEQ ID NO: 16769 - protein, 1244 aa, synthetic construct; identical to SEQ ID NO: 16768

SEQ ID NO: 16770 - protein, 856 aa, synthetic construct
MALPVTALLLPLALLLHAARPLEIQNPDPAVYQLRDSKSSDKSVCLFTDFDSQTNVSQSKDSDVYITDKTVLDMRSMDFKSNSAVAWSNKSDFACANAFNNSIIPEDTFFPSPESSDSTDHVKPKETENTKQPSKSCHKPKAIVHTEKVNMMSLTVLGLRMLFAKTVAVNFLLTAKLFFLRAKRSGSGATNFSLLKQAGDVEENPGPTSMALPVTALLLPLALLLHAARPDEFGSDLGIKLLFAAAKGQDDEVRILLAAGADVNAKDFEGYTPLHVAAYDGHLEIVEVLLKAGADVNAKDSQGRTPLHEAAYSGHLEIVEVLLKAGADVNAQDDAGETPADLAAAWGHEDIAEVLQKTREDLKNVFPPEVAVFEPSEAEISHTQKATLVCLATGFYPDHVELSWWVNGKEVHSGVSTDPQPLKEQPALNDSRYCLSSRLRVSATFWQNPRNHFRCQVQFYGLSENDEWTQDRAKPVTQIVSAEAWGRADDVIKIHWQEKKSNTILGSQEGNTMKTNDTYMKFSWLTVPEKSLDKEHRCIVRHENNKNGVDQEIIFPPIKTDVITMDPKDNCSKDANDTLLLQLTNTSAYYMYLLLLLKSVVYFAIITCCLLRRTAFCCNGEKSRAKRSGSGVKQTLNFDLLKLAGDVESNPGPSRGHMTEYKPTVRLATRDDVPRAVRTLAAAFADYPATRHTVDPDRHIERVTELQELFLTRVGLDIGKVWVADDGAAVAVWTTPESVEAGAVFAEIGPRMAELSGSRLAAQQQMEGLLAPHRPKEPAWFLATVGVSPDHQGKGLGSAVVLPGVEAAERAGVPAFLETSAPRNLPFYERLGFTVTADVEVPEGPRTWCMTRKPGA

SEQ ID NO: 16771 - protein, 785 aa, synthetic construct
MALPVTALLLPLALLLHAARPLEIQNPDPAVYQLRDSKSSDKSVCLFTDFDSQTNVSQSKDSDVYITDKTVLDMRSMDFKSNSAVAWSNKSDFACANAFNNSIIPEDTFFPSPESSDSTDHVKPKETENTKQPSKSCHKPKAIVHTEKVNMMSLTVLGLRMLFAKTVAVNFLLTAKLFFLRAKRSGSGATNFSLLKQAGDVEENPGPTSMDWIWRILFLVGAATGAHSFEGSGFEYAKEMRNAYWEIALLPNLTNQQKRAPIRKLYDDPSQSSELLSEAKKLNDSQTREDLKNVFPPEVAVFEPSEAEISHTQKATLVCLATGFYPDHVELSWWVNGKEVHSGVSTDPQPLKEQPALNDSRYCLSSRLRVSATFWQNPRNHFRCQVQFYGLSENDEWTQDRAKPVTQIVSAEAWGRADDVIKIHWQEKKSNTILGSQEGNTMKTNDTYMKFSWLTVPEKSLDKEHRCIVRHENNKNGVDQEIIFPPIKTDVITMDPKDNCSKDANDTLLLQLTNTSAYYMYLLLLLKSVVYFAIITCCLLRRTAFCCNGEKSRAKRSGSGVKQTLNFDLLKLAGDVESNPGPSRGHMTEYKPTVRLATRDDVPRAVRTLAAAFADYPATRHTVDPDRHIERVTELQELFLTRVGLDIGKVWVADDGAAVAVWTTPESVEAGAVFAEIGPRMAELSGSRLAAQQQMEGLLAPHRPKEPAWFLATVGVSPDHQGKGLGSAVVLPGVEAAERAGVPAFLETSAPRNLPFYERLGFTVTADVEVPEGPRTWCMTRKPGA

SEQ ID NO: 16772 - protein, 1007 aa, synthetic construct
MALPVTALLLPLALLLHAARPLEIQNPDPAVYQLRDSKSSDKSVCLFTDFDSQTNVSQSKDSDVYITDKTVLDMRSMDFKSNSAVAWSNKSDFACANAFNNSIIPEDTFFPSPESSDSTDHVKPKETENTKQPSKSCHKPKAIVHTEKVNMMSLTVLGLRMLFAKTVAVNFLLTAKLFFLRAKRSGSGATNFSLLKQAGDVEENPGPTSMALPVTALLLPLALLLHAARPDEFEVQLVESGGGLVQAGGSLRLSCAASGITFSINTMGWYRQAPGKQRELVALISSIGDTYYADSVKGRFTISRDNAKNTVYLQMNSLKPEDTAVYYCKRFRTAAQGTDYWGQGTQVTVSSLEGGGGSGGGGSGGGGSGSGGSGSGGSGSGGSGSGGSFEVQLVESGGGLVQPGGSLRLSCAASGSIFGFNDMAWYRQAPGKQRELVALISRVGVTSSADSVKGRFTISRVNAKDTVYLQMNSLKPEDTAVYYCYMDQRLDGSTLAYWGQGTQVTVSSTREDLKNVFPPEVAVFEPSEAEISHTQKATLVCLATGFYPDHVELSWWVNGKEVHSGVSTDPQPLKEQPALNDSRYCLSSRLRVSATFWQNPRNHFRCQVQFYGLSENDEWTQDRAKPVTQIVSAEAWGRADDVIKIHWQEKKSNTILGSQEGNTMKTNDTYMKFSWLTVPEKSLDKEHRCIVRHENNKNGVDQEIIFPPIKTDVITMDPKDNCSKDANDTLLLQLTNTSAYYMYLLLLLKSVVYFAIITCCLLRRTAFCCNGEKSRAKRSGSGVKQTLNFDLLKLAGDVESNPGPSRGHMTEYKPTVRLATRDDVPRAVRTLAAAFADYPATRHTVDPDRHIERVTELQELFLTRVGLDIGKVWVADDGAAVAVWTTPESVEAGAVFAEIGPRMAELSGSRLAAQQQMEGLLAPHRPKEPAWFLATVGVSPDHQGKGLGSAVVLPGVEAAERAGVPAFLETSAPRNLPFYERLGFTVTADVEVPEGPRTWCMTRKPGA

SEQ ID NO: 16773 - protein, 921 aa, synthetic construct
MALPVTALLLPLALLLHAARPLEIQNPDPAVYQLRDSKSSDKSVCLFTDFDSQTNVSQSKDSDVYITDKTVLDMRSMDFKSNSAVAWSNKSDFACANAFNNSIIPEDTFFPSPESSDSTDHVKPKETENTKQPSKSCHKPKAIVHTEKVNMMSLTVLGLRMLFAKTVAVNFLLTAKLFFLRAKRSGSGATNFSLLKQAGDVEENPGPTSMALPVTALLLPLALLLHAARPGMRTEDLPKAVVFLEPQWYRVLEKDSVTLKCQGAYSPEDNSTQWFHNESLISSQASSYFIDAATVDDSGEYRCQTNLSTLSDPVQLEVHIGWLLLQAPRWVFKEEDPIHLRCHSWKNTALHKVTYLQNGKGRKYFHHNSDFYIPKATLKDSGSYFCRGLVGSKNVSSETVNITITQGLAVSTISSFFPPGYQTREDLKNVFPPEVAVFEPSEAEISHTQKATLVCLATGFYPDHVELSWWVNGKEVHSGVSTDPQPLKEQPALNDSRYCLSSRLRVSATFWQNPRNHFRCQVQFYGLSENDEWTQDRAKPVTQIVSAEAWGRADDVIKIHWQEKKSNTILGSQEGNTMKTNDTYMKFSWLTVPEKSLDKEHRCIVRHENNKNGVDQEIIFPPIKTDVITMDPKDNCSKDANDTLLLQLTNTSAYYMYLLLLLKSVVYFAIITCCLLRRTAFCCNGEKSRAKRSGSGVKQTLNFDLLKLAGDVESNPGPSRGHMTEYKPTVRLATRDDVPRAVRTLAAAFADYPATRHTVDPDRHIERVTELQELFLTRVGLDIGKVWVADDGAAVAVWTTPESVEAGAVFAEIGPRMAELSGSRLAAQQQMEGLLAPHRPKEPAWFLATVGVSPDHQGKGLGSAVVLPGVEAAERAGVPAFLETSAPRNLPFYERLGFTVTADVEVPEGPRTWCMTRKPGA

SEQ ID NO: 16774 - protein, 923 aa, synthetic construct
MALPVTALLLPLALLLHAARPLEIQNPDPAVYQLRDSKSSDKSVCLFTDFDSQTNVSQSKDSDVYITDKTVLDMRSMDFKSNSAVAWSNKSDFACANAFNNSIIPEDTFFPSPESSDSTDHVKPKETENTKQPSKSCHKPKAIVHTEKVNMMSLTVLGLRMLFAKTVAVNFLLTAKLFFLRAKRSGSGATNFSLLKQAGDVEENPGPTSATMALPVTALLLPLALLLHAARPGMRTEDLPKAVVFLEPQWYRVLEKDSVTLKCQGAYSPEDNSTQWFHNESLISSQASSYFIDAATVDDSGEYRCQTNLSTLSDPVQLEVHIGWLLLQAPRWVFKEEDPIHLRCHSWKNTALHKVTYLQNGKGRKYFHHNSDFYIPKATLKDSGSYFCRGLVGSKNVSSETVNITITQGLAVSTISSFFPPGYQTREDLKNVFPPEVAVFEPSEAEISHTQKATLVCLATGFYPDHVELSWWVNGKEVHSGVSTDPQPLKEQPALNDSRYCLSSRLRVSATFWQNPRNHFRCQVQFYGLSENDEWTQDRAKPVTQIVSAEAWGRADDVIKIHWQEKKSNTILGSQEGNTMKTNDTYMKFSWLTVPEKSLDKEHRCIVRHENNKNGVDQEIIFPPIKTDVITMDPKDNCSKDANDTLLLQLTNTSAYYMYLLLLLKSVVYFAIITCCLLRRTAFCCNGEKSRAKRSGSGVKQTLNFDLLKLAGDVESNPGPSRGHMTEYKPTVRLATRDDVPRAVRTLAAAFADYPATRHTVDPDRHIERVTELQELFLTRVGLDIGKVWVADDGAAVAVWTTPESVEAGAVFAEIGPRMAELSGSRLAAQQQMEGLLAPHRPKEPAWFLATVGVSPDHQGKGLGSAVVLPGVEAAERAGVPAFLETSAPRNLPFYERLGFTVTADVEVPEGPRTWCMTRKPGA

SEQ ID NO: 16775 - protein, 12 aa, synthetic construct
GGGGGGGGGGGG

SEQ ID NO: 16776 - protein, 12 aa, synthetic construct
GGGGGGGGGGGG

SEQ ID NO: 16777 - DNA, 426 bp, synthetic construct; identical to SEQ ID NO: 530
  source 1..426: mol_type = other DNA

SEQ ID NO: 16778 - DNA, 423 bp, synthetic construct
  source 1..423: mol_type = other DNA
cagaaccctgatcctgccgtgtaccagctgcgggatagcaagagcagcgacaagagcgtgtgtctgttcaccgacttcgacagccagaccaacgtgtcccagagcaaggactccgacgtgtacatcaccgataagtgcgtgctggacatgcggagcatggacttcaagagcaactccgccgtggcctggtccaacaagtccgatttcgcctgcgccaacgccttcaacaacagcattatccccgaggacacattcttcccaagccccgagagcagctgcggctttaccagcgagagctaccagcagggcgtgctgagcgccaccatcctgtacgagatcctgctgggcaaggccaccctgtacgccgtgctggtgtctgccctggtgctgatggctatggtcaagcggaaggacagccgggga

SEQ ID NO: 16779 - DNA, 420 bp, synthetic construct
  source 1..420: mol_type = other DNA
aaccctgatcctgccgtgtaccagctgcgggatagcaagagcagcgacaagagcgtgtgtctgttcaccgacttcgacagccagaccaacgtgtcccagagcaaggactccgacgtgtacatcaccgataagtgcgtgctggacatgcggagcatggacttcaagagcaactccgccgtggcctggtccaacaagtccgatttcgcctgcgccaacgccttcaacaacagcattatccccgaggacacattcttcccaagccccgagagcagctgcggctttaccagcgagagctaccagcagggcgtgctgagcgccaccatcctgtacgagatcctgctgggcaaggccaccctgtacgccgtgctggtgtctgccctggtgctgatggctatggtcaagcggaaggacagccgggga

SEQ ID NO: 16780 - DNA, 417 bp, synthetic construct
  source 1..417: mol_type = other DNA
cctgatcctgccgtgtaccagctgcgggatagcaagagcagcgacaagagcgtgtgtctgttcaccgacttcgacagccagaccaacgtgtcccagagcaaggactccgacgtgtacatcaccgataagtgcgtgctggacatgcggagcatggacttcaagagcaactccgccgtggcctggtccaacaagtccgatttcgcctgcgccaacgccttcaacaacagcattatccccgaggacacattcttcccaagccccgagagcagctgcggctttaccagcgagagctaccagcagggcgtgctgagcgccaccatcctgtacgagatcctgctgggcaaggccaccctgtacgccgtgctggtgtctgccctggtgctgatggctatggtcaagcggaaggacagccgggga

SEQ ID NO: 16781 - DNA, 414 bp, synthetic construct
  source 1..414: mol_type = other DNA
gatcctgccgtgtaccagctgcgggatagcaagagcagcgacaagagcgtgtgtctgttcaccgacttcgacagccagaccaacgtgtcccagagcaaggactccgacgtgtacatcaccgataagtgcgtgctggacatgcggagcatggacttcaagagcaactccgccgtggcctggtccaacaagtccgatttcgcctgcgccaacgccttcaacaacagcattatccccgaggacacattcttcccaagccccgagagcagctgcggctttaccagcgagagctaccagcagggcgtgctgagcgccaccatcctgtacgagatcctgctgggcaaggccaccctgtacgccgtgctggtgtctgccctggtgctgatggctatggtcaagcggaaggacagccgggga

SEQ ID NO: 16782 - DNA, 411 bp, synthetic construct
  source 1..411: mol_type = other DNA
cctgccgtgtaccagctgcgggatagcaagagcagcgacaagagcgtgtgtctgttcaccgacttcgacagccagaccaacgtgtcccagagcaaggactccgacgtgtacatcaccgataagtgcgtgctggacatgcggagcatggacttcaagagcaactccgccgtggcctggtccaacaagtccgatttcgcctgcgccaacgccttcaacaacagcattatccccgaggacacattcttcccaagccccgagagcagctgcggctttaccagcgagagctaccagcagggcgtgctgagcgccaccatcctgtacgagatcctgctgggcaaggccaccctgtacgccgtgctggtgtctgccctggtgctgatggctatggtcaagcggaaggacagccgggga

SEQ ID NO: 16783 - DNA, 408 bp, synthetic construct
  source 1..408: mol_type = other DNA
gccgtgtaccagctgcgggatagcaagagcagcgacaagagcgtgtgtctgttcaccgacttcgacagccagaccaacgtgtcccagagcaaggactccgacgtgtacatcaccgataagtgcgtgctggacatgcggagcatggacttcaagagcaactccgccgtggcctggtccaacaagtccgatttcgcctgcgccaacgccttcaacaacagcattatccccgaggacacattcttcccaagccccgagagcagctgcggctttaccagcgagagctaccagcagggcgtgctgagcgccaccatcctgtacgagatcctgctgggcaaggccaccctgtacgccgtgctggtgtctgccctggtgctgatggctatggtcaagcggaaggacagccgggga

SEQ ID NO: 16784 - DNA, 405 bp, synthetic construct
  source 1..405: mol_type = other DNA
gtgtaccagctgcgggatagcaagagcagcgacaagagcgtgtgtctgttcaccgacttcgacagccagaccaacgtgtcccagagcaaggactccgacgtgtacatcaccgataagtgcgtgctggacatgcggagcatggacttcaagagcaactccgccgtggcctggtccaacaagtccgatttcgcctgcgccaacgccttcaacaacagcattatccccgaggacacattcttcccaagccccgagagcagctgcggctttaccagcgagagctaccagcagggcgtgctgagcgccaccatcctgtacgagatcctgctgggcaaggccaccctgtacgccgtgctggtgtctgccctggtgctgatggctatggtcaagcggaaggacagccgggga

SEQ ID NO: 16785 - DNA, 402 bp, synthetic construct
  source 1..402: mol_type = other DNA
taccagctgcgggatagcaagagcagcgacaagagcgtgtgtctgttcaccgacttcgacagccagaccaacgtgtcccagagcaaggactccgacgtgtacatcaccgataagtgcgtgctggacatgcggagcatggacttcaagagcaactccgccgtggcctggtccaacaagtccgatttcgcctgcgccaacgccttcaacaacagcattatccccgaggacacattcttcccaagccccgagagcagctgcggctttaccagcgagagctaccagcagggcgtgctgagcgccaccatcctgtacgagatcctgctgggcaaggccaccctgtacgccgtgctggtgtctgccctggtgctgatggctatggtcaagcggaaggacagccgggga

SEQ ID NO: 16786 - DNA, 399 bp, synthetic construct
  source 1..399: mol_type = other DNA
cagctgcgggatagcaagagcagcgacaagagcgtgtgtctgttcaccgacttcgacagccagaccaacgtgtcccagagcaaggactccgacgtgtacatcaccgataagtgcgtgctggacatgcggagcatggacttcaagagcaactccgccgtggcctggtccaacaagtccgatttcgcctgcgccaacgccttcaacaacagcattatccccgaggacacattcttcccaagccccgagagcagctgcggctttaccagcgagagctaccagcagggcgtgctgagcgccaccatcctgtacgagatcctgctgggcaaggccaccctgtacgccgtgctggtgtctgccctggtgctgatggctatggtcaagcggaaggacagccgggga

SEQ ID NO: 16787 - DNA, 396 bp, synthetic construct
  source 1..396: mol_type = other DNA
ctgcgggatagcaagagcagcgacaagagcgtgtgtctgttcaccgacttcgacagccagaccaacgtgtcccagagcaaggactccgacgtgtacatcaccgataagtgcgtgctggacatgcggagcatggacttcaagagcaactccgccgtggcctggtccaacaagtccgatttcgcctgcgccaacgccttcaacaacagcattatccccgaggacacattcttcccaagccccgagagcagctgcggctttaccagcgagagctaccagcagggcgtgctgagcgccaccatcctgtacgagatcctgctgggcaaggccaccctgtacgccgtgctggtgtctgccctggtgctgatggctatggtcaagcggaaggacagccgggga

SEQ ID NO: 16788 - DNA, 393 bp, synthetic construct
  source 1..393: mol_type = other DNA
cgggatagcaagagcagcgacaagagcgtgtgtctgttcaccgacttcgacagccagaccaacgtgtcccagagcaaggactccgacgtgtacatcaccgataagtgcgtgctggacatgcggagcatggacttcaagagcaactccgccgtggcctggtccaacaagtccgatttcgcctgcgccaacgccttcaacaacagcattatccccgaggacacattcttcccaagccccgagagcagctgcggctttaccagcgagagctaccagcagggcgtgctgagcgccaccatcctgtacgagatcctgctgggcaaggccaccctgtacgccgtgctggtgtctgccctggtgctgatggctatggtcaagcggaaggacagccgggga

SEQ ID NO: 16789 - DNA, 390 bp, synthetic construct
  source 1..390: mol_type = other DNA
gatagcaagagcagcgacaagagcgtgtgtctgttcaccgacttcgacagccagaccaacgtgtcccagagcaaggactccgacgtgtacatcaccgataagtgcgtgctggacatgcggagcatggacttcaagagcaactccgccgtggcctggtccaacaagtccgatttcgcctgcgccaacgccttcaacaacagcattatccccgaggacacattcttcccaagccccgagagcagctgcggctttaccagcgagagctaccagcagggcgtgctgagcgccaccatcctgtacgagatcctgctgggcaaggccaccctgtacgccgtgctggtgtctgccctggtgctgatggctatggtcaagcggaaggacagccgggga

SEQ ID NO: 16790 - DNA, 387 bp, synthetic construct
  source 1..387: mol_type = other DNA
agcaagagcagcgacaagagcgtgtgtctgttcaccgacttcgacagccagaccaacgtgtcccagagcaaggactccgacgtgtacatcaccgataagtgcgtgctggacatgcggagcatggacttcaagagcaactccgccgtggcctggtccaacaagtccgatttcgcctgcgccaacgccttcaacaacagcattatccccgaggacacattcttcccaagccccgagagcagctgcggctttaccagcgagagctaccagcagggcgtgctgagcgccaccatcctgtacgagatcctgctgggcaaggccaccctgtacgccgtgctggtgtctgccctggtgctgatggctatggtcaagcggaaggacagccgggga

SEQ ID NO: 16791 - DNA, 384 bp, synthetic construct
  source 1..384: mol_type = other DNA
aagagcagcgacaagagcgtgtgtctgttcaccgacttcgacagccagaccaacgtgtcccagagcaaggactccgacgtgtacatcaccgataagtgcgtgctggacatgcggagcatggacttcaagagcaactccgccgtggcctggtccaacaagtccgatttcgcctgcgccaacgccttcaacaacagcattatccccgaggacacattcttcccaagccccgagagcagctgcggctttaccagcgagagctaccagcagggcgtgctgagcgccaccatcctgtacgagatcctgctgggcaaggccaccctgtacgccgtgctggtgtctgccctggtgctgatggctatggtcaagcggaaggacagccgggga

SEQ ID NO: 16792 - DNA, 381 bp, synthetic construct
  source 1..381: mol_type = other DNA
agcagcgacaagagcgtgtgtctgttcaccgacttcgacagccagaccaacgtgtcccagagcaaggactccgacgtgtacatcaccgataagtgcgtgctggacatgcggagcatggacttcaagagcaactccgccgtggcctggtccaacaagtccgatttcgcctgcgccaacgccttcaacaacagcattatccccgaggacacattcttcccaagccccgagagcagctgcggctttaccagcgagagctaccagcagggcgtgctgagcgccaccatcctgtacgagatcctgctgggcaaggccaccctgtacgccgtgctggtgtctgccctggtgctgatggctatggtcaagcggaaggacagccgggga

SEQ ID NO: 16793 - DNA, 378 bp, synthetic construct
  source 1..378: mol_type = other DNA
agcgacaagagcgtgtgtctgttcaccgacttcgacagccagaccaacgtgtcccagagcaaggactccgacgtgtacatcaccgataagtgcgtgctggacatgcggagcatggacttcaagagcaactccgccgtggcctggtccaacaagtccgatttcgcctgcgccaacgccttcaacaacagcattatccccgaggacacattcttcccaagccccgagagcagctgcggctttaccagcgagagctaccagcagggcgtgctgagcgccaccatcctgtacgagatcctgctgggcaaggccaccctgtacgccgtgctggtgtctgccctggtgctgatggctatggtcaagcggaaggacagccgggga

SEQ ID NO: 16794 - DNA, 375 bp, synthetic construct
  source 1..375: mol_type = other DNA
gacaagagcgtgtgtctgttcaccgacttcgacagccagaccaacgtgtcccagagcaaggactccgacgtgtacatcaccgataagtgcgtgctggacatgcggagcatggacttcaagagcaactccgccgtggcctggtccaacaagtccgatttcgcctgcgccaacgccttcaacaacagcattatccccgaggacacattcttcccaagccccgagagcagctgcggctttaccagcgagagctaccagcagggcgtgctgagcgccaccatcctgtacgagatcctgctgggcaaggccaccctgtacgccgtgctggtgtctgccctggtgctgatggctatggtcaagcggaaggacagccgggga

SEQ ID NO: 16795 - DNA, 372 bp, synthetic construct
  source 1..372: mol_type = other DNA
aagagcgtgtgtctgttcaccgacttcgacagccagaccaacgtgtcccagagcaaggactccgacgtgtacatcaccgataagtgcgtgctggacatgcggagcatggacttcaagagcaactccgccgtggcctggtccaacaagtccgatttcgcctgcgccaacgccttcaacaacagcattatccccgaggacacattcttcccaagccccgagagcagctgcggctttaccagcgagagctaccagcagggcgtgctgagcgccaccatcctgtacgagatcctgctgggcaaggccaccctgtacgccgtgctggtgtctgccctggtgctgatggctatggtcaagcggaaggacagccgggga

SEQ ID NO: 16796 - DNA, 369 bp, synthetic construct
  source 1..369: mol_type = other DNA
agcgtgtgtctgttcaccgacttcgacagccagaccaacgtgtcccagagcaaggactccgacgtgtacatcaccgataagtgcgtgctggacatgcggagcatggacttcaagagcaactccgccgtggcctggtccaacaagtccgatttcgcctgcgccaacgccttcaacaacagcattatccccgaggacacattcttcccaagccccgagagcagctgcggctttaccagcgagagctaccagcagggcgtgctgagcgccaccatcctgtacgagatcctgctgggcaaggccaccctgtacgccgtgctggtgtctgccctggtgctgatggctatggtcaagcggaaggacagccgggga

SEQ ID NO: 16797 - DNA, 366 bp, synthetic construct
  source 1..366: mol_type = other DNA
gtgtgtctgttcaccgacttcgacagccagaccaacgtgtcccagagcaaggactccgacgtgtacatcaccgataagtgcgtgctggacatgcggagcatggacttcaagagcaactccgccgtggcctggtccaacaagtccgatttcgcctgcgccaacgccttcaacaacagcattatccccgaggacacattcttcccaagccccgagagcagctgcggctttaccagcgagagctaccagcagggcgtgctgagcgccaccatcctgtacgagatcctgctgggcaaggccaccctgtacgccgtgctggtgtctgccctggtgctgatggctatggtcaagcggaaggacagccgggga

SEQ ID NO: 16798 - DNA, 351 bp, synthetic construct
  source 1..351: mol_type = other DNA
gacttcgacagccagaccaacgtgtcccagagcaaggactccgacgtgtacatcaccgataagtgcgtgctggacatgcggagcatggacttcaagagcaactccgccgtggcctggtccaacaagtccgatttcgcctgcgccaacgccttcaacaacagcattatccccgaggacacattcttcccaagccccgagagcagctgcggctttaccagcgagagctaccagcagggcgtgctgagcgccaccatcctgtacgagatcctgctgggcaaggccaccctgtacgccgtgctggtgtctgccctggtgctgatggctatggtcaagcggaaggacagccgggga

SEQ ID NO: 16799 - DNA, 336 bp, synthetic construct
  source 1..336: mol_type = other DNA
accaacgtgtcccagagcaaggactccgacgtgtacatcaccgataagtgcgtgctggacatgcggagcatggacttcaagagcaactccgccgtggcctggtccaacaagtccgatttcgcctgcgccaacgccttcaacaacagcattatccccgaggacacattcttcccaagccccgagagcagctgcggctttaccagcgagagctaccagcagggcgtgctgagcgccaccatcctgtacgagatcctgctgggcaaggccaccctgtacgccgtgctggtgtctgccctggtgctgatggctatggtcaagcggaaggacagccgggga

SEQ ID NO: 16800 - DNA, 435 bp, synthetic construct; identical to SEQ ID NO: 532
  source 1..435: mol_type = other DNA

SEQ ID NO: 16801 - DNA, 432 bp, synthetic construct
  source 1..432: mol_type = other DNA
cagaaccctgatcctgccgtgtaccagctgcgggatagcaagagcagcgacaagagcgtgtgtctgttcaccgacttcgacagccagaccaacgtgtcccagagcaaggactccgacgtgtacatcaccgataagtgcgtgctggacatgcggagcatggacttcaagagcaactccgccgtggcctggtccaacaagtccgatttcgcctgcgccaacgccttcaacaacagcattatccccgaggacacattcttcccaagccccgagagcagctgcgacgtgaagctggtggaaaagagcttcgagacagacaccaacctgaacttccagatcctgtacgagatcctgctgggcaaggccaccctgtacgccgtgctggtgtctgccctggtgctgatggctatggtcaagcggaaggacagccgggga

SEQ ID NO: 16802 - DNA, 429 bp, synthetic construct
  source 1..429: mol_type = other DNA
aaccctgatcctgccgtgtaccagctgcgggatagcaagagcagcgacaagagcgtgtgtctgttcaccgacttcgacagccagaccaacgtgtcccagagcaaggactccgacgtgtacatcaccgataagtgcgtgctggacatgcggagcatggacttcaagagcaactccgccgtggcctggtccaacaagtccgatttcgcctgcgccaacgccttcaacaacagcattatccccgaggacacattcttcccaagccccgagagcagctgcgacgtgaagctggtggaaaagagcttcgagacagacaccaacctgaacttccagatcctgtacgagatcctgctgggcaaggccaccctgtacgccgtgctggtgtctgccctggtgctgatggctatggtcaagcggaaggacagccgggga

SEQ ID NO: 16803 - DNA, 426 bp, synthetic construct
  source 1..426: mol_type = other DNA
cctgatcctgccgtgtaccagctgcgggatagcaagagcagcgacaagagcgtgtgtctgttcaccgacttcgacagccagaccaacgtgtcccagagcaaggactccgacgtgtacatcaccgataagtgcgtgctggacatgcggagcatggacttcaagagcaactccgccgtggcctggtccaacaagtccgatttcgcctgcgccaacgccttcaacaacagcattatccccgaggacacattcttcccaagccccgagagcagctgcgacgtgaagctggtggaaaagagcttcgagacagacaccaacctgaacttccagatcctgtacgagatcctgctgggcaaggccaccctgtacgccgtgctggtgtctgccctggtgctgatggctatggtcaagcggaaggacagccgggga

SEQ ID NO: 16804 - DNA, 423 bp, synthetic construct
  source 1..423: mol_type = other DNA
gatcctgccgtgtaccagctgcgggatagcaagagcagcgacaagagcgtgtgtctgttcaccgacttcgacagccagaccaacgtgtcccagagcaaggactccgacgtgtacatcaccgataagtgcgtgctggacatgcggagcatggacttcaagagcaactccgccgtggcctggtccaacaagtccgatttcgcctgcgccaacgccttcaacaacagcattatccccgaggacacattcttcccaagccccgagagcagctgcgacgtgaagctggtggaaaagagcttcgagacagacaccaacctgaacttccagatcctgtacgagatcctgctgggcaaggccaccctgtacgccgtgctggtgtctgccctggtgctgatggctatggtcaagcggaaggacagccgggga

SEQ ID NO: 16805 - DNA, 420 bp, synthetic construct
  source 1..420: mol_type = other DNA
cctgccgtgtaccagctgcgggatagcaagagcagcgacaagagcgtgtgtctgttcaccgacttcgacagccagaccaacgtgtcccagagcaaggactccgacgtgtacatcaccgataagtgcgtgctggacatgcggagcatggacttcaagagcaactccgccgtggcctggtccaacaagtccgatttcgcctgcgccaacgccttcaacaacagcattatccccgaggacacattcttcccaagccccgagagcagctgcgacgtgaagctggtggaaaagagcttcgagacagacaccaacctgaacttccagatcctgtacgagatcctgctgggcaaggccaccctgtacgccgtgctggtgtctgccctggtgctgatggctatggtcaagcggaaggacagccgggga

SEQ ID NO: 16806 - DNA, 417 bp, synthetic construct
  source 1..417: mol_type = other DNA
gccgtgtaccagctgcgggatagcaagagcagcgacaagagcgtgtgtctgttcaccgacttcgacagccagaccaacgtgtcccagagcaaggactccgacgtgtacatcaccgataagtgcgtgctggacatgcggagcatggacttcaagagcaactccgccgtggcctggtccaacaagtccgatttcgcctgcgccaacgccttcaacaacagcattatccccgaggacacattcttcccaagccccgagagcagctgcgacgtgaagctggtggaaaagagcttcgagacagacaccaacctgaacttccagatcctgtacgagatcctgctgggcaaggccaccctgtacgccgtgctggtgtctgccctggtgctgatggctatggtcaagcggaaggacagccgggga

SEQ ID NO: 16807 - DNA, 414 bp, synthetic construct
  source 1..414: mol_type = other DNA
gtgtaccagctgcgggatagcaagagcagcgacaagagcgtgtgtctgttcaccgacttcgacagccagaccaacgtgtcccagagcaaggactccgacgtgtacatcaccgataagtgcgtgctggacatgcggagcatggacttcaagagcaactccgccgtggcctggtccaacaagtccgatttcgcctgcgccaacgccttcaacaacagcattatccccgaggacacattcttcccaagccccgagagcagctgcgacgtgaagctggtggaaaagagcttcgagacagacaccaacctgaacttccagatcctgtacgagatcctgctgggcaaggccaccctgtacgccgtgctggtgtctgccctggtgctgatggctatggtcaagcggaaggacagccgggga

SEQ ID NO: 16808 - DNA, 411 bp, synthetic construct
  source 1..411: mol_type = other DNA
taccagctgcgggatagcaagagcagcgacaagagcgtgtgtctgttcaccgacttcgacagccagaccaacgtgtcccagagcaaggactccgacgtgtacatcaccgataagtgcgtgctggacatgcggagcatggacttcaagagcaactccgccgtggcctggtccaacaagtccgatttcgcctgcgccaacgccttcaacaacagcattatccccgaggacacattcttcccaagccccgagagcagctgcgacgtgaagctggtggaaaagagcttcgagacagacaccaacctgaacttccagatcctgtacgagatcctgctgggcaaggccaccctgtacgccgtgctggtgtctgccctggtgctgatggctatggtcaagcggaaggacagccgggga

SEQ ID NO: 16809 - DNA, 408 bp, synthetic construct
  source 1..408: mol_type = other DNA
cagctgcgggatagcaagagcagcgacaagagcgtgtgtctgttcaccgacttcgacagccagaccaacgtgtcccagagcaaggactccgacgtgtacatcaccgataagtgcgtgctggacatgcggagcatggacttcaagagcaactccgccgtggcctggtccaacaagtccgatttcgcctgcgccaacgccttcaacaacagcattatccccgaggacacattcttcccaagccccgagagcagctgcgacgtgaagctggtggaaaagagcttcgagacagacaccaacctgaacttccagatcctgtacgagatcctgctgggcaaggccaccctgtacgccgtgctggtgtctgccctggtgctgatggctatggtcaagcggaaggacagccgggga

SEQ ID NO: 16810 - DNA, 405 bp, synthetic construct
  source 1..405: mol_type = other DNA
ctgcgggatagcaagagcagcgacaagagcgtgtgtctgttcaccgacttcgacagccagaccaacgtgtcccagagcaaggactccgacgtgtacatcaccgataagtgcgtgctggacatgcggagcatggacttcaagagcaactccgccgtggcctggtccaacaagtccgatttcgcctgcgccaacgccttcaacaacagcattatccccgaggacacattcttcccaagccccgagagcagctgcgacgtgaagctggtggaaaagagcttcgagacagacaccaacctgaacttccagatcctgtacgagatcctgctgggcaaggccaccctgtacgccgtgctggtgtctgccctggtgctgatggctatggtcaagcggaaggacagccgggga

SEQ ID NO: 16811 - DNA, 402 bp, synthetic construct
  source 1..402: mol_type = other DNA
cgggatagcaagagcagcgacaagagcgtgtgtctgttcaccgacttcgacagccagaccaacgtgtcccagagcaaggactccgacgtgtacatcaccgataagtgcgtgctggacatgcggagcatggacttcaagagcaactccgccgtggcctggtccaacaagtccgatttcgcctgcgccaacgccttcaacaacagcattatccccgaggacacattcttcccaagccccgagagcagctgcgacgtgaagctggtggaaaagagcttcgagacagacaccaacctgaacttccagatcctgtacgagatcctgctgggcaaggccaccctgtacgccgtgctggtgtctgccctggtgctgatggctatggtcaagcggaaggacagccgggga

SEQ ID NO: 16812 - DNA, 399 bp, synthetic construct
  source 1..399: mol_type = other DNA
gatagcaagagcagcgacaagagcgtgtgtctgttcaccgacttcgacagccagaccaacgtgtcccagagcaaggactccgacgtgtacatcaccgataagtgcgtgctggacatgcggagcatggacttcaagagcaactccgccgtggcctggtccaacaagtccgatttcgcctgcgccaacgccttcaacaacagcattatccccgaggacacattcttcccaagccccgagagcagctgcgacgtgaagctggtggaaaagagcttcgagacagacaccaacctgaacttccagatcctgtacgagatcctgctgggcaaggccaccctgtacgccgtgctggtgtctgccctggtgctgatggctatggtcaagcggaaggacagccgggga

SEQ ID NO: 16813 - DNA, 396 bp, synthetic construct
  source 1..396: mol_type = other DNA
agcaagagcagcgacaagagcgtgtgtctgttcaccgacttcgacagccagaccaacgtgtcccagagcaaggactccgacgtgtacatcaccgataagtgcgtgctggacatgcggagcatggacttcaagagcaactccgccgtggcctggtccaacaagtccgatttcgcctgcgccaacgccttcaacaacagcattatccccgaggacacattcttcccaagccccgagagcagctgcgacgtgaagctggtggaaaagagcttcgagacagacaccaacctgaacttccagatcctgtacgagatcctgctgggcaaggccaccctgtacgccgtgctggtgtctgccctggtgctgatggctatggtcaagcggaaggacagccgggga

SEQ ID NO: 16814 - DNA, 393 bp, synthetic construct
  source 1..393: mol_type = other DNA
aagagcagcgacaagagcgtgtgtctgttcaccgacttcgacagccagaccaacgtgtcccagagcaaggactccgacgtgtacatcaccgataagtgcgtgctggacatgcggagcatggacttcaagagcaactccgccgtggcctggtccaacaagtccgatttcgcctgcgccaacgccttcaacaacagcattatccccgaggacacattcttcccaagccccgagagcagctgcgacgtgaagctggtggaaaagagcttcgagacagacaccaacctgaacttccagatcctgtacgagatcctgctgggcaaggccaccctgtacgccgtgctggtgtctgccctggtgctgatggctatggtcaagcggaaggacagccgggga

SEQ ID NO: 16815 - DNA, 390 bp, synthetic construct
  source 1..390: mol_type = other DNA
agcagcgacaagagcgtgtgtctgttcaccgacttcgacagccagaccaacgtgtcccagagcaaggactccgacgtgtacatcaccgataagtgcgtgctggacatgcggagcatggacttcaagagcaactccgccgtggcctggtccaacaagtccgatttcgcctgcgccaacgccttcaacaacagcattatccccgaggacacattcttcccaagccccgagagcagctgcgacgtgaagctggtggaaaagagcttcgagacagacaccaacctgaacttccagatcctgtacgagatcctgctgggcaaggccaccctgtacgccgtgctggtgtctgccctggtgctgatggctatggtcaagcggaaggacagccgggga

SEQ ID NO: 16816 - DNA, 387 bp, synthetic construct
  source 1..387: mol_type = other DNA
agcgacaagagcgtgtgtctgttcaccgacttcgacagccagaccaacgtgtcccagagcaaggactccgacgtgtacatcaccgataagtgcgtgctggacatgcggagcatggacttcaagagcaactccgccgtggcctggtccaacaagtccgatttcgcctgcgccaacgccttcaacaacagcattatccccgaggacacattcttcccaagccccgagagcagctgcgacgtgaagctggtggaaaagagcttcgagacagacaccaacctgaacttccagatcctgtacgagatcctgctgggcaaggccaccctgtacgccgtgctggtgtctgccctggtgctgatggctatggtcaagcggaaggacagccgggga

SEQ ID NO: 16817 - DNA, 384 bp, synthetic construct
  source 1..384: mol_type = other DNA
gacaagagcgtgtgtctgttcaccgacttcgacagccagaccaacgtgtcccagagcaaggactccgacgtgtacatcaccgataagtgcgtgctggacatgcggagcatggacttcaagagcaactccgccgtggcctggtccaacaagtccgatttcgcctgcgccaacgccttcaacaacagcattatccccgaggacacattcttcccaagccccgagagcagctgcgacgtgaagctggtggaaaagagcttcgagacagacaccaacctgaacttccagatcctgtacgagatcctgctgggcaaggccaccctgtacgccgtgctggtgtctgccctggtgctgatggctatggtcaagcggaaggacagccgggga

SEQ ID NO: 16818 - DNA, 381 bp, synthetic construct
  source 1..381: mol_type = other DNA
aagagcgtgtgtctgttcaccgacttcgacagccagaccaacgtgtcccagagcaaggactccgacgtgtacatcaccgataagtgcgtgctggacatgcggagcatggacttcaagagcaactccgccgtggcctggtccaacaagtccgatttcgcctgcgccaacgccttcaacaacagcattatccccgaggacacattcttcccaagccccgagagcagctgcgacgtgaagctggtggaaaagagcttcgagacagacaccaacctgaacttccagatcctgtacgagatcctgctgggcaaggccaccctgtacgccgtgctggtgtctgccctggtgctgatggctatggtcaagcggaaggacagccgggga

SEQ ID NO: 16819 - DNA, 378 bp, synthetic construct
  source 1..378: mol_type = other DNA
agcgtgtgtctgttcaccgacttcgacagccagaccaacgtgtcccagagcaaggactccgacgtgtacatcaccgataagtgcgtgctggacatgcggagcatggacttcaagagcaactccgccgtggcctggtccaacaagtccgatttcgcctgcgccaacgccttcaacaacagcattatccccgaggacacattcttcccaagccccgagagcagctgcgacgtgaagctggtggaaaagagcttcgagacagacaccaacctgaacttccagatcctgtacgagatcctgctgggcaaggccaccctgtacgccgtgctggtgtctgccctggtgctgatggctatggtcaagcggaaggacagccgggga

SEQ ID NO: 16820 - DNA, 375 bp, synthetic construct
  source 1..375: mol_type = other DNA
gtgtgtctgttcaccgacttcgacagccagaccaacgtgtcccagagcaaggactccgacgtgtacatcaccgataagtgcgtgctggacatgcggagcatggacttcaagagcaactccgccgtggcctggtccaacaagtccgatttcgcctgcgccaacgccttcaacaacagcattatccccgaggacacattcttcccaagccccgagagcagctgcgacgtgaagctggtggaaaagagcttcgagacagacaccaacctgaacttccagatcctgtacgagatcctgctgggcaaggccaccctgtacgccgtgctggtgtctgccctggtgctgatggctatggtcaagcggaaggacagccgggga

SEQ ID NO: 16821 - DNA, 360 bp, synthetic construct
  source 1..360: mol_type = other DNA
gacttcgacagccagaccaacgtgtcccagagcaaggactccgacgtgtacatcaccgataagtgcgtgctggacatgcggagcatggacttcaagagcaactccgccgtggcctggtccaacaagtccgatttcgcctgcgccaacgccttcaacaacagcattatccccgaggacacattcttcccaagccccgagagcagctgcgacgtgaagctggtggaaaagagcttcgagacagacaccaacctgaacttccagatcctgtacgagatcctgctgggcaaggccaccctgtacgccgtgctggtgtctgccctggtgctgatggctatggtcaagcggaaggacagccgggga

SEQ ID NO: 16822 - DNA, 345 bp, synthetic construct
  source 1..345: mol_type = other DNA
accaacgtgtcccagagcaaggactccgacgtgtacatcaccgataagtgcgtgctggacatgcggagcatggacttcaagagcaactccgccgtggcctggtccaacaagtccgatttcgcctgcgccaacgccttcaacaacagcattatccccgaggacacattcttcccaagccccgagagcagctgcgacgtgaagctggtggaaaagagcttcgagacagacaccaacctgaacttccagatcctgtacgagatcctgctgggcaaggccaccctgtacgccgtgctggtgtctgccctggtgctgatggctatggtcaagcggaaggacagccgggga

SEQ ID NO: 16823 - DNA, 480 bp, synthetic construct; identical to SEQ ID NO: 533
  source 1..480: mol_type = other DNA

SEQ ID NO: 16824 - DNA, 477 bp, synthetic construct
  source 1..477: mol_type = other DNA
cagaaccctgatcctgccgtgtaccagctgcgggatagcaagagcagcgacaagagcgtgtgtctgttcaccgacttcgacagccagaccaacgtgtcccagagcaaggactccgacgtgtacatcaccgataagtgcgtgctggacatgcggagcatggacttcaagagcaactccgccgtggcctggtccaacaagtccgatttcgcctgcgccaacgccttcaacaacagcattatccccgaggacacattcttcccaagccccgagagcagcgactccaccgaccacgtgaagcccaaagagacagagaacaccaagcagcccagcaagagctgccacaagcccaaggccatcgtgcacaccgagaaagtgaacatgatgagcctgaccgtgctgggcctgcggatgctgttcgccaaaaccgtggccgtgaacttcctgctgaccgccaagctgttcttcctcctcaccgcc

SEQ ID NO: 16825 - DNA, 474 bp, synthetic construct
  source 1..474: mol_type = other DNA
aaccctgatcctgccgtgtaccagctgcgggatagcaagagcagcgacaagagcgtgtgtctgttcaccgacttcgacagccagaccaacgtgtcccagagcaaggactccgacgtgtacatcaccgataagtgcgtgctggacatgcggagcatggacttcaagagcaactccgccgtggcctggtccaacaagtccgatttcgcctgcgccaacgccttcaacaacagcattatccccgaggacacattcttcccaagccccgagagcagcgactccaccgaccacgtgaagcccaaagagacagagaacaccaagcagcccagcaagagctgccacaagcccaaggccatcgtgcacaccgagaaagtgaacatgatgagcctgaccgtgctgggcctgcggatgctgttcgccaaaaccgtggccgtgaacttcctgctgaccgccaagctgttcttcctcctcaccgcc

SEQ ID NO: 16826 - DNA, 471 bp, synthetic construct
  source 1..471: mol_type = other DNA
cctgatcctgccgtgtaccagctgcgggatagcaagagcagcgacaagagcgtgtgtctgttcaccgacttcgacagccagaccaacgtgtcccagagcaaggactccgacgtgtacatcaccgataagtgcgtgctggacatgcggagcatggacttcaagagcaactccgccgtggcctggtccaacaagtccgatttcgcctgcgccaacgccttcaacaacagcattatccccgaggacacattcttcccaagccccgagagcagcgactccaccgaccacgtgaagcccaaagagacagagaacaccaagcagcccagcaagagctgccacaagcccaaggccatcgtgcacaccgagaaagtgaacatgatgagcctgaccgtgctgggcctgcggatgctgttcgccaaaaccgtggccgtgaacttcctgctgaccgccaagctgttcttcctcctcaccgcc

SEQ ID NO: 16827 - DNA, 468 bp, synthetic construct
  source 1..468: mol_type = other DNA
gatcctgccgtgtaccagctgcgggatagcaagagcagcgacaagagcgtgtgtctgttcaccgacttcgacagccagaccaacgtgtcccagagcaaggactccgacgtgtacatcaccgataagtgcgtgctggacatgcggagcatggacttcaagagcaactccgccgtggcctggtccaacaagtccgatttcgcctgcgccaacgccttcaacaacagcattatccccgaggacacattcttcccaagccccgagagcagcgactccaccgaccacgtgaagcccaaagagacagagaacaccaagcagcccagcaagagctgccacaagcccaaggccatcgtgcacaccgagaaagtgaacatgatgagcctgaccgtgctgggcctgcggatgctgttcgccaaaaccgtggccgtgaacttcctgctgaccgccaagctgttcttcctcctcaccgcc

SEQ ID NO: 16828 - DNA, 465 bp, synthetic construct
  source 1..465: mol_type = other DNA
cctgccgtgtaccagctgcgggatagcaagagcagcgacaagagcgtgtgtctgttcaccgacttcgacagccagaccaacgtgtcccagagcaaggactccgacgtgtacatcaccgataagtgcgtgctggacatgcggagcatggacttcaagagcaactccgccgtggcctggtccaacaagtccgatttcgcctgcgccaacgccttcaacaacagcattatccccgaggacacattcttcccaagccccgagagcagcgactccaccgaccacgtgaagcccaaagagacagagaacaccaagcagcccagcaagagctgccacaagcccaaggccatcgtgcacaccgagaaagtgaacatgatgagcctgaccgtgctgggcctgcggatgctgttcgccaaaaccgtggccgtgaacttcctgctgaccgccaagctgttcttcctcctcaccgcc

SEQ ID NO: 16829 - DNA, 462 bp, synthetic construct
  source 1..462: mol_type = other DNA
gccgtgtaccagctgcgggatagcaagagcagcgacaagagcgtgtgtctgttcaccgacttcgacagccagaccaacgtgtcccagagcaaggactccgacgtgtacatcaccgataagtgcgtgctggacatgcggagcatggacttcaagagcaactccgccgtggcctggtccaacaagtccgatttcgcctgcgccaacgccttcaacaacagcattatccccgaggacacattcttcccaagccccgagagcagcgactccaccgaccacgtgaagcccaaagagacagagaacaccaagcagcccagcaagagctgccacaagcccaaggccatcgtgcacaccgagaaagtgaacatgatgagcctgaccgtgctgggcctgcggatgctgttcgccaaaaccgtggccgtgaacttcctgctgaccgccaagctgttcttcctcctcaccgcc

SEQ ID NO: 16830 - DNA, 459 bp, synthetic construct
  source 1..459: mol_type = other DNA
gtgtaccagctgcgggatagcaagagcagcgacaagagcgtgtgtctgttcaccgacttcgacagccagaccaacgtgtcccagagcaaggactccgacgtgtacatcaccgataagtgcgtgctggacatgcggagcatggacttcaagagcaactccgccgtggcctggtccaacaagtccgatttcgcctgcgccaacgccttcaacaacagcattatccccgaggacacattcttcccaagccccgagagcagcgactccaccgaccacgtgaagcccaaagagacagagaacaccaagcagcccagcaagagctgccacaagcccaaggccatcgtgcacaccgagaaagtgaacatgatgagcctgaccgtgctgggcctgcggatgctgttcgccaaaaccgtggccgtgaacttcctgctgaccgccaagctgttcttcctcctcaccgcc

SEQ ID NO: 16831 - DNA, 456 bp, synthetic construct
  source 1..456: mol_type = other DNA
taccagctgcgggatagcaagagcagcgacaagagcgtgtgtctgttcaccgacttcgacagccagaccaacgtgtcccagagcaaggactccgacgtgtacatcaccgataagtgcgtgctggacatgcggagcatggacttcaagagcaactccgccgtggcctggtccaacaagtccgatttcgcctgcgccaacgccttcaacaacagcattatccccgaggacacattcttcccaagccccgagagcagcgactccaccgaccacgtgaagcccaaagagacagagaacaccaagcagcccagcaagagctgccacaagcccaaggccatcgtgcacaccgagaaagtgaacatgatgagcctgaccgtgctgggcctgcggatgctgttcgccaaaaccgtggccgtgaacttcctgctgaccgccaagctgttcttcctcctcaccgcc

SEQ ID NO: 16832 - DNA, 453 bp, synthetic construct
  source 1..453: mol_type = other DNA
cagctgcgggatagcaagagcagcgacaagagcgtgtgtctgttcaccgacttcgacagccagaccaacgtgtcccagagcaaggactccgacgtgtacatcaccgataagtgcgtgctggacatgcggagcatggacttcaagagcaactccgccgtggcctggtccaacaagtccgatttcgcctgcgccaacgccttcaacaacagcattatccccgaggacacattcttcccaagccccgagagcagcgactccaccgaccacgtgaagcccaaagagacagagaacaccaagcagcccagcaagagctgccacaagcccaaggccatcgtgcacaccgagaaagtgaacatgatgagcctgaccgtgctgggcctgcggatgctgttcgccaaaaccgtggccgtgaacttcctgctgaccgccaagctgttcttcctcctcaccgcc

SEQ ID NO: 16833 - DNA, 450 bp, synthetic construct
  source 1..450: mol_type = other DNA
ctgcgggatagcaagagcagcgacaagagcgtgtgtctgttcaccgacttcgacagccagaccaacgtgtcccagagcaaggactccgacgtgtacatcaccgataagtgcgtgctggacatgcggagcatggacttcaagagcaactccgccgtggcctggtccaacaagtccgatttcgcctgcgccaacgccttcaacaacagcattatccccgaggacacattcttcccaagccccgagagcagcgactccaccgaccacgtgaagcccaaagagacagagaacaccaagcagcccagcaagagctgccacaagcccaaggccatcgtgcacaccgagaaagtgaacatgatgagcctgaccgtgctgggcctgcggatgctgttcgccaaaaccgtggccgtgaacttcctgctgaccgccaagctgttcttcctcctcaccgcc

SEQ ID NO: 16834 - DNA, 447 bp, synthetic construct
  source 1..447: mol_type = other DNA
cgggatagcaagagcagcgacaagagcgtgtgtctgttcaccgacttcgacagccagaccaacgtgtcccagagcaaggactccgacgtgtacatcaccgataagtgcgtgctggacatgcggagcatggacttcaagagcaactccgccgtggcctggtccaacaagtccgatttcgcctgcgccaacgccttcaacaacagcattatccccgaggacacattcttcccaagccccgagagcagcgactccaccgaccacgtgaagcccaaagagacagagaacaccaagcagcccagcaagagctgccacaagcccaaggccatcgtgcacaccgagaaagtgaacatgatgagcctgaccgtgctgggcctgcggatgctgttcgccaaaaccgtggccgtgaacttcctgctgaccgccaagctgttcttcctcctcaccgcc

SEQ ID NO: 16835 - DNA, 444 bp, synthetic construct
  source 1..444: mol_type = other DNA
gatagcaagagcagcgacaagagcgtgtgtctgttcaccgacttcgacagccagaccaacgtgtcccagagcaaggactccgacgtgtacatcaccgataagtgcgtgctggacatgcggagcatggacttcaagagcaactccgccgtggcctggtccaacaagtccgatttcgcctgcgccaacgccttcaacaacagcattatccccgaggacacattcttcccaagccccgagagcagcgactccaccgaccacgtgaagcccaaagagacagagaacaccaagcagcccagcaagagctgccacaagcccaaggccatcgtgcacaccgagaaagtgaacatgatgagcctgaccgtgctgggcctgcggatgctgttcgccaaaaccgtggccgtgaacttcctgctgaccgccaagctgttcttcctcctcaccgcc

SEQ ID NO: 16836 - DNA, 441 bp, synthetic construct
  source 1..441: mol_type = other DNA
agcaagagcagcgacaagagcgtgtgtctgttcaccgacttcgacagccagaccaacgtgtcccagagcaaggactccgacgtgtacatcaccgataagtgcgtgctggacatgcggagcatggacttcaagagcaactccgccgtggcctggtccaacaagtccgatttcgcctgcgccaacgccttcaacaacagcattatccccgaggacacattcttcccaagccccgagagcagcgactccaccgaccacgtgaagcccaaagagacagagaacaccaagcagcccagcaagagctgccacaagcccaaggccatcgtgcacaccgagaaagtgaacatgatgagcctgaccgtgctgggcctgcggatgctgttcgccaaaaccgtggccgtgaacttcctgctgaccgccaagctgttcttcctcctcaccgcc

SEQ ID NO: 16837 - DNA, 438 bp, synthetic construct
  source 1..438: mol_type = other DNA
aagagcagcgacaagagcgtgtgtctgttcaccgacttcgacagccagaccaacgtgtcccagagcaaggactccgacgtgtacatcaccgataagtgcgtgctggacatgcggagcatggacttcaagagcaactccgccgtggcctggtccaacaagtccgatttcgcctgcgccaacgccttcaacaacagcattatccccgaggacacattcttcccaagccccgagagcagcgactccaccgaccacgtgaagcccaaagagacagagaacaccaagcagcccagcaagagctgccacaagcccaaggccatcgtgcacaccgagaaagtgaacatgatgagcctgaccgtgctgggcctgcggatgctgttcgccaaaaccgtggccgtgaacttcctgctgaccgccaagctgttcttcctcctcaccgcc

SEQ ID NO: 16838 - DNA, 435 bp, synthetic construct
  source 1..435: mol_type = other DNA
agcagcgacaagagcgtgtgtctgttcaccgacttcgacagccagaccaacgtgtcccagagcaaggactccgacgtgtacatcaccgataagtgcgtgctggacatgcggagcatggacttcaagagcaactccgccgtggcctggtccaacaagtccgatttcgcctgcgccaacgccttcaacaacagcattatccccgaggacacattcttcccaagccccgagagcagcgactccaccgaccacgtgaagcccaaagagacagagaacaccaagcagcccagcaagagctgccacaagcccaaggccatcgtgcacaccgagaaagtgaacatgatgagcctgaccgtgctgggcctgcggatgctgttcgccaaaaccgtggccgtgaacttcctgctgaccgccaagctgttcttcctcctcaccgcc

SEQ ID NO: 16839 - DNA, 432 bp, synthetic construct
  source 1..432: mol_type = other DNA
agcgacaagagcgtgtgtctgttcaccgacttcgacagccagaccaacgtgtcccagagcaaggactccgacgtgtacatcaccgataagtgcgtgctggacatgcggagcatggacttcaagagcaactccgccgtggcctggtccaacaagtccgatttcgcctgcgccaacgccttcaacaacagcattatccccgaggacacattcttcccaagccccgagagcagcgactccaccgaccacgtgaagcccaaagagacagagaacaccaagcagcccagcaagagctgccacaagcccaaggccatcgtgcacaccgagaaagtgaacatgatgagcctgaccgtgctgggcctgcggatgctgttcgccaaaaccgtggccgtgaacttcctgctgaccgccaagctgttcttcctcctcaccgcc

SEQ ID NO: 16840 - DNA, 429 bp, synthetic construct
  source 1..429: mol_type = other DNA
gacaagagcgtgtgtctgttcaccgacttcgacagccagaccaacgtgtcccagagcaaggactccgacgtgtacatcaccgataagtgcgtgctggacatgcggagcatggacttcaagagcaactccgccgtggcctggtccaacaagtccgatttcgcctgcgccaacgccttcaacaacagcattatccccgaggacacattcttcccaagccccgagagcagcgactccaccgaccacgtgaagcccaaagagacagagaacaccaagcagcccagcaagagctgccacaagcccaaggccatcgtgcacaccgagaaagtgaacatgatgagcctgaccgtgctgggcctgcggatgctgttcgccaaaaccgtggccgtgaacttcctgctgaccgccaagctgttcttcctcctcaccgcc

SEQ ID NO: 16841 - DNA, 426 bp, synthetic construct
  source 1..426: mol_type = other DNA
aagagcgtgtgtctgttcaccgacttcgacagccagaccaacgtgtcccagagcaaggactccgacgtgtacatcaccgataagtgcgtgctggacatgcggagcatggacttcaagagcaactccgccgtggcctggtccaacaagtccgatttcgcctgcgccaacgccttcaacaacagcattatccccgaggacacattcttcccaagccccgagagcagcgactccaccgaccacgtgaagcccaaagagacagagaacaccaagcagcccagcaagagctgccacaagcccaaggccatcgtgcacaccgagaaagtgaacatgatgagcctgaccgtgctgggcctgcggatgctgttcgccaaaaccgtggccgtgaacttcctgctgaccgccaagctgttcttcctcctcaccgcc

SEQ ID NO: 16842 - DNA, 423 bp, synthetic construct
  source 1..423: mol_type = other DNA
agcgtgtgtctgttcaccgacttcgacagccagaccaacgtgtcccagagcaaggactccgacgtgtacatcaccgataagtgcgtgctggacatgcggagcatggacttcaagagcaactccgccgtggcctggtccaacaagtccgatttcgcctgcgccaacgccttcaacaacagcattatccccgaggacacattcttcccaagccccgagagcagcgactccaccgaccacgtgaagcccaaagagacagagaacaccaagcagcccagcaagagctgccacaagcccaaggccatcgtgcacaccgagaaagtgaacatgatgagcctgaccgtgctgggcctgcggatgctgttcgccaaaaccgtggccgtgaacttcctgctgaccgccaagctgttcttcctcctcaccgcc

SEQ ID NO: 16843 - DNA, 420 bp, synthetic construct
  source 1..420: mol_type = other DNA
gtgtgtctgttcaccgacttcgacagccagaccaacgtgtcccagagcaaggactccgacgtgtacatcaccgataagtgcgtgctggacatgcggagcatggacttcaagagcaactccgccgtggcctggtccaacaagtccgatttcgcctgcgccaacgccttcaacaacagcattatccccgaggacacattcttcccaagccccgagagcagcgactccaccgaccacgtgaagcccaaagagacagagaacaccaagcagcccagcaagagctgccacaagcccaaggccatcgtgcacaccgagaaagtgaacatgatgagcctgaccgtgctgggcctgcggatgctgttcgccaaaaccgtggccgtgaacttcctgctgaccgccaagctgttcttcctcctcaccgcc

SEQ ID NO: 16844 - DNA, 405 bp, synthetic construct
  source 1..405: mol_type = other DNA
gacttcgacagccagaccaacgtgtcccagagcaaggactccgacgtgtacatcaccgataagtgcgtgctggacatgcggagcatggacttcaagagcaactccgccgtggcctggtccaacaagtccgatttcgcctgcgccaacgccttcaacaacagcattatccccgaggacacattcttcccaagccccgagagcagcgactccaccgaccacgtgaagcccaaagagacagagaacaccaagcagcccagcaagagctgccacaagcccaaggccatcgtgcacaccgagaaagtgaacatgatgagcctgaccgtgctgggcctgcggatgctgttcgccaaaaccgtggccgtgaacttcctgctgaccgccaagctgttcttcctcctcaccgcc

SEQ ID NO: 16845 - DNA, 390 bp, synthetic construct
  source 1..390: mol_type = other DNA
accaacgtgtcccagagcaaggactccgacgtgtacatcaccgataagtgcgtgctggacatgcggagcatggacttcaagagcaactccgccgtggcctggtccaacaagtccgatttcgcctgcgccaacgccttcaacaacagcattatccccgaggacacattcttcccaagccccgagagcagcgactccaccgaccacgtgaagcccaaagagacagagaacaccaagcagcccagcaagagctgccacaagcccaaggccatcgtgcacaccgagaaagtgaacatgatgagcctgaccgtgctgggcctgcggatgctgttcgccaaaaccgtggccgtgaacttcctgctgaccgccaagctgttcttcctcctcaccgcc

SEQ ID NO: 16846 - DNA, 471 bp, synthetic construct; identical to SEQ ID NO: 541
  source 1..471: mol_type = other DNA

SEQ ID NO: 16847 - DNA, 468 bp, synthetic construct
  source 1..468: mol_type = other DNA
cagaaccctgatcctgccgtgtaccagctgcgggatagcaagagcagcgacaagagcgtgtgtctgttcaccgacttcgacagccagaccaacgtgtcccagagcaaggactccgacgtgtacatcaccgataagtgcgtgctggacatgcggagcatggacttcaagagcaactccgccgtggcctggtccaacaagtccgatttcgcctgcgccaacgccttcaacaacagcattatccccgaggacacattcttcccaagccccgagagcagcgactccaccgaccacgtgaagcccaaagagacagagaacaccaagcagcccagcaagagctgccacaagcccaaggccatcgtgcacaccgagaaagtgaacatgatgagcctgaccgtgctgggcctgcggatgctgttcgccaaaaccgtggccgtgaacttcctgctgaccgccaagctgttcttcctc

SEQ ID NO: 16848 - DNA, 465 bp, synthetic construct
  source 1..465: mol_type = other DNA
aaccctgatcctgccgtgtaccagctgcgggatagcaagagcagcgacaagagcgtgtgtctgttcaccgacttcgacagccagaccaacgtgtcccagagcaaggactccgacgtgtacatcaccgataagtgcgtgctggacatgcggagcatggacttcaagagcaactccgccgtggcctggtccaacaagtccgatttcgcctgcgccaacgccttcaacaacagcattatccccgaggacacattcttcccaagccccgagagcagcgactccaccgaccacgtgaagcccaaagagacagagaacaccaagcagcccagcaagagctgccacaagcccaaggccatcgtgcacaccgagaaagtgaacatgatgagcctgaccgtgctgggcctgcggatgctgttcgccaaaaccgtggccgtgaacttcctgctgaccgccaagctgttcttcctc

SEQ ID NO: 16849 - DNA, 462 bp, synthetic construct
  source 1..462: mol_type = other DNA
cctgatcctgccgtgtaccagctgcgggatagcaagagcagcgacaagagcgtgtgtctgttcaccgacttcgacagccagaccaacgtgtcccagagcaaggactccgacgtgtacatcaccgataagtgcgtgctggacatgcggagcatggacttcaagagcaactccgccgtggcctggtccaacaagtccgatttcgcctgcgccaacgccttcaacaacagcattatccccgaggacacattcttcccaagccccgagagcagcgactccaccgaccacgtgaagcccaaagagacagagaacaccaagcagcccagcaagagctgccacaagcccaaggccatcgtgcacaccgagaaagtgaacatgatgagcctgaccgtgctgggcctgcggatgctgttcgccaaaaccgtggccgtgaacttcctgctgaccgccaagctgttcttcctc

SEQ ID NO: 16850 - DNA, 459 bp, synthetic construct
  source 1..459: mol_type = other DNA
gatcctgccgtgtaccagctgcgggatagcaagagcagcgacaagagcgtgtgtctgttcaccgacttcgacagccagaccaacgtgtcccagagcaaggactccgacgtgtacatcaccgataagtgcgtgctggacatgcggagcatggacttcaagagcaactccgccgtggcctggtccaacaagtccgatttcgcctgcgccaacgccttcaacaacagcattatccccgaggacacattcttcccaagccccgagagcagcgactccaccgaccacgtgaagcccaaagagacagagaacaccaagcagcccagcaagagctgccacaagcccaaggccatcgtgcacaccgagaaagtgaacatgatgagcctgaccgtgctgggcctgcggatgctgttcgccaaaaccgtggccgtgaacttcctgctgaccgccaagctgttcttcctc

SEQ ID NO: 16851 - DNA, 456 bp, synthetic construct
  source 1..456: mol_type = other DNA
cctgccgtgtaccagctgcgggatagcaagagcagcgacaagagcgtgtgtctgttcaccgacttcgacagccagaccaacgtgtcccagagcaaggactccgacgtgtacatcaccgataagtgcgtgctggacatgcggagcatggacttcaagagcaactccgccgtggcctggtccaacaagtccgatttcgcctgcgccaacgccttcaacaacagcattatccccgaggacacattcttcccaagccccgagagcagcgactccaccgaccacgtgaagcccaaagagacagagaacaccaagcagcccagcaagagctgccacaagcccaaggccatcgtgcacaccgagaaagtgaacatgatgagcctgaccgtgctgggcctgcggatgctgttcgccaaaaccgtggccgtgaacttcctgctgaccgccaagctgttcttcctc

SEQ ID NO: 16852 - DNA, 453 bp, synthetic construct
  source 1..453: mol_type = other DNA
gccgtgtaccagctgcgggatagcaagagcagcgacaagagcgtgtgtctgttcaccgacttcgacagccagaccaacgtgtcccagagcaaggactccgacgtgtacatcaccgataagtgcgtgctggacatgcggagcatggacttcaagagcaactccgccgtggcctggtccaacaagtccgatttcgcctgcgccaacgccttcaacaacagcattatccccgaggacacattcttcccaagccccgagagcagcgactccaccgaccacgtgaagcccaaagagacagagaacaccaagcagcccagcaagagctgccacaagcccaaggccatcgtgcacaccgagaaagtgaacatgatgagcctgaccgtgctgggcctgcggatgctgttcgccaaaaccgtggccgtgaacttcctgctgaccgccaagctgttcttcctc

SEQ ID NO: 16853 - DNA, 450 bp, synthetic construct
  source 1..450: mol_type = other DNA
gtgtaccagctgcgggatagcaagagcagcgacaagagcgtgtgtctgttcaccgacttcgacagccagaccaacgtgtcccagagcaaggactccgacgtgtacatcaccgataagtgcgtgctggacatgcggagcatggacttcaagagcaactccgccgtggcctggtccaacaagtccgatttcgcctgcgccaacgccttcaacaacagcattatccccgaggacacattcttcccaagccccgagagcagcgactccaccgaccacgtgaagcccaaagagacagagaacaccaagcagcccagcaagagctgccacaagcccaaggccatcgtgcacaccgagaaagtgaacatgatgagcctgaccgtgctgggcctgcggatgctgttcgccaaaaccgtggccgtgaacttcctgctgaccgccaagctgttcttcctc

SEQ ID NO: 16854 - DNA, 447 bp, synthetic construct
  source 1..447: mol_type = other DNA
taccagctgcgggatagcaagagcagcgacaagagcgtgtgtctgttcaccgacttcgacagccagaccaacgtgtcccagagcaaggactccgacgtgtacatcaccgataagtgcgtgctggacatgcggagcatggacttcaagagcaactccgccgtggcctggtccaacaagtccgatttcgcctgcgccaacgccttcaacaacagcattatccccgaggacacattcttcccaagccccgagagcagcgactccaccgaccacgtgaagcccaaagagacagagaacaccaagcagcccagcaagagctgccacaagcccaaggccatcgtgcacaccgagaaagtgaacatgatgagcctgaccgtgctgggcctgcggatgctgttcgccaaaaccgtggccgtgaacttcctgctgaccgccaagctgttcttcctc

SEQ ID NO: 16855 - DNA, 444 bp, synthetic construct
  source 1..444: mol_type = other DNA
cagctgcgggatagcaagagcagcgacaagagcgtgtgtctgttcaccgacttcgacagccagaccaacgtgtcccagagcaaggactccgacgtgtacatcaccgataagtgcgtgctggacatgcggagcatggacttcaagagcaactccgccgtggcctggtccaacaagtccgatttcgcctgcgccaacgccttcaacaacagcattatccccgaggacacattcttcccaagccccgagagcagcgactccaccgaccacgtgaagcccaaagagacagagaacaccaagcagcccagcaagagctgccacaagcccaaggccatcgtgcacaccgagaaagtgaacatgatgagcctgaccgtgctgggcctgcggatgctgttcgccaaaaccgtggccgtgaacttcctgctgaccgccaagctgttcttcctc

SEQ ID NO: 16856 - DNA, 441 bp, synthetic construct
  source 1..441: mol_type = other DNA
ctgcgggatagcaagagcagcgacaagagcgtgtgtctgttcaccgacttcgacagccagaccaacgtgtcccagagcaaggactccgacgtgtacatcaccgataagtgcgtgctggacatgcggagcatggacttcaagagcaactccgccgtggcctggtccaacaagtccgatttcgcctgcgccaacgccttcaacaacagcattatccccgaggacacattcttcccaagccccgagagcagcgactccaccgaccacgtgaagcccaaagagacagagaacaccaagcagcccagcaagagctgccacaagcccaaggccatcgtgcacaccgagaaagtgaacatgatgagcctgaccgtgctgggcctgcggatgctgttcgccaaaaccgtggccgtgaacttcctgctgaccgccaagctgttcttcctc

SEQ ID NO: 16857 - DNA, 438 bp, synthetic construct
  source 1..438: mol_type = other DNA
cgggatagcaagagcagcgacaagagcgtgtgtctgttcaccgacttcgacagccagaccaacgtgtcccagagcaaggactccgacgtgtacatcaccgataagtgcgtgctggacatgcggagcatggacttcaagagcaactccgccgtggcctggtccaacaagtccgatttcgcctgcgccaacgccttcaacaacagcattatccccgaggacacattcttcccaagccccgagagcagcgactccaccgaccacgtgaagcccaaagagacagagaacaccaagcagcccagcaagagctgccacaagcccaaggccatcgtgcacaccgagaaagtgaacatgatgagcctgaccgtgctgggcctgcggatgctgttcgccaaaaccgtggccgtgaacttcctgctgaccgccaagctgttcttcctc

SEQ ID NO: 16858 - DNA, 435 bp, synthetic construct
  source 1..435: mol_type = other DNA
gatagcaagagcagcgacaagagcgtgtgtctgttcaccgacttcgacagccagaccaacgtgtcccagagcaaggactccgacgtgtacatcaccgataagtgcgtgctggacatgcggagcatggacttcaagagcaactccgccgtggcctggtccaacaagtccgatttcgcctgcgccaacgccttcaacaacagcattatccccgaggacacattcttcccaagccccgagagcagcgactccaccgaccacgtgaagcccaaagagacagagaacaccaagcagcccagcaagagctgccacaagcccaaggccatcgtgcacaccgagaaagtgaacatgatgagcctgaccgtgctgggcctgcggatgctgttcgccaaaaccgtggccgtgaacttcctgctgaccgccaagctgttcttcctc

SEQ ID NO: 16859 - DNA, 432 bp, synthetic construct
  source 1..432: mol_type = other DNA
agcaagagcagcgacaagagcgtgtgtctgttcaccgacttcgacagccagaccaacgtgtcccagagcaaggactccgacgtgtacatcaccgataagtgcgtgctggacatgcggagcatggacttcaagagcaactccgccgtggcctggtccaacaagtccgatttcgcctgcgccaacgccttcaacaacagcattatccccgaggacacattcttcccaagccccgagagcagcgactccaccgaccacgtgaagcccaaagagacagagaacaccaagcagcccagcaagagctgccacaagcccaaggccatcgtgcacaccgagaaagtgaacatgatgagcctgaccgtgctgggcctgcggatgctgttcgccaaaaccgtggccgtgaacttcctgctgaccgccaagctgttcttcctc

SEQ ID NO: 16860 - DNA, 429 bp, synthetic construct
  source 1..429: mol_type = other DNA
aagagcagcgacaagagcgtgtgtctgttcaccgacttcgacagccagaccaacgtgtcccagagcaaggactccgacgtgtacatcaccgataagtgcgtgctggacatgcggagcatggacttcaagagcaactccgccgtggcctggtccaacaagtccgatttcgcctgcgccaacgccttcaacaacagcattatccccgaggacacattcttcccaagccccgagagcagcgactccaccgaccacgtgaagcccaaagagacagagaacaccaagcagcccagcaagagctgccacaagcccaaggccatcgtgcacaccgagaaagtgaacatgatgagcctgaccgtgctgggcctgcggatgctgttcgccaaaaccgtggccgtgaacttcctgctgaccgccaagctgttcttcctc

SEQ ID NO: 16861 - DNA, 426 bp, synthetic construct
  source 1..426: mol_type = other DNA
agcagcgacaagagcgtgtgtctgttcaccgacttcgacagccagaccaacgtgtcccagagcaaggactccgacgtgtacatcaccgataagtgcgtgctggacatgcggagcatggacttcaagagcaactccgccgtggcctggtccaacaagtccgatttcgcctgcgccaacgccttcaacaacagcattatccccgaggacacattcttcccaagccccgagagcagcgactccaccgaccacgtgaagcccaaagagacagagaacaccaagcagcccagcaagagctgccacaagcccaaggccatcgtgcacaccgagaaagtgaacatgatgagcctgaccgtgctgggcctgcggatgctgttcgccaaaaccgtggccgtgaacttcctgctgaccgccaagctgttcttcctc

SEQ ID NO: 16862 - DNA, 423 bp, synthetic construct
  source 1..423: mol_type = other DNA
agcgacaagagcgtgtgtctgttcaccgacttcgacagccagaccaacgtgtcccagagcaaggactccgacgtgtacatcaccgataagtgcgtgctggacatgcggagcatggacttcaagagcaactccgccgtggcctggtccaacaagtccgatttcgcctgcgccaacgccttcaacaacagcattatccccgaggacacattcttcccaagccccgagagcagcgactccaccgaccacgtgaagcccaaagagacagagaacaccaagcagcccagcaagagctgccacaagcccaaggccatcgtgcacaccgagaaagtgaacatgatgagcctgaccgtgctgggcctgcggatgctgttcgccaaaaccgtggccgtgaacttcctgctgaccgccaagctgttcttcctc

SEQ ID NO: 16863 - DNA, 420 bp, synthetic construct
  source 1..420: mol_type = other DNA
gacaagagcgtgtgtctgttcaccgacttcgacagccagaccaacgtgtcccagagcaaggactccgacgtgtacatcaccgataagtgcgtgctggacatgcggagcatggacttcaagagcaactccgccgtggcctggtccaacaagtccgatttcgcctgcgccaacgccttcaacaacagcattatccccgaggacacattcttcccaagccccgagagcagcgactccaccgaccacgtgaagcccaaagagacagagaacaccaagcagcccagcaagagctgccacaagcccaaggccatcgtgcacaccgagaaagtgaacatgatgagcctgaccgtgctgggcctgcggatgctgttcgccaaaaccgtggccgtgaacttcctgctgaccgccaagctgttcttcctc

SEQ ID NO: 16864 - DNA, 417 bp, synthetic construct
  source 1..417: mol_type = other DNA
aagagcgtgtgtctgttcaccgacttcgacagccagaccaacgtgtcccagagcaaggactccgacgtgtacatcaccgataagtgcgtgctggacatgcggagcatggacttcaagagcaactccgccgtggcctggtccaacaagtccgatttcgcctgcgccaacgccttcaacaacagcattatccccgaggacacattcttcccaagccccgagagcagcgactccaccgaccacgtgaagcccaaagagacagagaacaccaagcagcccagcaagagctgccacaagcccaaggccatcgtgcacaccgagaaagtgaacatgatgagcctgaccgtgctgggcctgcggatgctgttcgccaaaaccgtggccgtgaacttcctgctgaccgccaagctgttcttcctc

SEQ ID NO: 16865 - DNA, 414 bp, synthetic construct
  source 1..414: mol_type = other DNA
agcgtgtgtctgttcaccgacttcgacagccagaccaacgtgtcccagagcaaggactccgacgtgtacatcaccgataagtgcgtgctggacatgcggagcatggacttcaagagcaactccgccgtggcctggtccaacaagtccgatttcgcctgcgccaacgccttcaacaacagcattatccccgaggacacattcttcccaagccccgagagcagcgactccaccgaccacgtgaagcccaaagagacagagaacaccaagcagcccagcaagagctgccacaagcccaaggccatcgtgcacaccgagaaagtgaacatgatgagcctgaccgtgctgggcctgcggatgctgttcgccaaaaccgtggccgtgaacttcctgctgaccgccaagctgttcttcctc

SEQ ID NO: 16866 - DNA, 411 bp, synthetic construct
  source 1..411: mol_type = other DNA
gtgtgtctgttcaccgacttcgacagccagaccaacgtgtcccagagcaaggactccgacgtgtacatcaccgataagtgcgtgctggacatgcggagcatggacttcaagagcaactccgccgtggcctggtccaacaagtccgatttcgcctgcgccaacgccttcaacaacagcattatccccgaggacacattcttcccaagccccgagagcagcgactccaccgaccacgtgaagcccaaagagacagagaacaccaagcagcccagcaagagctgccacaagcccaaggccatcgtgcacaccgagaaagtgaacatgatgagcctgaccgtgctgggcctgcggatgctgttcgccaaaaccgtggccgtgaacttcctgctgaccgccaagctgttcttcctc

SEQ ID NO: 16867 - DNA, 396 bp, synthetic construct
  source 1..396: mol_type = other DNA
gacttcgacagccagaccaacgtgtcccagagcaaggactccgacgtgtacatcaccgataagtgcgtgctggacatgcggagcatggacttcaagagcaactccgccgtggcctggtccaacaagtccgatttcgcctgcgccaacgccttcaacaacagcattatccccgaggacacattcttcccaagccccgagagcagcgactccaccgaccacgtgaagcccaaagagacagagaacaccaagcagcccagcaagagctgccacaagcccaaggccatcgtgcacaccgagaaagtgaacatgatgagcctgaccgtgctgggcctgcggatgctgttcgccaaaaccgtggccgtgaacttcctgctgaccgccaagctgttcttcctc

SEQ ID NO: 16868 - DNA, 381 bp, synthetic construct
  source 1..381: mol_type = other DNA
accaacgtgtcccagagcaaggactccgacgtgtacatcaccgataagtgcgtgctggacatgcggagcatggacttcaagagcaactccgccgtggcctggtccaacaagtccgatttcgcctgcgccaacgccttcaacaacagcattatccccgaggacacattcttcccaagccccgagagcagcgactccaccgaccacgtgaagcccaaagagacagagaacaccaagcagcccagcaagagctgccacaagcccaaggccatcgtgcacaccgagaaagtgaacatgatgagcctgaccgtgctgggcctgcggatgctgttcgccaaaaccgtggccgtgaacttcctgctgaccgccaagctgttcttcctc

SEQ ID NO: 16869 - DNA, 519 bp, synthetic construct
  source 1..519: mol_type = other DNA
ggacagcctaaggccaatcctaccgtgacactgttccctccaagcagcgaagaactccaggccaacaaggccacacttgtgtgcctgatctccgacttctaccctggggctgtgacagtggcttggaaggccgatggatctcctgtgaaagccggcgtggaaaccaccaagccatccaagcagagcaacaacaaatacgccgccagctcctacctgagcctgacacctgagcagtggaagtcccacagatcctacagctgccaagtgacccacgaaggcagcaccgtggaaaagacagtggcccctacagagtgcagccccatcaagaccgatgtgattacaatggaccccaaggacaactgctccaaggacgccaacgataccctgctgctccagctgaccaacaccagcgcctactacatgtacttgttgctgctgctgaagtccgtggtgtacttcgccatcatcacatgctgcctgctgcggagaaccgccttctgctgcaacggcgagaagtct

SEQ ID NO: 16870 - DNA, 516 bp, synthetic construct
  source 1..516: mol_type = other DNA
cagcctaaggccaatcctaccgtgacactgttccctccaagcagcgaagaactccaggccaacaaggccacacttgtgtgcctgatctccgacttctaccctggggctgtgacagtggcttggaaggccgatggatctcctgtgaaagccggcgtggaaaccaccaagccatccaagcagagcaacaacaaatacgccgccagctcctacctgagcctgacacctgagcagtggaagtcccacagatcctacagctgccaagtgacccacgaaggcagcaccgtggaaaagacagtggcccctacagagtgcagccccatcaagaccgatgtgattacaatggaccccaaggacaactgctccaaggacgccaacgataccctgctgctccagctgaccaacaccagcgcctactacatgtacttgttgctgctgctgaagtccgtggtgtacttcgccatcatcacatgctgcctgctgcggagaaccgccttctgctgcaacggcgagaagtct

SEQ ID NO: 16871 - DNA, 513 bp, synthetic construct
  source 1..513: mol_type = other DNA
cctaaggccaatcctaccgtgacactgttccctccaagcagcgaagaactccaggccaacaaggccacacttgtgtgcctgatctccgacttctaccctggggctgtgacagtggcttggaaggccgatggatctcctgtgaaagccggcgtggaaaccaccaagccatccaagcagagcaacaacaaatacgccgccagctcctacctgagcctgacacctgagcagtggaagtcccacagatcctacagctgccaagtgacccacgaaggcagcaccgtggaaaagacagtggcccctacagagtgcagccccatcaagaccgatgtgattacaatggaccccaaggacaactgctccaaggacgccaacgataccctgctgctccagctgaccaacaccagcgcctactacatgtacttgttgctgctgctgaagtccgtggtgtacttcgccatcatcacatgctgcctgctgcggagaaccgccttctgctgcaacggcgagaagtct

SEQ ID NO: 16872 - DNA, 510 bp, synthetic construct
  source 1..510: mol_type = other DNA
aaggccaatcctaccgtgacactgttccctccaagcagcgaagaactccaggccaacaaggccacacttgtgtgcctgatctccgacttctaccctggggctgtgacagtggcttggaaggccgatggatctcctgtgaaagccggcgtggaaaccaccaagccatccaagcagagcaacaacaaatacgccgccagctcctacctgagcctgacacctgagcagtggaagtcccacagatcctacagctgccaagtgacccacgaaggcagcaccgtggaaaagacagtggcccctacagagtgcagccccatcaagaccgatgtgattacaatggaccccaaggacaactgctccaaggacgccaacgataccctgctgctccagctgaccaacaccagcgcctactacatgtacttgttgctgctgctgaagtccgtggtgtacttcgccatcatcacatgctgcctgctgcggagaaccgccttctgctgcaacggcgagaagtct

SEQ ID NO: 16873 - DNA, 507 bp, synthetic construct
  source 1..507: mol_type = other DNA
gccaatcctaccgtgacactgttccctccaagcagcgaagaactccaggccaacaaggccacacttgtgtgcctgatctccgacttctaccctggggctgtgacagtggcttggaaggccgatggatctcctgtgaaagccggcgtggaaaccaccaagccatccaagcagagcaacaacaaatacgccgccagctcctacctgagcctgacacctgagcagtggaagtcccacagatcctacagctgccaagtgacccacgaaggcagcaccgtggaaaagacagtggcccctacagagtgcagccccatcaagaccgatgtgattacaatggaccccaaggacaactgctccaaggacgccaacgataccctgctgctccagctgaccaacaccagcgcctactacatgtacttgttgctgctgctgaagtccgtggtgtacttcgccatcatcacatgctgcctgctgcggagaaccgccttctgctgcaacggcgagaagtct

SEQ ID NO: 16874 - DNA, 504 bp, synthetic construct
  source 1..504: mol_type = other DNA
aatcctaccgtgacactgttccctccaagcagcgaagaactccaggccaacaaggccacacttgtgtgcctgatctccgacttctaccctggggctgtgacagtggcttggaaggccgatggatctcctgtgaaagccggcgtggaaaccaccaagccatccaagcagagcaacaacaaatacgccgccagctcctacctgagcctgacacctgagcagtggaagtcccacagatcctacagctgccaagtgacccacgaaggcagcaccgtggaaaagacagtggcccctacagagtgcagccccatcaagaccgatgtgattacaatggaccccaaggacaactgctccaaggacgccaacgataccctgctgctccagctgaccaacaccagcgcctactacatgtacttgttgctgctgctgaagtccgtggtgtacttcgccatcatcacatgctgcctgctgcggagaaccgccttctgctgcaacggcgagaagtct

SEQ ID NO: 16875 - DNA, 501 bp, synthetic construct
  source 1..501: mol_type = other DNA
cctaccgtgacactgttccctccaagcagcgaagaactccaggccaacaaggccacacttgtgtgcctgatctccgacttctaccctggggctgtgacagtggcttggaaggccgatggatctcctgtgaaagccggcgtggaaaccaccaagccatccaagcagagcaacaacaaatacgccgccagctcctacctgagcctgacacctgagcagtggaagtcccacagatcctacagctgccaagtgacccacgaaggcagcaccgtggaaaagacagtggcccctacagagtgcagccccatcaagaccgatgtgattacaatggaccccaaggacaactgctccaaggacgccaacgataccctgctgctccagctgaccaacaccagcgcctactacatgtacttgttgctgctgctgaagtccgtggtgtacttcgccatcatcacatgctgcctgctgcggagaaccgccttctgctgcaacggcgagaagtct

SEQ ID NO: 16876 - DNA, 498 bp, synthetic construct
  source 1..498: mol_type = other DNA
accgtgacactgttccctccaagcagcgaagaactccaggccaacaaggccacacttgtgtgcctgatctccgacttctaccctggggctgtgacagtggcttggaaggccgatggatctcctgtgaaagccggcgtggaaaccaccaagccatccaagcagagcaacaacaaatacgccgccagctcctacctgagcctgacacctgagcagtggaagtcccacagatcctacagctgccaagtgacccacgaaggcagcaccgtggaaaagacagtggcccctacagagtgcagccccatcaagaccgatgtgattacaatggaccccaaggacaactgctccaaggacgccaacgataccctgctgctccagctgaccaacaccagcgcctactacatgtacttgttgctgctgctgaagtccgtggtgtacttcgccatcatcacatgctgcctgctgcggagaaccgccttctgctgcaacggcgagaagtct

SEQ ID NO: 16877 - DNA, 495 bp, synthetic construct
  source 1..495: mol_type = other DNA
gtgacactgttccctccaagcagcgaagaactccaggccaacaaggccacacttgtgtgcctgatctccgacttctaccctggggctgtgacagtggcttggaaggccgatggatctcctgtgaaagccggcgtggaaaccaccaagccatccaagcagagcaacaacaaatacgccgccagctcctacctgagcctgacacctgagcagtggaagtcccacagatcctacagctgccaagtgacccacgaaggcagcaccgtggaaaagacagtggcccctacagagtgcagccccatcaagaccgatgtgattacaatggaccccaaggacaactgctccaaggacgccaacgataccctgctgctccagctgaccaacaccagcgcctactacatgtacttgttgctgctgctgaagtccgtggtgtacttcgccatcatcacatgctgcctgctgcggagaaccgccttctgctgcaacggcgagaagtct

SEQ ID NO: 16878 - DNA, 492 bp, synthetic construct
  source 1..492: mol_type = other DNA
acactgttccctccaagcagcgaagaactccaggccaacaaggccacacttgtgtgcctgatctccgacttctaccctggggctgtgacagtggcttggaaggccgatggatctcctgtgaaagccggcgtggaaaccaccaagccatccaagcagagcaacaacaaatacgccgccagctcctacctgagcctgacacctgagcagtggaagtcccacagatcctacagctgccaagtgacccacgaaggcagcaccgtggaaaagacagtggcccctacagagtgcagccccatcaagaccgatgtgattacaatggaccccaaggacaactgctccaaggacgccaacgataccctgctgctccagctgaccaacaccagcgcctactacatgtacttgttgctgctgctgaagtccgtggtgtacttcgccatcatcacatgctgcctgctgcggagaaccgccttctgctgcaacggcgagaagtct

SEQ ID NO: 16879 - DNA, 489 bp, synthetic construct
  source 1..489: mol_type = other DNA
ctgttccctccaagcagcgaagaactccaggccaacaaggccacacttgtgtgcctgatctccgacttctaccctggggctgtgacagtggcttggaaggccgatggatctcctgtgaaagccggcgtggaaaccaccaagccatccaagcagagcaacaacaaatacgccgccagctcctacctgagcctgacacctgagcagtggaagtcccacagatcctacagctgccaagtgacccacgaaggcagcaccgtggaaaagacagtggcccctacagagtgcagccccatcaagaccgatgtgattacaatggaccccaaggacaactgctccaaggacgccaacgataccctgctgctccagctgaccaacaccagcgcctactacatgtacttgttgctgctgctgaagtccgtggtgtacttcgccatcatcacatgctgcctgctgcggagaaccgccttctgctgcaacggcgagaagtct

SEQ ID NO: 16880 - DNA, 522 bp, synthetic construct
  source 1..522: mol_type = other DNA
ggacagcctaaggccaatcctaccgtgacactgttccctccaagcagcgaagaactccaggccaacaaggccacacttgtgtgcctgatctccgacttctaccctggggctgtgacagtggcttggaaggccgatggatctcctgtgaaagccggcgtggaaaccaccaagccatccaagcagagcaacaacaaatacgccgccagctcctacctgagcctgacacctgagcagtggaagtcccacagatcctacagctgccaagtgacccacgaaggcagcaccgtggaaaagacagtggcccctacagagtgcagcgaagtgaaaaccgactccaccgaccacgtgaagcccaaagagacagagaacaccaagcagcccagcaagagctgccacaagcccaaggccatcgtgcacaccgagaaagtgaacatgatgagcctgaccgtgctgggcctgcggatgctgttcgccaaaaccgtggccgtgaacttcctgctgaccgccaagctgttcttcctc

SEQ ID NO: 16881 - DNA, 519 bp, synthetic construct
  source 1..519: mol_type = other DNA
cagcctaaggccaatcctaccgtgacactgttccctccaagcagcgaagaactccaggccaacaaggccacacttgtgtgcctgatctccgacttctaccctggggctgtgacagtggcttggaaggccgatggatctcctgtgaaagccggcgtggaaaccaccaagccatccaagcagagcaacaacaaatacgccgccagctcctacctgagcctgacacctgagcagtggaagtcccacagatcctacagctgccaagtgacccacgaaggcagcaccgtggaaaagacagtggcccctacagagtgcagcgaagtgaaaaccgactccaccgaccacgtgaagcccaaagagacagagaacaccaagcagcccagcaagagctgccacaagcccaaggccatcgtgcacaccgagaaagtgaacatgatgagcctgaccgtgctgggcctgcggatgctgttcgccaaaaccgtggccgtgaacttcctgctgaccgccaagctgttcttcctc

SEQ ID NO: 16882 - DNA, 516 bp, synthetic construct
  source 1..516: mol_type = other DNA
cctaaggccaatcctaccgtgacactgttccctccaagcagcgaagaactccaggccaacaaggccacacttgtgtgcctgatctccgacttctaccctggggctgtgacagtggcttggaaggccgatggatctcctgtgaaagccggcgtggaaaccaccaagccatccaagcagagcaacaacaaatacgccgccagctcctacctgagcctgacacctgagcagtggaagtcccacagatcctacagctgccaagtgacccacgaaggcagcaccgtggaaaagacagtggcccctacagagtgcagcgaagtgaaaaccgactccaccgaccacgtgaagcccaaagagacagagaacaccaagcagcccagcaagagctgccacaagcccaaggccatcgtgcacaccgagaaagtgaacatgatgagcctgaccgtgctgggcctgcggatgctgttcgccaaaaccgtggccgtgaacttcctgctgaccgccaagctgttcttcctc

SEQ ID NO: 16883 - DNA, 513 bp, synthetic construct
  source 1..513: mol_type = other DNA
aaggccaatcctaccgtgacactgttccctccaagcagcgaagaactccaggccaacaaggccacacttgtgtgcctgatctccgacttctaccctggggctgtgacagtggcttggaaggccgatggatctcctgtgaaagccggcgtggaaaccaccaagccatccaagcagagcaacaacaaatacgccgccagctcctacctgagcctgacacctgagcagtggaagtcccacagatcctacagctgccaagtgacccacgaaggcagcaccgtggaaaagacagtggcccctacagagtgcagcgaagtgaaaaccgactccaccgaccacgtgaagcccaaagagacagagaacaccaagcagcccagcaagagctgccacaagcccaaggccatcgtgcacaccgagaaagtgaacatgatgagcctgaccgtgctgggcctgcggatgctgttcgccaaaaccgtggccgtgaacttcctgctgaccgccaagctgttcttcctc

SEQ ID NO: 16884 - DNA, 510 bp, synthetic construct
  source 1..510: mol_type = other DNA
gccaatcctaccgtgacactgttccctccaagcagcgaagaactccaggccaacaaggccacacttgtgtgcctgatctccgacttctaccctggggctgtgacagtggcttggaaggccgatggatctcctgtgaaagccggcgtggaaaccaccaagccatccaagcagagcaacaacaaatacgccgccagctcctacctgagcctgacacctgagcagtggaagtcccacagatcctacagctgccaagtgacccacgaaggcagcaccgtggaaaagacagtggcccctacagagtgcagcgaagtgaaaaccgactccaccgaccacgtgaagcccaaagagacagagaacaccaagcagcccagcaagagctgccacaagcccaaggccatcgtgcacaccgagaaagtgaacatgatgagcctgaccgtgctgggcctgcggatgctgttcgccaaaaccgtggccgtgaacttcctgctgaccgccaagctgttcttcctc

SEQ ID NO: 16885 - DNA, 507 bp, synthetic construct
  source 1..507: mol_type = other DNA
aatcctaccgtgacactgttccctccaagcagcgaagaactccaggccaacaaggccacacttgtgtgcctgatctccgacttctaccctggggctgtgacagtggcttggaaggccgatggatctcctgtgaaagccggcgtggaaaccaccaagccatccaagcagagcaacaacaaatacgccgccagctcctacctgagcctgacacctgagcagtggaagtcccacagatcctacagctgccaagtgacccacgaaggcagcaccgtggaaaagacagtggcccctacagagtgcagcgaagtgaaaaccgactccaccgaccacgtgaagcccaaagagacagagaacaccaagcagcccagcaagagctgccacaagcccaaggccatcgtgcacaccgagaaagtgaacatgatgagcctgaccgtgctgggcctgcggatgctgttcgccaaaaccgtggccgtgaacttcctgctgaccgccaagctgttcttcctc

SEQ ID NO: 16886 - DNA, 504 bp, synthetic construct
  source 1..504: mol_type = other DNA
cctaccgtgacactgttccctccaagcagcgaagaactccaggccaacaaggccacacttgtgtgcctgatctccgacttctaccctggggctgtgacagtggcttggaaggccgatggatctcctgtgaaagccggcgtggaaaccaccaagccatccaagcagagcaacaacaaatacgccgccagctcctacctgagcctgacacctgagcagtggaagtcccacagatcctacagctgccaagtgacccacgaaggcagcaccgtggaaaagacagtggcccctacagagtgcagcgaagtgaaaaccgactccaccgaccacgtgaagcccaaagagacagagaacaccaagcagcccagcaagagctgccacaagcccaaggccatcgtgcacaccgagaaagtgaacatgatgagcctgaccgtgctgggcctgcggatgctgttcgccaaaaccgtggccgtgaacttcctgctgaccgccaagctgttcttcctc

SEQ ID NO: 16887 - DNA, 501 bp, synthetic construct
  source 1..501: mol_type = other DNA
accgtgacactgttccctccaagcagcgaagaactccaggccaacaaggccacacttgtgtgcctgatctccgacttctaccctggggctgtgacagtggcttggaaggccgatggatctcctgtgaaagccggcgtggaaaccaccaagccatccaagcagagcaacaacaaatacgccgccagctcctacctgagcctgacacctgagcagtggaagtcccacagatcctacagctgccaagtgacccacgaaggcagcaccgtggaaaagacagtggcccctacagagtgcagcgaagtgaaaaccgactccaccgaccacgtgaagcccaaagagacagagaacaccaagcagcccagcaagagctgccacaagcccaaggccatcgtgcacaccgagaaagtgaacatgatgagcctgaccgtgctgggcctgcggatgctgttcgccaaaaccgtggccgtgaacttcctgctgaccgccaagctgttcttcctc

SEQ ID NO: 16888 - DNA, 498 bp, synthetic construct
  source 1..498: mol_type = other DNA
gtgacactgttccctccaagcagcgaagaactccaggccaacaaggccacacttgtgtgcctgatctccgacttctaccctggggctgtgacagtggcttggaaggccgatggatctcctgtgaaagccggcgtggaaaccaccaagccatccaagcagagcaacaacaaatacgccgccagctcctacctgagcctgacacctgagcagtggaagtcccacagatcctacagctgccaagtgacccacgaaggcagcaccgtggaaaagacagtggcccctacagagtgcagcgaagtgaaaaccgactccaccgaccacgtgaagcccaaagagacagagaacaccaagcagcccagcaagagctgccacaagcccaaggccatcgtgcacaccgagaaagtgaacatgatgagcctgaccgtgctgggcctgcggatgctgttcgccaaaaccgtggccgtgaacttcctgctgaccgccaagctgttcttcctc

SEQ ID NO: 16889 - DNA, 495 bp, synthetic construct
  source 1..495: mol_type = other DNA
acactgttccctccaagcagcgaagaactccaggccaacaaggccacacttgtgtgcctgatctccgacttctaccctggggctgtgacagtggcttggaaggccgatggatctcctgtgaaagccggcgtggaaaccaccaagccatccaagcagagcaacaacaaatacgccgccagctcctacctgagcctgacacctgagcagtggaagtcccacagatcctacagctgccaagtgacccacgaaggcagcaccgtggaaaagacagtggcccctacagagtgcagcgaagtgaaaaccgactccaccgaccacgtgaagcccaaagagacagagaacaccaagcagcccagcaagagctgccacaagcccaaggccatcgtgcacaccgagaaagtgaacatgatgagcctgaccgtgctgggcctgcggatgctgttcgccaaaaccgtggccgtgaacttcctgctgaccgccaagctgttcttcctc

SEQ ID NO: 16890 - DNA, 492 bp, synthetic construct
  source 1..492: mol_type = other DNA
ctgttccctccaagcagcgaagaactccaggccaacaaggccacacttgtgtgcctgatctccgacttctaccctggggctgtgacagtggcttggaaggccgatggatctcctgtgaaagccggcgtggaaaccaccaagccatccaagcagagcaacaacaaatacgccgccagctcctacctgagcctgacacctgagcagtggaagtcccacagatcctacagctgccaagtgacccacgaaggcagcaccgtggaaaagacagtggcccctacagagtgcagcgaagtgaaaaccgactccaccgaccacgtgaagcccaaagagacagagaacaccaagcagcccagcaagagctgccacaagcccaaggccatcgtgcacaccgagaaagtgaacatgatgagcctgaccgtgctgggcctgcggatgctgttcgccaaaaccgtggccgtgaacttcctgctgaccgccaagctgttcttcctc

SEQ ID NO: 16891 - DNA, 477 bp, synthetic construct
  source 1..477: mol_type = other DNA
ggacagcctaaggccaatcctaccgtgacactgttccctccaagcagcgaagaactccaggccaacaaggccacacttgtgtgcctgatctccgacttctaccctggggctgtgacagtggcttggaaggccgatggatctcctgtgaaagccggcgtggaaaccaccaagccatccaagcagagcaacaacaaatacgccgccagctcctacctgagcctgacacctgagcagtggaagtcccacagatcctacagctgccaagtgacccacgaaggcagcaccgtggaaaagacagtggcccctacagagtgcagcggcagagccgattgcggctttaccagcgagagctaccagcagggcgtgctgagcgccaccatcctgtacgagatcctgctgggcaaggccaccctgtacgccgtgctggtgtctgccctggtgctgatggctatggtcaagcggaaggacagccgggga

SEQ ID NO: 16892 - DNA, 474 bp, synthetic construct
  source 1..474: mol_type = other DNA
cagcctaaggccaatcctaccgtgacactgttccctccaagcagcgaagaactccaggccaacaaggccacacttgtgtgcctgatctccgacttctaccctggggctgtgacagtggcttggaaggccgatggatctcctgtgaaagccggcgtggaaaccaccaagccatccaagcagagcaacaacaaatacgccgccagctcctacctgagcctgacacctgagcagtggaagtcccacagatcctacagctgccaagtgacccacgaaggcagcaccgtggaaaagacagtggcccctacagagtgcagcggcagagccgattgcggctttaccagcgagagctaccagcagggcgtgctgagcgccaccatcctgtacgagatcctgctgggcaaggccaccctgtacgccgtgctggtgtctgccctggtgctgatggctatggtcaagcggaaggacagccgggga

SEQ ID NO: 16893 - DNA, 471 bp, synthetic construct
  source 1..471: mol_type = other DNA
cctaaggccaatcctaccgtgacactgttccctccaagcagcgaagaactccaggccaacaaggccacacttgtgtgcctgatctccgacttctaccctggggctgtgacagtggcttggaaggccgatggatctcctgtgaaagccggcgtggaaaccaccaagccatccaagcagagcaacaacaaatacgccgccagctcctacctgagcctgacacctgagcagtggaagtcccacagatcctacagctgccaagtgacccacgaaggcagcaccgtggaaaagacagtggcccctacagagtgcagcggcagagccgattgcggctttaccagcgagagctaccagcagggcgtgctgagcgccaccatcctgtacgagatcctgctgggcaaggccaccctgtacgccgtgctggtgtctgccctggtgctgatggctatggtcaagcggaaggacagccgggga

SEQ ID NO: 16894 - DNA, 468 bp, synthetic construct
  source 1..468: mol_type = other DNA
aaggccaatcctaccgtgacactgttccctccaagcagcgaagaactccaggccaacaaggccacacttgtgtgcctgatctccgacttctaccctggggctgtgacagtggcttggaaggccgatggatctcctgtgaaagccggcgtggaaaccaccaagccatccaagcagagcaacaacaaatacgccgccagctcctacctgagcctgacacctgagcagtggaagtcccacagatcctacagctgccaagtgacccacgaaggcagcaccgtggaaaagacagtggcccctacagagtgcagcggcagagccgattgcggctttaccagcgagagctaccagcagggcgtgctgagcgccaccatcctgtacgagatcctgctgggcaaggccaccctgtacgccgtgctggtgtctgccctggtgctgatggctatggtcaagcggaaggacagccgggga

SEQ ID NO: 16895 - DNA, 465 bp, synthetic construct
  source 1..465: mol_type = other DNA
gccaatcctaccgtgacactgttccctccaagcagcgaagaactccaggccaacaaggccacacttgtgtgcctgatctccgacttctaccctggggctgtgacagtggcttggaaggccgatggatctcctgtgaaagccggcgtggaaaccaccaagccatccaagcagagcaacaacaaatacgccgccagctcctacctgagcctgacacctgagcagtggaagtcccacagatcctacagctgccaagtgacccacgaaggcagcaccgtggaaaagacagtggcccctacagagtgcagcggcagagccgattgcggctttaccagcgagagctaccagcagggcgtgctgagcgccaccatcctgtacgagatcctgctgggcaaggccaccctgtacgccgtgctggtgtctgccctggtgctgatggctatggtcaagcggaaggacagccgggga

SEQ ID NO: 16896 - DNA, 462 bp, synthetic construct
  source 1..462: mol_type = other DNA
aatcctaccgtgacactgttccctccaagcagcgaagaactccaggccaacaaggccacacttgtgtgcctgatctccgacttctaccctggggctgtgacagtggcttggaaggccgatggatctcctgtgaaagccggcgtggaaaccaccaagccatccaagcagagcaacaacaaatacgccgccagctcctacctgagcctgacacctgagcagtggaagtcccacagatcctacagctgccaagtgacccacgaaggcagcaccgtggaaaagacagtggcccctacagagtgcagcggcagagccgattgcggctttaccagcgagagctaccagcagggcgtgctgagcgccaccatcctgtacgagatcctgctgggcaaggccaccctgtacgccgtgctggtgtctgccctggtgctgatggctatggtcaagcggaaggacagccgggga

SEQ ID NO: 16897 - DNA, 459 bp, synthetic construct
  source 1..459: mol_type = other DNA
cctaccgtgacactgttccctccaagcagcgaagaactccaggccaacaaggccacacttgtgtgcctgatctccgacttctaccctggggctgtgacagtggcttggaaggccgatggatctcctgtgaaagccggcgtggaaaccaccaagccatccaagcagagcaacaacaaatacgccgccagctcctacctgagcctgacacctgagcagtggaagtcccacagatcctacagctgccaagtgacccacgaaggcagcaccgtggaaaagacagtggcccctacagagtgcagcggcagagccgattgcggctttaccagcgagagctaccagcagggcgtgctgagcgccaccatcctgtacgagatcctgctgggcaaggccaccctgtacgccgtgctggtgtctgccctggtgctgatggctatggtcaagcggaaggacagccgggga

SEQ ID NO: 16898 - DNA, 456 bp, synthetic construct
  source 1..456: mol_type = other DNA
accgtgacactgttccctccaagcagcgaagaactccaggccaacaaggccacacttgtgtgcctgatctccgacttctaccctggggctgtgacagtggcttggaaggccgatggatctcctgtgaaagccggcgtggaaaccaccaagccatccaagcagagcaacaacaaatacgccgccagctcctacctgagcctgacacctgagcagtggaagtcccacagatcctacagctgccaagtgacccacgaaggcagcaccgtggaaaagacagtggcccctacagagtgcagcggcagagccgattgcggctttaccagcgagagctaccagcagggcgtgctgagcgccaccatcctgtacgagatcctgctgggcaaggccaccctgtacgccgtgctggtgtctgccctggtgctgatggctatggtcaagcggaaggacagccgggga

SEQ ID NO: 16899 - DNA, 453 bp, synthetic construct
  source 1..453: mol_type = other DNA
gtgacactgttccctccaagcagcgaagaactccaggccaacaaggccacacttgtgtgcctgatctccgacttctaccctggggctgtgacagtggcttggaaggccgatggatctcctgtgaaagccggcgtggaaaccaccaagccatccaagcagagcaacaacaaatacgccgccagctcctacctgagcctgacacctgagcagtggaagtcccacagatcctacagctgccaagtgacccacgaaggcagcaccgtggaaaagacagtggcccctacagagtgcagcggcagagccgattgcggctttaccagcgagagctaccagcagggcgtgctgagcgccaccatcctgtacgagatcctgctgggcaaggccaccctgtacgccgtgctggtgtctgccctggtgctgatggctatggtcaagcggaaggacagccgggga

SEQ ID NO: 16900 - DNA, 450 bp, synthetic construct
  source 1..450: mol_type = other DNA
acactgttccctccaagcagcgaagaactccaggccaacaaggccacacttgtgtgcctgatctccgacttctaccctggggctgtgacagtggcttggaaggccgatggatctcctgtgaaagccggcgtggaaaccaccaagccatccaagcagagcaacaacaaatacgccgccagctcctacctgagcctgacacctgagcagtggaagtcccacagatcctacagctgccaagtgacccacgaaggcagcaccgtggaaaagacagtggcccctacagagtgcagcggcagagccgattgcggctttaccagcgagagctaccagcagggcgtgctgagcgccaccatcctgtacgagatcctgctgggcaaggccaccctgtacgccgtgctggtgtctgccctggtgctgatggctatggtcaagcggaaggacagccgggga

SEQ ID NO: 16901 - DNA, 447 bp, synthetic construct
  source 1..447: mol_type = other DNA
ctgttccctccaagcagcgaagaactccaggccaacaaggccacacttgtgtgcctgatctccgacttctaccctggggctgtgacagtggcttggaaggccgatggatctcctgtgaaagccggcgtggaaaccaccaagccatccaagcagagcaacaacaaatacgccgccagctcctacctgagcctgacacctgagcagtggaagtcccacagatcctacagctgccaagtgacccacgaaggcagcaccgtggaaaagacagtggcccctacagagtgcagcggcagagccgattgcggctttaccagcgagagctaccagcagggcgtgctgagcgccaccatcctgtacgagatcctgctgggcaaggccaccctgtacgccgtgctggtgtctgccctggtgctgatggctatggtcaagcggaaggacagccgggga

SEQ ID NO: 16902 - DNA, 498 bp, synthetic construct
  source 1..498: mol_type = other DNA
ggacagcctaaggccaatcctaccgtgacactgttccctccaagcagcgaagaactccaggccaacaaggccacacttgtgtgcctgatctccgacttctaccctggggctgtgacagtggcttggaaggccgatggatctcctgtgaaagccggcgtggaaaccaccaagccatccaagcagagcaacaacaaatacgccgccagctcctacctgagcctgacacctgagcagtggaagtcccacagatcctacagctgccaagtgacccacgaaggcagcaccgtggaaaagacagtggcccctacagagtgcagcatccccgaggacacattcttcccaagccccgagagcagctgcgacgtgaagctggtggaaaagagcttcgagacagacaccaacctgaacttccagaacctgagcgtgatcggcttcagaatcctgctgctgaaagtggccggctttaacctgctgatgaccctgcggctgtggtccagc

SEQ ID NO: 16903 - DNA, 495 bp, synthetic construct
  source 1..495: mol_type = other DNA
cagcctaaggccaatcctaccgtgacactgttccctccaagcagcgaagaactccaggccaacaaggccacacttgtgtgcctgatctccgacttctaccctggggctgtgacagtggcttggaaggccgatggatctcctgtgaaagccggcgtggaaaccaccaagccatccaagcagagcaacaacaaatacgccgccagctcctacctgagcctgacacctgagcagtggaagtcccacagatcctacagctgccaagtgacccacgaaggcagcaccgtggaaaagacagtggcccctacagagtgcagcatccccgaggacacattcttcccaagccccgagagcagctgcgacgtgaagctggtggaaaagagcttcgagacagacaccaacctgaacttccagaacctgagcgtgatcggcttcagaatcctgctgctgaaagtggccggctttaacctgctgatgaccctgcggctgtggtccagc

SEQ ID NO: 16904 - DNA, 492 bp, synthetic construct
  source 1..492: mol_type = other DNA
cctaaggccaatcctaccgtgacactgttccctccaagcagcgaagaactccaggccaacaaggccacacttgtgtgcctgatctccgacttctaccctggggctgtgacagtggcttggaaggccgatggatctcctgtgaaagccggcgtggaaaccaccaagccatccaagcagagcaacaacaaatacgccgccagctcctacctgagcctgacacctgagcagtggaagtcccacagatcctacagctgccaagtgacccacgaaggcagcaccgtggaaaagacagtggcccctacagagtgcagcatccccgaggacacattcttcccaagccccgagagcagctgcgacgtgaagctggtggaaaagagcttcgagacagacaccaacctgaacttccagaacctgagcgtgatcggcttcagaatcctgctgctgaaagtggccggctttaacctgctgatgaccctgcggctgtggtccagc

SEQ ID NO: 16905 - DNA, 489 bp, synthetic construct
  source 1..489: mol_type = other DNA
aaggccaatcctaccgtgacactgttccctccaagcagcgaagaactccaggccaacaaggccacacttgtgtgcctgatctccgacttctaccctggggctgtgacagtggcttggaaggccgatggatctcctgtgaaagccggcgtggaaaccaccaagccatccaagcagagcaacaacaaatacgccgccagctcctacctgagcctgacacctgagcagtggaagtcccacagatcctacagctgccaagtgacccacgaaggcagcaccgtggaaaagacagtggcccctacagagtgcagcatccccgaggacacattcttcccaagccccgagagcagctgcgacgtgaagctggtggaaaagagcttcgagacagacaccaacctgaacttccagaacctgagcgtgatcggcttcagaatcctgctgctgaaagtggccggctttaacctgctgatgaccctgcggctgtggtccagc

SEQ ID NO: 16906 - DNA, 486 bp, synthetic construct
  source 1..486: mol_type = other DNA
gccaatcctaccgtgacactgttccctccaagcagcgaagaactccaggccaacaaggccacacttgtgtgcctgatctccgacttctaccctggggctgtgacagtggcttggaaggccgatggatctcctgtgaaagccggcgtggaaaccaccaagccatccaagcagagcaacaacaaatacgccgccagctcctacctgagcctgacacctgagcagtggaagtcccacagatcctacagctgccaagtgacccacgaaggcagcaccgtggaaaagacagtggcccctacagagtgcagcatccccgaggacacattcttcccaagccccgagagcagctgcgacgtgaagctggtggaaaagagcttcgagacagacaccaacctgaacttccagaacctgagcgtgatcggcttcagaatcctgctgctgaaagtggccggctttaacctgctgatgaccctgcggctgtggtccagc

SEQ ID NO: 16907 - DNA, 483 bp, synthetic construct
  source 1..483: mol_type = other DNA
aatcctaccgtgacactgttccctccaagcagcgaagaactccaggccaacaaggccacacttgtgtgcctgatctccgacttctaccctggggctgtgacagtggcttggaaggccgatggatctcctgtgaaagccggcgtggaaaccaccaagccatccaagcagagcaacaacaaatacgccgccagctcctacctgagcctgacacctgagcagtggaagtcccacagatcctacagctgccaagtgacccacgaaggcagcaccgtggaaaagacagtggcccctacagagtgcagcatccccgaggacacattcttcccaagccccgagagcagctgcgacgtgaagctggtggaaaagagcttcgagacagacaccaacctgaacttccagaacctgagcgtgatcggcttcagaatcctgctgctgaaagtggccggctttaacctgctgatgaccctgcggctgtggtccagc

SEQ ID NO: 16908 - DNA, 480 bp, synthetic construct
  source 1..480: mol_type = other DNA
cctaccgtgacactgttccctccaagcagcgaagaactccaggccaacaaggccacacttgtgtgcctgatctccgacttctaccctggggctgtgacagtggcttggaaggccgatggatctcctgtgaaagccggcgtggaaaccaccaagccatccaagcagagcaacaacaaatacgccgccagctcctacctgagcctgacacctgagcagtggaagtcccacagatcctacagctgccaagtgacccacgaaggcagcaccgtggaaaagacagtggcccctacagagtgcagcatccccgaggacacattcttcccaagccccgagagcagctgcgacgtgaagctggtggaaaagagcttcgagacagacaccaacctgaacttccagaacctgagcgtgatcggcttcagaatcctgctgctgaaagtggccggctttaacctgctgatgaccctgcggctgtggtccagc

SEQ ID NO: 16909 - DNA, 477 bp, synthetic construct
  source 1..477: mol_type = other DNA
accgtgacactgttccctccaagcagcgaagaactccaggccaacaaggccacacttgtgtgcctgatctccgacttctaccctggggctgtgacagtggcttggaaggccgatggatctcctgtgaaagccggcgtggaaaccaccaagccatccaagcagagcaacaacaaatacgccgccagctcctacctgagcctgacacctgagcagtggaagtcccacagatcctacagctgccaagtgacccacgaaggcagcaccgtggaaaagacagtggcccctacagagtgcagcatccccgaggacacattcttcccaagccccgagagcagctgcgacgtgaagctggtggaaaagagcttcgagacagacaccaacctgaacttccagaacctgagcgtgatcggcttcagaatcctgctgctgaaagtggccggctttaacctgctgatgaccctgcggctgtggtccagc

SEQ ID NO: 16910 - DNA, 474 bp, synthetic construct
  source 1..474: mol_type = other DNA
gtgacactgttccctccaagcagcgaagaactccaggccaacaaggccacacttgtgtgcctgatctccgacttctaccctggggctgtgacagtggcttggaaggccgatggatctcctgtgaaagccggcgtggaaaccaccaagccatccaagcagagcaacaacaaatacgccgccagctcctacctgagcctgacacctgagcagtggaagtcccacagatcctacagctgccaagtgacccacgaaggcagcaccgtggaaaagacagtggcccctacagagtgcagcatccccgaggacacattcttcccaagccccgagagcagctgcgacgtgaagctggtggaaaagagcttcgagacagacaccaacctgaacttccagaacctgagcgtgatcggcttcagaatcctgctgctgaaagtggccggctttaacctgctgatgaccctgcggctgtggtccagc

SEQ ID NO: 16911 - DNA, 471 bp, synthetic construct
  source 1..471: mol_type = other DNA
acactgttccctccaagcagcgaagaactccaggccaacaaggccacacttgtgtgcctgatctccgacttctaccctggggctgtgacagtggcttggaaggccgatggatctcctgtgaaagccggcgtggaaaccaccaagccatccaagcagagcaacaacaaatacgccgccagctcctacctgagcctgacacctgagcagtggaagtcccacagatcctacagctgccaagtgacccacgaaggcagcaccgtggaaaagacagtggcccctacagagtgcagcatccccgaggacacattcttcccaagccccgagagcagctgcgacgtgaagctggtggaaaagagcttcgagacagacaccaacctgaacttccagaacctgagcgtgatcggcttcagaatcctgctgctgaaagtggccggctttaacctgctgatgaccctgcggctgtggtccagc

SEQ ID NO: 16912 - DNA, 468 bp, synthetic construct
  source 1..468: mol_type = other DNA
ctgttccctccaagcagcgaagaactccaggccaacaaggccacacttgtgtgcctgatctccgacttctaccctggggctgtgacagtggcttggaaggccgatggatctcctgtgaaagccggcgtggaaaccaccaagccatccaagcagagcaacaacaaatacgccgccagctcctacctgagcctgacacctgagcagtggaagtcccacagatcctacagctgccaagtgacccacgaaggcagcaccgtggaaaagacagtggcccctacagagtgcagcatccccgaggacacattcttcccaagccccgagagcagctgcgacgtgaagctggtggaaaagagcttcgagacagacaccaacctgaacttccagaacctgagcgtgatcggcttcagaatcctgctgctgaaagtggccggctttaacctgctgatgaccctgcggctgtggtccagc

SEQ ID NO: 16913 - DNA, 528 bp, synthetic construct
  source 1..528: mol_type = other DNA
gacctgaagaacgtgttcccacctgaggtggccgtgttcgagcctagcgaggccgagatcagccacacccagaaagccaccctcgtgtgcctggctaccggcttctaccccgaccatgtggaactgtcttggtgggtcaacggcaaagaggtgcacagcggcgtgtgtaccgacccccagccactgaaagaacagcccgccctgaacgacagccggtactgcctgagcagcagactgagagtgtccgccaccttctggcagaacccccggaaccacttcagatgccaggtgcagttctacggcctgagcgagaacgacgagtggacccaggacagagccaagcccgtgacccagatcgtgtctgccgaagcctggggcagagccgattgcgacgtgaagctggtggaaaagagcttcgagacagacaccaacctgaacttccagaacctgagcgtgatcggcttcagaatcctgctgctgaaagtggccggctttaacctgctgatgaccctgcggctgtggtccagc

SEQ ID NO: 16914 - DNA, 525 bp, synthetic construct
  source 1..525: mol_type = other DNA
ctgaagaacgtgttcccacctgaggtggccgtgttcgagcctagcgaggccgagatcagccacacccagaaagccaccctcgtgtgcctggctaccggcttctaccccgaccatgtggaactgtcttggtgggtcaacggcaaagaggtgcacagcggcgtgtgtaccgacccccagccactgaaagaacagcccgccctgaacgacagccggtactgcctgagcagcagactgagagtgtccgccaccttctggcagaacccccggaaccacttcagatgccaggtgcagttctacggcctgagcgagaacgacgagtggacccaggacagagccaagcccgtgacccagatcgtgtctgccgaagcctggggcagagccgattgcgacgtgaagctggtggaaaagagcttcgagacagacaccaacctgaacttccagaacctgagcgtgatcggcttcagaatcctgctgctgaaagtggccggctttaacctgctgatgaccctgcggctgtggtccagc

SEQ ID NO: 16915 - DNA, 522 bp, synthetic construct
  source 1..522: mol_type = other DNA
aagaacgtgttcccacctgaggtggccgtgttcgagcctagcgaggccgagatcagccacacccagaaagccaccctcgtgtgcctggctaccggcttctaccccgaccatgtggaactgtcttggtgggtcaacggcaaagaggtgcacagcggcgtgtgtaccgacccccagccactgaaagaacagcccgccctgaacgacagccggtactgcctgagcagcagactgagagtgtccgccaccttctggcagaacccccggaaccacttcagatgccaggtgcagttctacggcctgagcgagaacgacgagtggacccaggacagagccaagcccgtgacccagatcgtgtctgccgaagcctggggcagagccgattgcgacgtgaagctggtggaaaagagcttcgagacagacaccaacctgaacttccagaacctgagcgtgatcggcttcagaatcctgctgctgaaagtggccggctttaacctgctgatgaccctgcggctgtggtccagc

SEQ ID NO: 16916 - DNA, 519 bp, synthetic construct
  source 1..519: mol_type = other DNA
aacgtgttcccacctgaggtggccgtgttcgagcctagcgaggccgagatcagccacacccagaaagccaccctcgtgtgcctggctaccggcttctaccccgaccatgtggaactgtcttggtgggtcaacggcaaagaggtgcacagcggcgtgtgtaccgacccccagccactgaaagaacagcccgccctgaacgacagccggtactgcctgagcagcagactgagagtgtccgccaccttctggcagaacccccggaaccacttcagatgccaggtgcagttctacggcctgagcgagaacgacgagtggacccaggacagagccaagcccgtgacccagatcgtgtctgccgaagcctggggcagagccgattgcgacgtgaagctggtggaaaagagcttcgagacagacaccaacctgaacttccagaacctgagcgtgatcggcttcagaatcctgctgctgaaagtggccggctttaacctgctgatgaccctgcggctgtggtccagc

SEQ ID NO: 16917 - DNA, 516 bp, synthetic construct
  source 1..516: mol_type = other DNA
gtgttcccacctgaggtggccgtgttcgagcctagcgaggccgagatcagccacacccagaaagccaccctcgtgtgcctggctaccggcttctaccccgaccatgtggaactgtcttggtgggtcaacggcaaagaggtgcacagcggcgtgtgtaccgacccccagccactgaaagaacagcccgccctgaacgacagccggtactgcctgagcagcagactgagagtgtccgccaccttctggcagaacccccggaaccacttcagatgccaggtgcagttctacggcctgagcgagaacgacgagtggacccaggacagagccaagcccgtgacccagatcgtgtctgccgaagcctggggcagagccgattgcgacgtgaagctggtggaaaagagcttcgagacagacaccaacctgaacttccagaacctgagcgtgatcggcttcagaatcctgctgctgaaagtggccggctttaacctgctgatgaccctgcggctgtggtccagc

SEQ ID NO: 16918 - DNA, 513 bp, synthetic construct
  source 1..513: mol_type = other DNA
ttcccacctgaggtggccgtgttcgagcctagcgaggccgagatcagccacacccagaaagccaccctcgtgtgcctggctaccggcttctaccccgaccatgtggaactgtcttggtgggtcaacggcaaagaggtgcacagcggcgtgtgtaccgacccccagccactgaaagaacagcccgccctgaacgacagccggtactgcctgagcagcagactgagagtgtccgccaccttctggcagaacccccggaaccacttcagatgccaggtgcagttctacggcctgagcgagaacgacgagtggacccaggacagagccaagcccgtgacccagatcgtgtctgccgaagcctggggcagagccgattgcgacgtgaagctggtggaaaagagcttcgagacagacaccaacctgaacttccagaacctgagcgtgatcggcttcagaatcctgctgctgaaagtggccggctttaacctgctgatgaccctgcggctgtggtccagc

SEQ ID NO: 16919 - DNA, 510 bp, synthetic construct
  source 1..510: mol_type = other DNA
ccacctgaggtggccgtgttcgagcctagcgaggccgagatcagccacacccagaaagccaccctcgtgtgcctggctaccggcttctaccccgaccatgtggaactgtcttggtgggtcaacggcaaagaggtgcacagcggcgtgtgtaccgacccccagccactgaaagaacagcccgccctgaacgacagccggtactgcctgagcagcagactgagagtgtccgccaccttctggcagaacccccggaaccacttcagatgccaggtgcagttctacggcctgagcgagaacgacgagtggacccaggacagagccaagcccgtgacccagatcgtgtctgccgaagcctggggcagagccgattgcgacgtgaagctggtggaaaagagcttcgagacagacaccaacctgaacttccagaacctgagcgtgatcggcttcagaatcctgctgctgaaagtggccggctttaacctgctgatgaccctgcggctgtggtccagc

SEQ ID NO: 16920 - DNA, 507 bp, synthetic construct
  source 1..507: mol_type = other DNA
cctgaggtggccgtgttcgagcctagcgaggccgagatcagccacacccagaaagccaccctcgtgtgcctggctaccggcttctaccccgaccatgtggaactgtcttggtgggtcaacggcaaagaggtgcacagcggcgtgtgtaccgacccccagccactgaaagaacagcccgccctgaacgacagccggtactgcctgagcagcagactgagagtgtccgccaccttctggcagaacccccggaaccacttcagatgccaggtgcagttctacggcctgagcgagaacgacgagtggacccaggacagagccaagcccgtgacccagatcgtgtctgccgaagcctggggcagagccgattgcgacgtgaagctggtggaaaagagcttcgagacagacaccaacctgaacttccagaacctgagcgtgatcggcttcagaatcctgctgctgaaagtggccggctttaacctgctgatgaccctgcggctgtggtccagc

SEQ ID NO: 16921 - DNA, 504 bp, synthetic construct
  source 1..504: mol_type = other DNA
gaggtggccgtgttcgagcctagcgaggccgagatcagccacacccagaaagccaccctcgtgtgcctggctaccggcttctaccccgaccatgtggaactgtcttggtgggtcaacggcaaagaggtgcacagcggcgtgtgtaccgacccccagccactgaaagaacagcccgccctgaacgacagccggtactgcctgagcagcagactgagagtgtccgccaccttctggcagaacccccggaaccacttcagatgccaggtgcagttctacggcctgagcgagaacgacgagtggacccaggacagagccaagcccgtgacccagatcgtgtctgccgaagcctggggcagagccgattgcgacgtgaagctggtggaaaagagcttcgagacagacaccaacctgaacttccagaacctgagcgtgatcggcttcagaatcctgctgctgaaagtggccggctttaacctgctgatgaccctgcggctgtggtccagc

SEQ ID NO: 16922 - DNA, 501 bp, synthetic construct
  source 1..501: mol_type = other DNA
gtggccgtgttcgagcctagcgaggccgagatcagccacacccagaaagccaccctcgtgtgcctggctaccggcttctaccccgaccatgtggaactgtcttggtgggtcaacggcaaagaggtgcacagcggcgtgtgtaccgacccccagccactgaaagaacagcccgccctgaacgacagccggtactgcctgagcagcagactgagagtgtccgccaccttctggcagaacccccggaaccacttcagatgccaggtgcagttctacggcctgagcgagaacgacgagtggacccaggacagagccaagcccgtgacccagatcgtgtctgccgaagcctggggcagagccgattgcgacgtgaagctggtggaaaagagcttcgagacagacaccaacctgaacttccagaacctgagcgtgatcggcttcagaatcctgctgctgaaagtggccggctttaacctgctgatgaccctgcggctgtggtccagc

SEQ ID NO: 16923 - DNA, 498 bp, synthetic construct
  source 1..498: mol_type = other DNA
gccgtgttcgagcctagcgaggccgagatcagccacacccagaaagccaccctcgtgtgcctggctaccggcttctaccccgaccatgtggaactgtcttggtgggtcaacggcaaagaggtgcacagcggcgtgtgtaccgacccccagccactgaaagaacagcccgccctgaacgacagccggtactgcctgagcagcagactgagagtgtccgccaccttctggcagaacccccggaaccacttcagatgccaggtgcagttctacggcctgagcgagaacgacgagtggacccaggacagagccaagcccgtgacccagatcgtgtctgccgaagcctggggcagagccgattgcgacgtgaagctggtggaaaagagcttcgagacagacaccaacctgaacttccagaacctgagcgtgatcggcttcagaatcctgctgctgaaagtggccggctttaacctgctgatgaccctgcggctgtggtccagc

SEQ ID NO: 16924 - DNA, 495 bp, synthetic construct
  source 1..495: mol_type = other DNA
gtgttcgagcctagcgaggccgagatcagccacacccagaaagccaccctcgtgtgcctggctaccggcttctaccccgaccatgtggaactgtcttggtgggtcaacggcaaagaggtgcacagcggcgtgtgtaccgacccccagccactgaaagaacagcccgccctgaacgacagccggtactgcctgagcagcagactgagagtgtccgccaccttctggcagaacccccggaaccacttcagatgccaggtgcagttctacggcctgagcgagaacgacgagtggacccaggacagagccaagcccgtgacccagatcgtgtctgccgaagcctggggcagagccgattgcgacgtgaagctggtggaaaagagcttcgagacagacaccaacctgaacttccagaacctgagcgtgatcggcttcagaatcctgctgctgaaagtggccggctttaacctgctgatgaccctgcggctgtggtccagc

SEQ ID NO: 16925 - DNA, 492 bp, synthetic construct
  source 1..492: mol_type = other DNA
ttcgagcctagcgaggccgagatcagccacacccagaaagccaccctcgtgtgcctggctaccggcttctaccccgaccatgtggaactgtcttggtgggtcaacggcaaagaggtgcacagcggcgtgtgtaccgacccccagccactgaaagaacagcccgccctgaacgacagccggtactgcctgagcagcagactgagagtgtccgccaccttctggcagaacccccggaaccacttcagatgccaggtgcagttctacggcctgagcgagaacgacgagtggacccaggacagagccaagcccgtgacccagatcgtgtctgccgaagcctggggcagagccgattgcgacgtgaagctggtggaaaagagcttcgagacagacaccaacctgaacttccagaacctgagcgtgatcggcttcagaatcctgctgctgaaagtggccggctttaacctgctgatgaccctgcggctgtggtccagc

SEQ ID NO: 16926 - DNA, 489 bp, synthetic construct
  source 1..489: mol_type = other DNA
gagcctagcgaggccgagatcagccacacccagaaagccaccctcgtgtgcctggctaccggcttctaccccgaccatgtggaactgtcttggtgggtcaacggcaaagaggtgcacagcggcgtgtgtaccgacccccagccactgaaagaacagcccgccctgaacgacagccggtactgcctgagcagcagactgagagtgtccgccaccttctggcagaacccccggaaccacttcagatgccaggtgcagttctacggcctgagcgagaacgacgagtggacccaggacagagccaagcccgtgacccagatcgtgtctgccgaagcctggggcagagccgattgcgacgtgaagctggtggaaaagagcttcgagacagacaccaacctgaacttccagaacctgagcgtgatcggcttcagaatcctgctgctgaaagtggccggctttaacctgctgatgaccctgcggctgtggtccagc

SEQ ID NO: 16927 - DNA, 486 bp, synthetic construct
  source 1..486: mol_type = other DNA
cctagcgaggccgagatcagccacacccagaaagccaccctcgtgtgcctggctaccggcttctaccccgaccatgtggaactgtcttggtgggtcaacggcaaagaggtgcacagcggcgtgtgtaccgacccccagccactgaaagaacagcccgccctgaacgacagccggtactgcctgagcagcagactgagagtgtccgccaccttctggcagaacccccggaaccacttcagatgccaggtgcagttctacggcctgagcgagaacgacgagtggacccaggacagagccaagcccgtgacccagatcgtgtctgccgaagcctggggcagagccgattgcgacgtgaagctggtggaaaagagcttcgagacagacaccaacctgaacttccagaacctgagcgtgatcggcttcagaatcctgctgctgaaagtggccggctttaacctgctgatgaccctgcggctgtggtccagc

SEQ ID NO: 16928 - DNA, 483 bp, synthetic construct
  source 1..483: mol_type = other DNA
agcgaggccgagatcagccacacccagaaagccaccctcgtgtgcctggctaccggcttctaccccgaccatgtggaactgtcttggtgggtcaacggcaaagaggtgcacagcggcgtgtgtaccgacccccagccactgaaagaacagcccgccctgaacgacagccggtactgcctgagcagcagactgagagtgtccgccaccttctggcagaacccccggaaccacttcagatgccaggtgcagttctacggcctgagcgagaacgacgagtggacccaggacagagccaagcccgtgacccagatcgtgtctgccgaagcctggggcagagccgattgcgacgtgaagctggtggaaaagagcttcgagacagacaccaacctgaacttccagaacctgagcgtgatcggcttcagaatcctgctgctgaaagtggccggctttaacctgctgatgaccctgcggctgtggtccagc

SEQ ID NO: 16929 - DNA, 480 bp, synthetic construct
  source 1..480: mol_type = other DNA
gaggccgagatcagccacacccagaaagccaccctcgtgtgcctggctaccggcttctaccccgaccatgtggaactgtcttggtgggtcaacggcaaagaggtgcacagcggcgtgtgtaccgacccccagccactgaaagaacagcccgccctgaacgacagccggtactgcctgagcagcagactgagagtgtccgccaccttctggcagaacccccggaaccacttcagatgccaggtgcagttctacggcctgagcgagaacgacgagtggacccaggacagagccaagcccgtgacccagatcgtgtctgccgaagcctggggcagagccgattgcgacgtgaagctggtggaaaagagcttcgagacagacaccaacctgaacttccagaacctgagcgtgatcggcttcagaatcctgctgctgaaagtggccggctttaacctgctgatgaccctgcggctgtggtccagc

SEQ ID NO: 16930 - DNA, 477 bp, synthetic construct
  source 1..477: mol_type = other DNA
gccgagatcagccacacccagaaagccaccctcgtgtgcctggctaccggcttctaccccgaccatgtggaactgtcttggtgggtcaacggcaaagaggtgcacagcggcgtgtgtaccgacccccagccactgaaagaacagcccgccctgaacgacagccggtactgcctgagcagcagactgagagtgtccgccaccttctggcagaacccccggaaccacttcagatgccaggtgcagttctacggcctgagcgagaacgacgagtggacccaggacagagccaagcccgtgacccagatcgtgtctgccgaagcctggggcagagccgattgcgacgtgaagctggtggaaaagagcttcgagacagacaccaacctgaacttccagaacctgagcgtgatcggcttcagaatcctgctgctgaaagtggccggctttaacctgctgatgaccctgcggctgtggtccagc

SEQ ID NO: 16931 - DNA, 474 bp, synthetic construct
  source 1..474: mol_type = other DNA
gagatcagccacacccagaaagccaccctcgtgtgcctggctaccggcttctaccccgaccatgtggaactgtcttggtgggtcaacggcaaagaggtgcacagcggcgtgtgtaccgacccccagccactgaaagaacagcccgccctgaacgacagccggtactgcctgagcagcagactgagagtgtccgccaccttctggcagaacccccggaaccacttcagatgccaggtgcagttctacggcctgagcgagaacgacgagtggacccaggacagagccaagcccgtgacccagatcgtgtctgccgaagcctggggcagagccgattgcgacgtgaagctggtggaaaagagcttcgagacagacaccaacctgaacttccagaacctgagcgtgatcggcttcagaatcctgctgctgaaagtggccggctttaacctgctgatgaccctgcggctgtggtccagc

SEQ ID NO: 16932 - DNA, 471 bp, synthetic construct
  source 1..471: mol_type = other DNA
atcagccacacccagaaagccaccctcgtgtgcctggctaccggcttctaccccgaccatgtggaactgtcttggtgggtcaacggcaaagaggtgcacagcggcgtgtgtaccgacccccagccactgaaagaacagcccgccctgaacgacagccggtactgcctgagcagcagactgagagtgtccgccaccttctggcagaacccccggaaccacttcagatgccaggtgcagttctacggcctgagcgagaacgacgagtggacccaggacagagccaagcccgtgacccagatcgtgtctgccgaagcctggggcagagccgattgcgacgtgaagctggtggaaaagagcttcgagacagacaccaacctgaacttccagaacctgagcgtgatcggcttcagaatcctgctgctgaaagtggccggctttaacctgctgatgaccctgcggctgtggtccagc

SEQ ID NO: 16933 - DNA, 468 bp, synthetic construct
  source 1..468: mol_type = other DNA
agccacacccagaaagccaccctcgtgtgcctggctaccggcttctaccccgaccatgtggaactgtcttggtgggtcaacggcaaagaggtgcacagcggcgtgtgtaccgacccccagccactgaaagaacagcccgccctgaacgacagccggtactgcctgagcagcagactgagagtgtccgccaccttctggcagaacccccggaaccacttcagatgccaggtgcagttctacggcctgagcgagaacgacgagtggacccaggacagagccaagcccgtgacccagatcgtgtctgccgaagcctggggcagagccgattgcgacgtgaagctggtggaaaagagcttcgagacagacaccaacctgaacttccagaacctgagcgtgatcggcttcagaatcctgctgctgaaagtggccggctttaacctgctgatgaccctgcggctgtggtccagc

SEQ ID NO: 16934 - DNA, 453 bp, synthetic construct
  source 1..453: mol_type = other DNA
gccaccctcgtgtgcctggctaccggcttctaccccgaccatgtggaactgtcttggtgggtcaacggcaaagaggtgcacagcggcgtgtgtaccgacccccagccactgaaagaacagcccgccctgaacgacagccggtactgcctgagcagcagactgagagtgtccgccaccttctggcagaacccccggaaccacttcagatgccaggtgcagttctacggcctgagcgagaacgacgagtggacccaggacagagccaagcccgtgacccagatcgtgtctgccgaagcctggggcagagccgattgcgacgtgaagctggtggaaaagagcttcgagacagacaccaacctgaacttccagaacctgagcgtgatcggcttcagaatcctgctgctgaaagtggccggctttaacctgctgatgaccctgcggctgtggtccagc

SEQ ID NO: 16935 - DNA, 438 bp, synthetic construct
  source 1..438: mol_type = other DNA
ctggctaccggcttctaccccgaccatgtggaactgtcttggtgggtcaacggcaaagaggtgcacagcggcgtgtgtaccgacccccagccactgaaagaacagcccgccctgaacgacagccggtactgcctgagcagcagactgagagtgtccgccaccttctggcagaacccccggaaccacttcagatgccaggtgcagttctacggcctgagcgagaacgacgagtggacccaggacagagccaagcccgtgacccagatcgtgtctgccgaagcctggggcagagccgattgcgacgtgaagctggtggaaaagagcttcgagacagacaccaacctgaacttccagaacctgagcgtgatcggcttcagaatcctgctgctgaaagtggccggctttaacctgctgatgaccctgcggctgtggtccagc

SEQ ID NO: 16936 - DNA, 519 bp, synthetic construct
  source 1..519: mol_type = other DNA
gacctgaagaacgtgttcccacctgaggtggccgtgttcgagcctagcgaggccgagatcagccacacccagaaagccaccctcgtgtgcctggctaccggcttctaccccgaccatgtggaactgtcttggtgggtcaacggcaaagaggtgcacagcggcgtgtgtaccgacccccagccactgaaagaacagcccgccctgaacgacagccggtactgcctgagcagcagactgagagtgtccgccaccttctggcagaacccccggaaccacttcagatgccaggtgcagttctacggcctgagcgagaacgacgagtggacccaggacagagccaagcccgtgacccagatcgtgtctgccgaagcctggggcagagccgattgcggctttaccagcgagagctaccagcagggcgtgctgagcgccaccaacctgagcgtgatcggcttcagaatcctgctgctgaaagtggccggctttaacctgctgatgaccctgcggctgtggtccagc

SEQ ID NO: 16937 - DNA, 516 bp, synthetic construct
  source 1..516: mol_type = other DNA
ctgaagaacgtgttcccacctgaggtggccgtgttcgagcctagcgaggccgagatcagccacacccagaaagccaccctcgtgtgcctggctaccggcttctaccccgaccatgtggaactgtcttggtgggtcaacggcaaagaggtgcacagcggcgtgtgtaccgacccccagccactgaaagaacagcccgccctgaacgacagccggtactgcctgagcagcagactgagagtgtccgccaccttctggcagaacccccggaaccacttcagatgccaggtgcagttctacggcctgagcgagaacgacgagtggacccaggacagagccaagcccgtgacccagatcgtgtctgccgaagcctggggcagagccgattgcggctttaccagcgagagctaccagcagggcgtgctgagcgccaccaacctgagcgtgatcggcttcagaatcctgctgctgaaagtggccggctttaacctgctgatgaccctgcggctgtggtccagc

SEQ ID NO: 16938 - DNA, 513 bp, synthetic construct
  source 1..513: mol_type = other DNA
aagaacgtgttcccacctgaggtggccgtgttcgagcctagcgaggccgagatcagccacacccagaaagccaccctcgtgtgcctggctaccggcttctaccccgaccatgtggaactgtcttggtgggtcaacggcaaagaggtgcacagcggcgtgtgtaccgacccccagccactgaaagaacagcccgccctgaacgacagccggtactgcctgagcagcagactgagagtgtccgccaccttctggcagaacccccggaaccacttcagatgccaggtgcagttctacggcctgagcgagaacgacgagtggacccaggacagagccaagcccgtgacccagatcgtgtctgccgaagcctggggcagagccgattgcggctttaccagcgagagctaccagcagggcgtgctgagcgccaccaacctgagcgtgatcggcttcagaatcctgctgctgaaagtggccggctttaacctgctgatgaccctgcggctgtggtccagc

SEQ ID NO: 16939 - DNA, 510 bp, synthetic construct
  source 1..510: mol_type = other DNA
aacgtgttcccacctgaggtggccgtgttcgagcctagcgaggccgagatcagccacacccagaaagccaccctcgtgtgcctggctaccggcttctaccccgaccatgtggaactgtcttggtgggtcaacggcaaagaggtgcacagcggcgtgtgtaccgacccccagccactgaaagaacagcccgccctgaacgacagccggtactgcctgagcagcagactgagagtgtccgccaccttctggcagaacccccggaaccacttcagatgccaggtgcagttctacggcctgagcgagaacgacgagtggacccaggacagagccaagcccgtgacccagatcgtgtctgccgaagcctggggcagagccgattgcggctttaccagcgagagctaccagcagggcgtgctgagcgccaccaacctgagcgtgatcggcttcagaatcctgctgctgaaagtggccggctttaacctgctgatgaccctgcggctgtggtccagc

SEQ ID NO: 16940 - DNA, 507 bp, synthetic construct
  source 1..507: mol_type = other DNA
gtgttcccacctgaggtggccgtgttcgagcctagcgaggccgagatcagccacacccagaaagccaccctcgtgtgcctggctaccggcttctaccccgaccatgtggaactgtcttggtgggtcaacggcaaagaggtgcacagcggcgtgtgtaccgacccccagccactgaaagaacagcccgccctgaacgacagccggtactgcctgagcagcagactgagagtgtccgccaccttctggcagaacccccggaaccacttcagatgccaggtgcagttctacggcctgagcgagaacgacgagtggacccaggacagagccaagcccgtgacccagatcgtgtctgccgaagcctggggcagagccgattgcggctttaccagcgagagctaccagcagggcgtgctgagcgccaccaacctgagcgtgatcggcttcagaatcctgctgctgaaagtggccggctttaacctgctgatgaccctgcggctgtggtccagc

SEQ ID NO: 16941 - DNA, 504 bp, synthetic construct
  source 1..504: mol_type = other DNA
ttcccacctgaggtggccgtgttcgagcctagcgaggccgagatcagccacacccagaaagccaccctcgtgtgcctggctaccggcttctaccccgaccatgtggaactgtcttggtgggtcaacggcaaagaggtgcacagcggcgtgtgtaccgacccccagccactgaaagaacagcccgccctgaacgacagccggtactgcctgagcagcagactgagagtgtccgccaccttctggcagaacccccggaaccacttcagatgccaggtgcagttctacggcctgagcgagaacgacgagtggacccaggacagagccaagcccgtgacccagatcgtgtctgccgaagcctggggcagagccgattgcggctttaccagcgagagctaccagcagggcgtgctgagcgccaccaacctgagcgtgatcggcttcagaatcctgctgctgaaagtggccggctttaacctgctgatgaccctgcggctgtggtccagc

SEQ ID NO: 16942 - DNA, 501 bp, synthetic construct
  source 1..501: mol_type = other DNA
ccacctgaggtggccgtgttcgagcctagcgaggccgagatcagccacacccagaaagccaccctcgtgtgcctggctaccggcttctaccccgaccatgtggaactgtcttggtgggtcaacggcaaagaggtgcacagcggcgtgtgtaccgacccccagccactgaaagaacagcccgccctgaacgacagccggtactgcctgagcagcagactgagagtgtccgccaccttctggcagaacccccggaaccacttcagatgccaggtgcagttctacggcctgagcgagaacgacgagtggacccaggacagagccaagcccgtgacccagatcgtgtctgccgaagcctggggcagagccgattgcggctttaccagcgagagctaccagcagggcgtgctgagcgccaccaacctgagcgtgatcggcttcagaatcctgctgctgaaagtggccggctttaacctgctgatgaccctgcggctgtggtccagc

SEQ ID NO: 16943 - DNA, 498 bp, synthetic construct
  source 1..498: mol_type = other DNA
cctgaggtggccgtgttcgagcctagcgaggccgagatcagccacacccagaaagccaccctcgtgtgcctggctaccggcttctaccccgaccatgtggaactgtcttggtgggtcaacggcaaagaggtgcacagcggcgtgtgtaccgacccccagccactgaaagaacagcccgccctgaacgacagccggtactgcctgagcagcagactgagagtgtccgccaccttctggcagaacccccggaaccacttcagatgccaggtgcagttctacggcctgagcgagaacgacgagtggacccaggacagagccaagcccgtgacccagatcgtgtctgccgaagcctggggcagagccgattgcggctttaccagcgagagctaccagcagggcgtgctgagcgccaccaacctgagcgtgatcggcttcagaatcctgctgctgaaagtggccggctttaacctgctgatgaccctgcggctgtggtccagc

SEQ ID NO: 16944 - DNA, 495 bp, synthetic construct
  source 1..495: mol_type = other DNA
gaggtggccgtgttcgagcctagcgaggccgagatcagccacacccagaaagccaccctcgtgtgcctggctaccggcttctaccccgaccatgtggaactgtcttggtgggtcaacggcaaagaggtgcacagcggcgtgtgtaccgacccccagccactgaaagaacagcccgccctgaacgacagccggtactgcctgagcagcagactgagagtgtccgccaccttctggcagaacccccggaaccacttcagatgccaggtgcagttctacggcctgagcgagaacgacgagtggacccaggacagagccaagcccgtgacccagatcgtgtctgccgaagcctggggcagagccgattgcggctttaccagcgagagctaccagcagggcgtgctgagcgccaccaacctgagcgtgatcggcttcagaatcctgctgctgaaagtggccggctttaacctgctgatgaccctgcggctgtggtccagc

SEQ ID NO: 16945 - DNA, 492 bp, synthetic construct
  source 1..492: mol_type = other DNA
gtggccgtgttcgagcctagcgaggccgagatcagccacacccagaaagccaccctcgtgtgcctggctaccggcttctaccccgaccatgtggaactgtcttggtgggtcaacggcaaagaggtgcacagcggcgtgtgtaccgacccccagccactgaaagaacagcccgccctgaacgacagccggtactgcctgagcagcagactgagagtgtccgccaccttctggcagaacccccggaaccacttcagatgccaggtgcagttctacggcctgagcgagaacgacgagtggacccaggacagagccaagcccgtgacccagatcgtgtctgccgaagcctggggcagagccgattgcggctttaccagcgagagctaccagcagggcgtgctgagcgccaccaacctgagcgtgatcggcttcagaatcctgctgctgaaagtggccggctttaacctgctgatgaccctgcggctgtggtccagc

SEQ ID NO: 16946 - DNA, 489 bp, synthetic construct
  source 1..489: mol_type = other DNA
gccgtgttcgagcctagcgaggccgagatcagccacacccagaaagccaccctcgtgtgcctggctaccggcttctaccccgaccatgtggaactgtcttggtgggtcaacggcaaagaggtgcacagcggcgtgtgtaccgacccccagccactgaaagaacagcccgccctgaacgacagccggtactgcctgagcagcagactgagagtgtccgccaccttctggcagaacccccggaaccacttcagatgccaggtgcagttctacggcctgagcgagaacgacgagtggacccaggacagagccaagcccgtgacccagatcgtgtctgccgaagcctggggcagagccgattgcggctttaccagcgagagctaccagcagggcgtgctgagcgccaccaacctgagcgtgatcggcttcagaatcctgctgctgaaagtggccggctttaacctgctgatgaccctgcggctgtggtccagc

SEQ ID NO: 16947 - DNA, 486 bp, synthetic construct
  source 1..486: mol_type = other DNA
gtgttcgagcctagcgaggccgagatcagccacacccagaaagccaccctcgtgtgcctggctaccggcttctaccccgaccatgtggaactgtcttggtgggtcaacggcaaagaggtgcacagcggcgtgtgtaccgacccccagccactgaaagaacagcccgccctgaacgacagccggtactgcctgagcagcagactgagagtgtccgccaccttctggcagaacccccggaaccacttcagatgccaggtgcagttctacggcctgagcgagaacgacgagtggacccaggacagagccaagcccgtgacccagatcgtgtctgccgaagcctggggcagagccgattgcggctttaccagcgagagctaccagcagggcgtgctgagcgccaccaacctgagcgtgatcggcttcagaatcctgctgctgaaagtggccggctttaacctgctgatgaccctgcggctgtggtccagc

SEQ ID NO: 16948 - DNA, 483 bp, synthetic construct
  source 1..483: mol_type = other DNA
ttcgagcctagcgaggccgagatcagccacacccagaaagccaccctcgtgtgcctggctaccggcttctaccccgaccatgtggaactgtcttggtgggtcaacggcaaagaggtgcacagcggcgtgtgtaccgacccccagccactgaaagaacagcccgccctgaacgacagccggtactgcctgagcagcagactgagagtgtccgccaccttctggcagaacccccggaaccacttcagatgccaggtgcagttctacggcctgagcgagaacgacgagtggacccaggacagagccaagcccgtgacccagatcgtgtctgccgaagcctggggcagagccgattgcggctttaccagcgagagctaccagcagggcgtgctgagcgccaccaacctgagcgtgatcggcttcagaatcctgctgctgaaagtggccggctttaacctgctgatgaccctgcggctgtggtccagc

SEQ ID NO: 16949 - DNA, 480 bp, synthetic construct
  source 1..480: mol_type = other DNA
gagcctagcgaggccgagatcagccacacccagaaagccaccctcgtgtgcctggctaccggcttctaccccgaccatgtggaactgtcttggtgggtcaacggcaaagaggtgcacagcggcgtgtgtaccgacccccagccactgaaagaacagcccgccctgaacgacagccggtactgcctgagcagcagactgagagtgtccgccaccttctggcagaacccccggaaccacttcagatgccaggtgcagttctacggcctgagcgagaacgacgagtggacccaggacagagccaagcccgtgacccagatcgtgtctgccgaagcctggggcagagccgattgcggctttaccagcgagagctaccagcagggcgtgctgagcgccaccaacctgagcgtgatcggcttcagaatcctgctgctgaaagtggccggctttaacctgctgatgaccctgcggctgtggtccagc

SEQ ID NO: 16950 - DNA, 477 bp, synthetic construct
  source 1..477: mol_type = other DNA
cctagcgaggccgagatcagccacacccagaaagccaccctcgtgtgcctggctaccggcttctaccccgaccatgtggaactgtcttggtgggtcaacggcaaagaggtgcacagcggcgtgtgtaccgacccccagccactgaaagaacagcccgccctgaacgacagccggtactgcctgagcagcagactgagagtgtccgccaccttctggcagaacccccggaaccacttcagatgccaggtgcagttctacggcctgagcgagaacgacgagtggacccaggacagagccaagcccgtgacccagatcgtgtctgccgaagcctggggcagagccgattgcggctttaccagcgagagctaccagcagggcgtgctgagcgccaccaacctgagcgtgatcggcttcagaatcctgctgctgaaagtggccggctttaacctgctgatgaccctgcggctgtggtccagc

SEQ ID NO: 16951 - DNA, 474 bp, synthetic construct
  source 1..474: mol_type = other DNA
agcgaggccgagatcagccacacccagaaagccaccctcgtgtgcctggctaccggcttctaccccgaccatgtggaactgtcttggtgggtcaacggcaaagaggtgcacagcggcgtgtgtaccgacccccagccactgaaagaacagcccgccctgaacgacagccggtactgcctgagcagcagactgagagtgtccgccaccttctggcagaacccccggaaccacttcagatgccaggtgcagttctacggcctgagcgagaacgacgagtggacccaggacagagccaagcccgtgacccagatcgtgtctgccgaagcctggggcagagccgattgcggctttaccagcgagagctaccagcagggcgtgctgagcgccaccaacctgagcgtgatcggcttcagaatcctgctgctgaaagtggccggctttaacctgctgatgaccctgcggctgtggtccagc

SEQ ID NO: 16952 - DNA, 471 bp, synthetic construct
  source 1..471: mol_type = other DNA
gaggccgagatcagccacacccagaaagccaccctcgtgtgcctggctaccggcttctaccccgaccatgtggaactgtcttggtgggtcaacggcaaagaggtgcacagcggcgtgtgtaccgacccccagccactgaaagaacagcccgccctgaacgacagccggtactgcctgagcagcagactgagagtgtccgccaccttctggcagaacccccggaaccacttcagatgccaggtgcagttctacggcctgagcgagaacgacgagtggacccaggacagagccaagcccgtgacccagatcgtgtctgccgaagcctggggcagagccgattgcggctttaccagcgagagctaccagcagggcgtgctgagcgccaccaacctgagcgtgatcggcttcagaatcctgctgctgaaagtggccggctttaacctgctgatgaccctgcggctgtggtccagc

SEQ ID NO: 16953 - DNA, 468 bp, synthetic construct
  source 1..468: mol_type = other DNA
gccgagatcagccacacccagaaagccaccctcgtgtgcctggctaccggcttctaccccgaccatgtggaactgtcttggtgggtcaacggcaaagaggtgcacagcggcgtgtgtaccgacccccagccactgaaagaacagcccgccctgaacgacagccggtactgcctgagcagcagactgagagtgtccgccaccttctggcagaacccccggaaccacttcagatgccaggtgcagttctacggcctgagcgagaacgacgagtggacccaggacagagccaagcccgtgacccagatcgtgtctgccgaagcctggggcagagccgattgcggctttaccagcgagagctaccagcagggcgtgctgagcgccaccaacctgagcgtgatcggcttcagaatcctgctgctgaaagtggccggctttaacctgctgatgaccctgcggctgtggtccagc

SEQ ID NO: 16954 - DNA, 465 bp, synthetic construct
  source 1..465: mol_type = other DNA
gagatcagccacacccagaaagccaccctcgtgtgcctggctaccggcttctaccccgaccatgtggaactgtcttggtgggtcaacggcaaagaggtgcacagcggcgtgtgtaccgacccccagccactgaaagaacagcccgccctgaacgacagccggtactgcctgagcagcagactgagagtgtccgccaccttctggcagaacccccggaaccacttcagatgccaggtgcagttctacggcctgagcgagaacgacgagtggacccaggacagagccaagcccgtgacccagatcgtgtctgccgaagcctggggcagagccgattgcggctttaccagcgagagctaccagcagggcgtgctgagcgccaccaacctgagcgtgatcggcttcagaatcctgctgctgaaagtggccggctttaacctgctgatgaccctgcggctgtggtccagc

SEQ ID NO: 16955 - DNA, 462 bp, synthetic construct
  source 1..462: mol_type = other DNA
atcagccacacccagaaagccaccctcgtgtgcctggctaccggcttctaccccgaccatgtggaactgtcttggtgggtcaacggcaaagaggtgcacagcggcgtgtgtaccgacccccagccactgaaagaacagcccgccctgaacgacagccggtactgcctgagcagcagactgagagtgtccgccaccttctggcagaacccccggaaccacttcagatgccaggtgcagttctacggcctgagcgagaacgacgagtggacccaggacagagccaagcccgtgacccagatcgtgtctgccgaagcctggggcagagccgattgcggctttaccagcgagagctaccagcagggcgtgctgagcgccaccaacctgagcgtgatcggcttcagaatcctgctgctgaaagtggccggctttaacctgctgatgaccctgcggctgtggtccagc

SEQ ID NO: 16956 - DNA, 459 bp, synthetic construct
  source 1..459: mol_type = other DNA
agccacacccagaaagccaccctcgtgtgcctggctaccggcttctaccccgaccatgtggaactgtcttggtgggtcaacggcaaagaggtgcacagcggcgtgtgtaccgacccccagccactgaaagaacagcccgccctgaacgacagccggtactgcctgagcagcagactgagagtgtccgccaccttctggcagaacccccggaaccacttcagatgccaggtgcagttctacggcctgagcgagaacgacgagtggacccaggacagagccaagcccgtgacccagatcgtgtctgccgaagcctggggcagagccgattgcggctttaccagcgagagctaccagcagggcgtgctgagcgccaccaacctgagcgtgatcggcttcagaatcctgctgctgaaagtggccggctttaacctgctgatgaccctgcggctgtggtccagc

SEQ ID NO: 16957 - DNA, 444 bp, synthetic construct
  source 1..444: mol_type = other DNA
gccaccctcgtgtgcctggctaccggcttctaccccgaccatgtggaactgtcttggtgggtcaacggcaaagaggtgcacagcggcgtgtgtaccgacccccagccactgaaagaacagcccgccctgaacgacagccggtactgcctgagcagcagactgagagtgtccgccaccttctggcagaacccccggaaccacttcagatgccaggtgcagttctacggcctgagcgagaacgacgagtggacccaggacagagccaagcccgtgacccagatcgtgtctgccgaagcctggggcagagccgattgcggctttaccagcgagagctaccagcagggcgtgctgagcgccaccaacctgagcgtgatcggcttcagaatcctgctgctgaaagtggccggctttaacctgctgatgaccctgcggctgtggtccagc

SEQ ID NO: 16958 - DNA, 429 bp, synthetic construct
  source 1..429: mol_type = other DNA
ctggctaccggcttctaccccgaccatgtggaactgtcttggtgggtcaacggcaaagaggtgcacagcggcgtgtgtaccgacccccagccactgaaagaacagcccgccctgaacgacagccggtactgcctgagcagcagactgagagtgtccgccaccttctggcagaacccccggaaccacttcagatgccaggtgcagttctacggcctgagcgagaacgacgagtggacccaggacagagccaagcccgtgacccagatcgtgtctgccgaagcctggggcagagccgattgcggctttaccagcgagagctaccagcagggcgtgctgagcgccaccaacctgagcgtgatcggcttcagaatcctgctgctgaaagtggccggctttaacctgctgatgaccctgcggctgtggtccagc

SEQ ID NO: 16959 - DNA, 786 bp, synthetic construct
  source 1..786: mol_type = other DNA
gacctgaagaacgtgttcccacctgaggtggccgtgttcgagcctagcgaggccgagatcagccacacccagaaagccaccctcgtgtgcctggctaccggcttctaccccgaccatgtggaactgtcttggtgggtcaacggcaaagaggtgcacagcggcgtgtgtaccgacccccagccactgaaagaacagcccgccctgaacgacagccggtactgcctgagcagcagactgagagtgtccgccaccttctggcagaacccccggaaccacttcagatgccaggtgcagttctacggcctgagcgagaacgacgagtggacccaggacagagccaagcccgtgacccagatcgtgtctgccgaagcctggggcagagccgatgatgtgattaagatccactggcaggaaaagaagtccaacaccatcctgggcagccaggaaggcaacaccatgaagaccaacgacacctacatgaagttcagctggctgaccgtgcccgagaagtccctggacaaagaacacagatgcatcgtgcggcacgaaaacaacaagaacggcgtggaccaggaaatcatcttcccacccatcaagaccgatgtgattacaatggaccccaaggacaactgctccaaggacgccaacgataccctgctgctccagctgaccaacaccagcgcctactacatgtacttgttgctgctgctgaagtccgtggtgtacttcgccatcatcacatgctgcctgctgatggctatggtcaagcggaaggacagccgggga

SEQ ID NO: 16960 - DNA, 783 bp, synthetic construct
  source 1..783: mol_type = other DNA
ctgaagaacgtgttcccacctgaggtggccgtgttcgagcctagcgaggccgagatcagccacacccagaaagccaccctcgtgtgcctggctaccggcttctaccccgaccatgtggaactgtcttggtgggtcaacggcaaagaggtgcacagcggcgtgtgtaccgacccccagccactgaaagaacagcccgccctgaacgacagccggtactgcctgagcagcagactgagagtgtccgccaccttctggcagaacccccggaaccacttcagatgccaggtgcagttctacggcctgagcgagaacgacgagtggacccaggacagagccaagcccgtgacccagatcgtgtctgccgaagcctggggcagagccgatgatgtgattaagatccactggcaggaaaagaagtccaacaccatcctgggcagccaggaaggcaacaccatgaagaccaacgacacctacatgaagttcagctggctgaccgtgcccgagaagtccctggacaaagaacacagatgcatcgtgcggcacgaaaacaacaagaacggcgtggaccaggaaatcatcttcccacccatcaagaccgatgtgattacaatggaccccaaggacaactgctccaaggacgccaacgataccctgctgctccagctgaccaacaccagcgcctactacatgtacttgttgctgctgctgaagtccgtggtgtacttcgccatcatcacatgctgcctgctgatggctatggtcaagcggaaggacagccgggga

SEQ ID NO: 16961 - DNA, 780 bp, synthetic construct
  source 1..780: mol_type = other DNA
aagaacgtgttcccacctgaggtggccgtgttcgagcctagcgaggccgagatcagccacacccagaaagccaccctcgtgtgcctggctaccggcttctaccccgaccatgtggaactgtcttggtgggtcaacggcaaagaggtgcacagcggcgtgtgtaccgacccccagccactgaaagaacagcccgccctgaacgacagccggtactgcctgagcagcagactgagagtgtccgccaccttctggcagaacccccggaaccacttcagatgccaggtgcagttctacggcctgagcgagaacgacgagtggacccaggacagagccaagcccgtgacccagatcgtgtctgccgaagcctggggcagagccgatgatgtgattaagatccactggcaggaaaagaagtccaacaccatcctgggcagccaggaaggcaacaccatgaagaccaacgacacctacatgaagttcagctggctgaccgtgcccgagaagtccctggacaaagaacacagatgcatcgtgcggcacgaaaacaacaagaacggcgtggaccaggaaatcatcttcccacccatcaagaccgatgtgattacaatggaccccaaggacaactgctccaaggacgccaacgataccctgctgctccagctgaccaacaccagcgcctactacatgtacttgttgctgctgctgaagtccgtggtgtacttcgccatcatcacatgctgcctgctgatggctatggtcaagcggaaggacagccgggga

SEQ ID NO: 16962 - DNA, 777 bp, synthetic construct
  source 1..777: mol_type = other DNA
aacgtgttcccacctgaggtggccgtgttcgagcctagcgaggccgagatcagccacacccagaaagccaccctcgtgtgcctggctaccggcttctaccccgaccatgtggaactgtcttggtgggtcaacggcaaagaggtgcacagcggcgtgtgtaccgacccccagccactgaaagaacagcccgccctgaacgacagccggtactgcctgagcagcagactgagagtgtccgccaccttctggcagaacccccggaaccacttcagatgccaggtgcagttctacggcctgagcgagaacgacgagtggacccaggacagagccaagcccgtgacccagatcgtgtctgccgaagcctggggcagagccgatgatgtgattaagatccactggcaggaaaagaagtccaacaccatcctgggcagccaggaaggcaacaccatgaagaccaacgacacctacatgaagttcagctggctgaccgtgcccgagaagtccctggacaaagaacacagatgcatcgtgcggcacgaaaacaacaagaacggcgtggaccaggaaatcatcttcccacccatcaagaccgatgtgattacaatggaccccaaggacaactgctccaaggacgccaacgataccctgctgctccagctgaccaacaccagcgcctactacatgtacttgttgctgctgctgaagtccgtggtgtacttcgccatcatcacatgctgcctgctgatggctatggtcaagcggaaggacagccgggga

SEQ ID NO: 16963 - DNA, 774 bp, synthetic construct
  source 1..774: mol_type = other DNA
gtgttcccacctgaggtggccgtgttcgagcctagcgaggccgagatcagccacacccagaaagccaccctcgtgtgcctggctaccggcttctaccccgaccatgtggaactgtcttggtgggtcaacggcaaagaggtgcacagcggcgtgtgtaccgacccccagccactgaaagaacagcccgccctgaacgacagccggtactgcctgagcagcagactgagagtgtccgccaccttctggcagaacccccggaaccacttcagatgccaggtgcagttctacggcctgagcgagaacgacgagtggacccaggacagagccaagcccgtgacccagatcgtgtctgccgaagcctggggcagagccgatgatgtgattaagatccactggcaggaaaagaagtccaacaccatcctgggcagccaggaaggcaacaccatgaagaccaacgacacctacatgaagttcagctggctgaccgtgcccgagaagtccctggacaaagaacacagatgcatcgtgcggcacgaaaacaacaagaacggcgtggaccaggaaatcatcttcccacccatcaagaccgatgtgattacaatggaccccaaggacaactgctccaaggacgccaacgataccctgctgctccagctgaccaacaccagcgcctactacatgtacttgttgctgctgctgaagtccgtggtgtacttcgccatcatcacatgctgcctgctgatggctatggtcaagcggaaggacagccgggga

SEQ ID NO: 16964 - DNA, 771 bp, synthetic construct
  source 1..771: mol_type = other DNA
ttcccacctgaggtggccgtgttcgagcctagcgaggccgagatcagccacacccagaaagccaccctcgtgtgcctggctaccggcttctaccccgaccatgtggaactgtcttggtgggtcaacggcaaagaggtgcacagcggcgtgtgtaccgacccccagccactgaaagaacagcccgccctgaacgacagccggtactgcctgagcagcagactgagagtgtccgccaccttctggcagaacccccggaaccacttcagatgccaggtgcagttctacggcctgagcgagaacgacgagtggacccaggacagagccaagcccgtgacccagatcgtgtctgccgaagcctggggcagagccgatgatgtgattaagatccactggcaggaaaagaagtccaacaccatcctgggcagccaggaaggcaacaccatgaagaccaacgacacctacatgaagttcagctggctgaccgtgcccgagaagtccctggacaaagaacacagatgcatcgtgcggcacgaaaacaacaagaacggcgtggaccaggaaatcatcttcccacccatcaagaccgatgtgattacaatggaccccaaggacaactgctccaaggacgccaacgataccctgctgctccagctgaccaacaccagcgcctactacatgtacttgttgctgctgctgaagtccgtggtgtacttcgccatcatcacatgctgcctgctgatggctatggtcaagcggaaggacagccgggga

SEQ ID NO: 16965 - DNA, 768 bp, synthetic construct
  source 1..768: mol_type = other DNA
ccacctgaggtggccgtgttcgagcctagcgaggccgagatcagccacacccagaaagccaccctcgtgtgcctggctaccggcttctaccccgaccatgtggaactgtcttggtgggtcaacggcaaagaggtgcacagcggcgtgtgtaccgacccccagccactgaaagaacagcccgccctgaacgacagccggtactgcctgagcagcagactgagagtgtccgccaccttctggcagaacccccggaaccacttcagatgccaggtgcagttctacggcctgagcgagaacgacgagtggacccaggacagagccaagcccgtgacccagatcgtgtctgccgaagcctggggcagagccgatgatgtgattaagatccactggcaggaaaagaagtccaacaccatcctgggcagccaggaaggcaacaccatgaagaccaacgacacctacatgaagttcagctggctgaccgtgcccgagaagtccctggacaaagaacacagatgcatcgtgcggcacgaaaacaacaagaacggcgtggaccaggaaatcatcttcccacccatcaagaccgatgtgattacaatggaccccaaggacaactgctccaaggacgccaacgataccctgctgctccagctgaccaacaccagcgcctactacatgtacttgttgctgctgctgaagtccgtggtgtacttcgccatcatcacatgctgcctgctgatggctatggtcaagcggaaggacagccgggga

SEQ ID NO: 16966 - DNA, 765 bp, synthetic construct
  source 1..765: mol_type = other DNA
cctgaggtggccgtgttcgagcctagcgaggccgagatcagccacacccagaaagccaccctcgtgtgcctggctaccggcttctaccccgaccatgtggaactgtcttggtgggtcaacggcaaagaggtgcacagcggcgtgtgtaccgacccccagccactgaaagaacagcccgccctgaacgacagccggtactgcctgagcagcagactgagagtgtccgccaccttctggcagaacccccggaaccacttcagatgccaggtgcagttctacggcctgagcgagaacgacgagtggacccaggacagagccaagcccgtgacccagatcgtgtctgccgaagcctggggcagagccgatgatgtgattaagatccactggcaggaaaagaagtccaacaccatcctgggcagccaggaaggcaacaccatgaagaccaacgacacctacatgaagttcagctggctgaccgtgcccgagaagtccctggacaaagaacacagatgcatcgtgcggcacgaaaacaacaagaacggcgtggaccaggaaatcatcttcccacccatcaagaccgatgtgattacaatggaccccaaggacaactgctccaaggacgccaacgataccctgctgctccagctgaccaacaccagcgcctactacatgtacttgttgctgctgctgaagtccgtggtgtacttcgccatcatcacatgctgcctgctgatggctatggtcaagcggaaggacagccgggga

SEQ ID NO: 16967 - DNA, 762 bp, synthetic construct
  source 1..762: mol_type = other DNA
gaggtggccgtgttcgagcctagcgaggccgagatcagccacacccagaaagccaccctcgtgtgcctggctaccggcttctaccccgaccatgtggaactgtcttggtgggtcaacggcaaagaggtgcacagcggcgtgtgtaccgacccccagccactgaaagaacagcccgccctgaacgacagccggtactgcctgagcagcagactgagagtgtccgccaccttctggcagaacccccggaaccacttcagatgccaggtgcagttctacggcctgagcgagaacgacgagtggacccaggacagagccaagcccgtgacccagatcgtgtctgccgaagcctggggcagagccgatgatgtgattaagatccactggcaggaaaagaagtccaacaccatcctgggcagccaggaaggcaacaccatgaagaccaacgacacctacatgaagttcagctggctgaccgtgcccgagaagtccctggacaaagaacacagatgcatcgtgcggcacgaaaacaacaagaacggcgtggaccaggaaatcatcttcccacccatcaagaccgatgtgattacaatggaccccaaggacaactgctccaaggacgccaacgataccctgctgctccagctgaccaacaccagcgcctactacatgtacttgttgctgctgctgaagtccgtggtgtacttcgccatcatcacatgctgcctgctgatggctatggtcaagcggaaggacagccgggga

SEQ ID NO: 16968 - DNA, 759 bp, synthetic construct
  source 1..759: mol_type = other DNA
gtggccgtgttcgagcctagcgaggccgagatcagccacacccagaaagccaccctcgtgtgcctggctaccggcttctaccccgaccatgtggaactgtcttggtgggtcaacggcaaagaggtgcacagcggcgtgtgtaccgacccccagccactgaaagaacagcccgccctgaacgacagccggtactgcctgagcagcagactgagagtgtccgccaccttctggcagaacccccggaaccacttcagatgccaggtgcagttctacggcctgagcgagaacgacgagtggacccaggacagagccaagcccgtgacccagatcgtgtctgccgaagcctggggcagagccgatgatgtgattaagatccactggcaggaaaagaagtccaacaccatcctgggcagccaggaaggcaacaccatgaagaccaacgacacctacatgaagttcagctggctgaccgtgcccgagaagtccctggacaaagaacacagatgcatcgtgcggcacgaaaacaacaagaacggcgtggaccaggaaatcatcttcccacccatcaagaccgatgtgattacaatggaccccaaggacaactgctccaaggacgccaacgataccctgctgctccagctgaccaacaccagcgcctactacatgtacttgttgctgctgctgaagtccgtggtgtacttcgccatcatcacatgctgcctgctgatggctatggtcaagcggaaggacagccgggga

SEQ ID NO: 16969 - DNA, 756 bp, synthetic construct
  source 1..756: mol_type = other DNA
gccgtgttcgagcctagcgaggccgagatcagccacacccagaaagccaccctcgtgtgcctggctaccggcttctaccccgaccatgtggaactgtcttggtgggtcaacggcaaagaggtgcacagcggcgtgtgtaccgacccccagccactgaaagaacagcccgccctgaacgacagccggtactgcctgagcagcagactgagagtgtccgccaccttctggcagaacccccggaaccacttcagatgccaggtgcagttctacggcctgagcgagaacgacgagtggacccaggacagagccaagcccgtgacccagatcgtgtctgccgaagcctggggcagagccgatgatgtgattaagatccactggcaggaaaagaagtccaacaccatcctgggcagccaggaaggcaacaccatgaagaccaacgacacctacatgaagttcagctggctgaccgtgcccgagaagtccctggacaaagaacacagatgcatcgtgcggcacgaaaacaacaagaacggcgtggaccaggaaatcatcttcccacccatcaagaccgatgtgattacaatggaccccaaggacaactgctccaaggacgccaacgataccctgctgctccagctgaccaacaccagcgcctactacatgtacttgttgctgctgctgaagtccgtggtgtacttcgccatcatcacatgctgcctgctgatggctatggtcaagcggaaggacagccgggga

SEQ ID NO: 16970 - DNA, 792 bp, synthetic construct; identical to SEQ ID NO: 542
  source 1..792: mol_type = other DNA

SEQ ID NO: 16971 - DNA, 789 bp, synthetic construct
  source 1..789: mol_type = other DNA
gacctgaagaacgtgttcccacctgaggtggccgtgttcgagcctagcgaggccgagatcagccacacccagaaagccaccctcgtgtgcctggctaccggcttctaccccgaccatgtggaactgtcttggtgggtcaacggcaaagaggtgcacagcggcgtgtgtaccgacccccagccactgaaagaacagcccgccctgaacgacagccggtactgcctgagcagcagactgagagtgtccgccaccttctggcagaacccccggaaccacttcagatgccaggtgcagttctacggcctgagcgagaacgacgagtggacccaggacagagccaagcccgtgacccagatcgtgtctgccgaagcctggggcagagccgatgatgtgattaagatccactggcaggaaaagaagtccaacaccatcctgggcagccaggaaggcaacaccatgaagaccaacgacacctacatgaagttcagctggctgaccgtgcccgagaagtccctggacaaagaacacagatgcatcgtgcggcacgaaaacaacaagaacggcgtggaccaggaaatcatcttcccacccatcaagaccgatgtgattacaatggaccccaaggacaactgctccaaggacgccaacgataccctgctgctccagctgaccaacaccagcgcctactacatgtacttgttgctgctgctgaagtccgtggtgtacttcgccatcatcacatgctgcctgctgcggagaaccgccttctgctgcaacggcgagaagtct

SEQ ID NO: 16972 - DNA, 786 bp, synthetic construct
  source 1..786: mol_type = other DNA
ctgaagaacgtgttcccacctgaggtggccgtgttcgagcctagcgaggccgagatcagccacacccagaaagccaccctcgtgtgcctggctaccggcttctaccccgaccatgtggaactgtcttggtgggtcaacggcaaagaggtgcacagcggcgtgtgtaccgacccccagccactgaaagaacagcccgccctgaacgacagccggtactgcctgagcagcagactgagagtgtccgccaccttctggcagaacccccggaaccacttcagatgccaggtgcagttctacggcctgagcgagaacgacgagtggacccaggacagagccaagcccgtgacccagatcgtgtctgccgaagcctggggcagagccgatgatgtgattaagatccactggcaggaaaagaagtccaacaccatcctgggcagccaggaaggcaacaccatgaagaccaacgacacctacatgaagttcagctggctgaccgtgcccgagaagtccctggacaaagaacacagatgcatcgtgcggcacgaaaacaacaagaacggcgtggaccaggaaatcatcttcccacccatcaagaccgatgtgattacaatggaccccaaggacaactgctccaaggacgccaacgataccctgctgctccagctgaccaacaccagcgcctactacatgtacttgttgctgctgctgaagtccgtggtgtacttcgccatcatcacatgctgcctgctgcggagaaccgccttctgctgcaacggcgagaagtct

SEQ ID NO: 16973 - DNA, 783 bp, synthetic construct
  source 1..783: mol_type = other DNA
aagaacgtgttcccacctgaggtggccgtgttcgagcctagcgaggccgagatcagccacacccagaaagccaccctcgtgtgcctggctaccggcttctaccccgaccatgtggaactgtcttggtgggtcaacggcaaagaggtgcacagcggcgtgtgtaccgacccccagccactgaaagaacagcccgccctgaacgacagccggtactgcctgagcagcagactgagagtgtccgccaccttctggcagaacccccggaaccacttcagatgccaggtgcagttctacggcctgagcgagaacgacgagtggacccaggacagagccaagcccgtgacccagatcgtgtctgccgaagcctggggcagagccgatgatgtgattaagatccactggcaggaaaagaagtccaacaccatcctgggcagccaggaaggcaacaccatgaagaccaacgacacctacatgaagttcagctggctgaccgtgcccgagaagtccctggacaaagaacacagatgcatcgtgcggcacgaaaacaacaagaacggcgtggaccaggaaatcatcttcccacccatcaagaccgatgtgattacaatggaccccaaggacaactgctccaaggacgccaacgataccctgctgctccagctgaccaacaccagcgcctactacatgtacttgttgctgctgctgaagtccgtggtgtacttcgccatcatcacatgctgcctgctgcggagaaccgccttctgctgcaacggcgagaagtct

SEQ ID NO: 16974 - DNA, 780 bp, synthetic construct
  source 1..780: mol_type = other DNA
aacgtgttcccacctgaggtggccgtgttcgagcctagcgaggccgagatcagccacacccagaaagccaccctcgtgtgcctggctaccggcttctaccccgaccatgtggaactgtcttggtgggtcaacggcaaagaggtgcacagcggcgtgtgtaccgacccccagccactgaaagaacagcccgccctgaacgacagccggtactgcctgagcagcagactgagagtgtccgccaccttctggcagaacccccggaaccacttcagatgccaggtgcagttctacggcctgagcgagaacgacgagtggacccaggacagagccaagcccgtgacccagatcgtgtctgccgaagcctggggcagagccgatgatgtgattaagatccactggcaggaaaagaagtccaacaccatcctgggcagccaggaaggcaacaccatgaagaccaacgacacctacatgaagttcagctggctgaccgtgcccgagaagtccctggacaaagaacacagatgcatcgtgcggcacgaaaacaacaagaacggcgtggaccaggaaatcatcttcccacccatcaagaccgatgtgattacaatggaccccaaggacaactgctccaaggacgccaacgataccctgctgctccagctgaccaacaccagcgcctactacatgtacttgttgctgctgctgaagtccgtggtgtacttcgccatcatcacatgctgcctgctgcggagaaccgccttctgctgcaacggcgagaagtct

SEQ ID NO: 16975 - DNA, 777 bp, synthetic construct
  source 1..777: mol_type = other DNA
gtgttcccacctgaggtggccgtgttcgagcctagcgaggccgagatcagccacacccagaaagccaccctcgtgtgcctggctaccggcttctaccccgaccatgtggaactgtcttggtgggtcaacggcaaagaggtgcacagcggcgtgtgtaccgacccccagccactgaaagaacagcccgccctgaacgacagccggtactgcctgagcagcagactgagagtgtccgccaccttctggcagaacccccggaaccacttcagatgccaggtgcagttctacggcctgagcgagaacgacgagtggacccaggacagagccaagcccgtgacccagatcgtgtctgccgaagcctggggcagagccgatgatgtgattaagatccactggcaggaaaagaagtccaacaccatcctgggcagccaggaaggcaacaccatgaagaccaacgacacctacatgaagttcagctggctgaccgtgcccgagaagtccctggacaaagaacacagatgcatcgtgcggcacgaaaacaacaagaacggcgtggaccaggaaatcatcttcccacccatcaagaccgatgtgattacaatggaccccaaggacaactgctccaaggacgccaacgataccctgctgctccagctgaccaacaccagcgcctactacatgtacttgttgctgctgctgaagtccgtggtgtacttcgccatcatcacatgctgcctgctgcggagaaccgccttctgctgcaacggcgagaagtct

SEQ ID NO: 16976 - DNA, 774 bp, synthetic construct
  source 1..774: mol_type = other DNA
ttcccacctgaggtggccgtgttcgagcctagcgaggccgagatcagccacacccagaaagccaccctcgtgtgcctggctaccggcttctaccccgaccatgtggaactgtcttggtgggtcaacggcaaagaggtgcacagcggcgtgtgtaccgacccccagccactgaaagaacagcccgccctgaacgacagccggtactgcctgagcagcagactgagagtgtccgccaccttctggcagaacccccggaaccacttcagatgccaggtgcagttctacggcctgagcgagaacgacgagtggacccaggacagagccaagcccgtgacccagatcgtgtctgccgaagcctggggcagagccgatgatgtgattaagatccactggcaggaaaagaagtccaacaccatcctgggcagccaggaaggcaacaccatgaagaccaacgacacctacatgaagttcagctggctgaccgtgcccgagaagtccctggacaaagaacacagatgcatcgtgcggcacgaaaacaacaagaacggcgtggaccaggaaatcatcttcccacccatcaagaccgatgtgattacaatggaccccaaggacaactgctccaaggacgccaacgataccctgctgctccagctgaccaacaccagcgcctactacatgtacttgttgctgctgctgaagtccgtggtgtacttcgccatcatcacatgctgcctgctgcggagaaccgccttctgctgcaacggcgagaagtct

SEQ ID NO: 16977 - DNA, 771 bp, synthetic construct
  source 1..771: mol_type = other DNA
ccacctgaggtggccgtgttcgagcctagcgaggccgagatcagccacacccagaaagccaccctcgtgtgcctggctaccggcttctaccccgaccatgtggaactgtcttggtgggtcaacggcaaagaggtgcacagcggcgtgtgtaccgacccccagccactgaaagaacagcccgccctgaacgacagccggtactgcctgagcagcagactgagagtgtccgccaccttctggcagaacccccggaaccacttcagatgccaggtgcagttctacggcctgagcgagaacgacgagtggacccaggacagagccaagcccgtgacccagatcgtgtctgccgaagcctggggcagagccgatgatgtgattaagatccactggcaggaaaagaagtccaacaccatcctgggcagccaggaaggcaacaccatgaagaccaacgacacctacatgaagttcagctggctgaccgtgcccgagaagtccctggacaaagaacacagatgcatcgtgcggcacgaaaacaacaagaacggcgtggaccaggaaatcatcttcccacccatcaagaccgatgtgattacaatggaccccaaggacaactgctccaaggacgccaacgataccctgctgctccagctgaccaacaccagcgcctactacatgtacttgttgctgctgctgaagtccgtggtgtacttcgccatcatcacatgctgcctgctgcggagaaccgccttctgctgcaacggcgagaagtct

SEQ ID NO: 16978 - DNA, 768 bp, synthetic construct
  source 1..768: mol_type = other DNA
cctgaggtggccgtgttcgagcctagcgaggccgagatcagccacacccagaaagccaccctcgtgtgcctggctaccggcttctaccccgaccatgtggaactgtcttggtgggtcaacggcaaagaggtgcacagcggcgtgtgtaccgacccccagccactgaaagaacagcccgccctgaacgacagccggtactgcctgagcagcagactgagagtgtccgccaccttctggcagaacccccggaaccacttcagatgccaggtgcagttctacggcctgagcgagaacgacgagtggacccaggacagagccaagcccgtgacccagatcgtgtctgccgaagcctggggcagagccgatgatgtgattaagatccactggcaggaaaagaagtccaacaccatcctgggcagccaggaaggcaacaccatgaagaccaacgacacctacatgaagttcagctggctgaccgtgcccgagaagtccctggacaaagaacacagatgcatcgtgcggcacgaaaacaacaagaacggcgtggaccaggaaatcatcttcccacccatcaagaccgatgtgattacaatggaccccaaggacaactgctccaaggacgccaacgataccctgctgctccagctgaccaacaccagcgcctactacatgtacttgttgctgctgctgaagtccgtggtgtacttcgccatcatcacatgctgcctgctgcggagaaccgccttctgctgcaacggcgagaagtct

SEQ ID NO: 16979 - DNA, 765 bp, synthetic construct
  source 1..765: mol_type = other DNA
gaggtggccgtgttcgagcctagcgaggccgagatcagccacacccagaaagccaccctcgtgtgcctggctaccggcttctaccccgaccatgtggaactgtcttggtgggtcaacggcaaagaggtgcacagcggcgtgtgtaccgacccccagccactgaaagaacagcccgccctgaacgacagccggtactgcctgagcagcagactgagagtgtccgccaccttctggcagaacccccggaaccacttcagatgccaggtgcagttctacggcctgagcgagaacgacgagtggacccaggacagagccaagcccgtgacccagatcgtgtctgccgaagcctggggcagagccgatgatgtgattaagatccactggcaggaaaagaagtccaacaccatcctgggcagccaggaaggcaacaccatgaagaccaacgacacctacatgaagttcagctggctgaccgtgcccgagaagtccctggacaaagaacacagatgcatcgtgcggcacgaaaacaacaagaacggcgtggaccaggaaatcatcttcccacccatcaagaccgatgtgattacaatggaccccaaggacaactgctccaaggacgccaacgataccctgctgctccagctgaccaacaccagcgcctactacatgtacttgttgctgctgctgaagtccgtggtgtacttcgccatcatcacatgctgcctgctgcggagaaccgccttctgctgcaacggcgagaagtct

SEQ ID NO: 16980 - DNA, 762 bp, synthetic construct
  source 1..762: mol_type = other DNA
gtggccgtgttcgagcctagcgaggccgagatcagccacacccagaaagccaccctcgtgtgcctggctaccggcttctaccccgaccatgtggaactgtcttggtgggtcaacggcaaagaggtgcacagcggcgtgtgtaccgacccccagccactgaaagaacagcccgccctgaacgacagccggtactgcctgagcagcagactgagagtgtccgccaccttctggcagaacccccggaaccacttcagatgccaggtgcagttctacggcctgagcgagaacgacgagtggacccaggacagagccaagcccgtgacccagatcgtgtctgccgaagcctggggcagagccgatgatgtgattaagatccactggcaggaaaagaagtccaacaccatcctgggcagccaggaaggcaacaccatgaagaccaacgacacctacatgaagttcagctggctgaccgtgcccgagaagtccctggacaaagaacacagatgcatcgtgcggcacgaaaacaacaagaacggcgtggaccaggaaatcatcttcccacccatcaagaccgatgtgattacaatggaccccaaggacaactgctccaaggacgccaacgataccctgctgctccagctgaccaacaccagcgcctactacatgtacttgttgctgctgctgaagtccgtggtgtacttcgccatcatcacatgctgcctgctgcggagaaccgccttctgctgcaacggcgagaagtct

SEQ ID NO: 16981 - DNA, 522 bp, synthetic construct; identical to SEQ ID NO: 531
  source 1..522: mol_type = other DNA

SEQ ID NO: 16982 - DNA, 519 bp, synthetic construct; identical to SEQ ID NO: 16936
  source 1..519: mol_type = other DNA

SEQ ID NO: 16983 - DNA, 516 bp, synthetic construct; identical to SEQ ID NO: 16937
  source 1..516: mol_type = other DNA

SEQ ID NO: 16984 - DNA, 513 bp, synthetic construct; identical to SEQ ID NO: 16938
  source 1..513: mol_type = other DNA

SEQ ID NO: 16985 - DNA, 510 bp, synthetic construct; identical to SEQ ID NO: 16939
  source 1..510: mol_type = other DNA

SEQ ID NO: 16986 - DNA, 507 bp, synthetic construct; identical to SEQ ID NO: 16940
  source 1..507: mol_type = other DNA

SEQ ID NO: 16987 - DNA, 504 bp, synthetic construct; identical to SEQ ID NO: 16941
  source 1..504: mol_type = other DNA

SEQ ID NO: 16988 - DNA, 501 bp, synthetic construct; identical to SEQ ID NO: 16942
  source 1..501: mol_type = other DNA

SEQ ID NO: 16989 - DNA, 498 bp, synthetic construct; identical to SEQ ID NO: 16943
  source 1..498: mol_type = other DNA

SEQ ID NO: 16990 - DNA, 495 bp, synthetic construct; identical to SEQ ID NO: 16944
  source 1..495: mol_type = other DNA

SEQ ID NO: 16991 - DNA, 492 bp, synthetic construct; identical to SEQ ID NO: 16945
  source 1..492: mol_type = other DNA

SEQ ID NO: 16992 - DNA, 510 bp, synthetic construct
  source 1..510: mol_type = other DNA
gcctctacaaagggaccctccgtgtttcctctggctcccagcagcaagtctacaagcggaggaacagccgctctgggctgcctggtcaaggattactttcccgagcctgtgaccgtgtcctggaatagcggagcactgacaagcggcgtgcacacctttccagccgtgctgcaaagcagcggcctgtactctctgagcagcgtggtcacagtgcctagctctagcctgggcacccagacctacatctgcaatgtgaaccacaagcctagcaacaccaaggtggacaagagagtggaacccaagagctgtcccatcaagaccgatgtgattacaatggaccccaaggacaactgctccaaggacgccaacgataccctgctgctccagctgaccaacaccagcgcctactacatgtacttgttgctgctgctgaagtccgtggtgtacttcgccatcatcacatgctgcctgctgcggagaaccgccttctgctgcaacggcgagaagtct

SEQ ID NO: 16993 - DNA, 507 bp, synthetic construct
  source 1..507: mol_type = other DNA
tctacaaagggaccctccgtgtttcctctggctcccagcagcaagtctacaagcggaggaacagccgctctgggctgcctggtcaaggattactttcccgagcctgtgaccgtgtcctggaatagcggagcactgacaagcggcgtgcacacctttccagccgtgctgcaaagcagcggcctgtactctctgagcagcgtggtcacagtgcctagctctagcctgggcacccagacctacatctgcaatgtgaaccacaagcctagcaacaccaaggtggacaagagagtggaacccaagagctgtcccatcaagaccgatgtgattacaatggaccccaaggacaactgctccaaggacgccaacgataccctgctgctccagctgaccaacaccagcgcctactacatgtacttgttgctgctgctgaagtccgtggtgtacttcgccatcatcacatgctgcctgctgcggagaaccgccttctgctgcaacggcgagaagtct

SEQ ID NO: 16994 - DNA, 504 bp, synthetic construct
  source 1..504: mol_type = other DNA
acaaagggaccctccgtgtttcctctggctcccagcagcaagtctacaagcggaggaacagccgctctgggctgcctggtcaaggattactttcccgagcctgtgaccgtgtcctggaatagcggagcactgacaagcggcgtgcacacctttccagccgtgctgcaaagcagcggcctgtactctctgagcagcgtggtcacagtgcctagctctagcctgggcacccagacctacatctgcaatgtgaaccacaagcctagcaacaccaaggtggacaagagagtggaacccaagagctgtcccatcaagaccgatgtgattacaatggaccccaaggacaactgctccaaggacgccaacgataccctgctgctccagctgaccaacaccagcgcctactacatgtacttgttgctgctgctgaagtccgtggtgtacttcgccatcatcacatgctgcctgctgcggagaaccgccttctgctgcaacggcgagaagtct

SEQ ID NO: 16995 - DNA, 501 bp, synthetic construct
  source 1..501: mol_type = other DNA
aagggaccctccgtgtttcctctggctcccagcagcaagtctacaagcggaggaacagccgctctgggctgcctggtcaaggattactttcccgagcctgtgaccgtgtcctggaatagcggagcactgacaagcggcgtgcacacctttccagccgtgctgcaaagcagcggcctgtactctctgagcagcgtggtcacagtgcctagctctagcctgggcacccagacctacatctgcaatgtgaaccacaagcctagcaacaccaaggtggacaagagagtggaacccaagagctgtcccatcaagaccgatgtgattacaatggaccccaaggacaactgctccaaggacgccaacgataccctgctgctccagctgaccaacaccagcgcctactacatgtacttgttgctgctgctgaagtccgtggtgtacttcgccatcatcacatgctgcctgctgcggagaaccgccttctgctgcaacggcgagaagtct

SEQ ID NO: 16996 - DNA, 498 bp, synthetic construct
  source 1..498: mol_type = other DNA
ggaccctccgtgtttcctctggctcccagcagcaagtctacaagcggaggaacagccgctctgggctgcctggtcaaggattactttcccgagcctgtgaccgtgtcctggaatagcggagcactgacaagcggcgtgcacacctttccagccgtgctgcaaagcagcggcctgtactctctgagcagcgtggtcacagtgcctagctctagcctgggcacccagacctacatctgcaatgtgaaccacaagcctagcaacaccaaggtggacaagagagtggaacccaagagctgtcccatcaagaccgatgtgattacaatggaccccaaggacaactgctccaaggacgccaacgataccctgctgctccagctgaccaacaccagcgcctactacatgtacttgttgctgctgctgaagtccgtggtgtacttcgccatcatcacatgctgcctgctgcggagaaccgccttctgctgcaacggcgagaagtct

SEQ ID NO: 16997 - DNA, 495 bp, synthetic construct
  source 1..495: mol_type = other DNA
ccctccgtgtttcctctggctcccagcagcaagtctacaagcggaggaacagccgctctgggctgcctggtcaaggattactttcccgagcctgtgaccgtgtcctggaatagcggagcactgacaagcggcgtgcacacctttccagccgtgctgcaaagcagcggcctgtactctctgagcagcgtggtcacagtgcctagctctagcctgggcacccagacctacatctgcaatgtgaaccacaagcctagcaacaccaaggtggacaagagagtggaacccaagagctgtcccatcaagaccgatgtgattacaatggaccccaaggacaactgctccaaggacgccaacgataccctgctgctccagctgaccaacaccagcgcctactacatgtacttgttgctgctgctgaagtccgtggtgtacttcgccatcatcacatgctgcctgctgcggagaaccgccttctgctgcaacggcgagaagtct

SEQ ID NO: 16998 - DNA, 492 bp, synthetic construct
  source 1..492: mol_type = other DNA
tccgtgtttcctctggctcccagcagcaagtctacaagcggaggaacagccgctctgggctgcctggtcaaggattactttcccgagcctgtgaccgtgtcctggaatagcggagcactgacaagcggcgtgcacacctttccagccgtgctgcaaagcagcggcctgtactctctgagcagcgtggtcacagtgcctagctctagcctgggcacccagacctacatctgcaatgtgaaccacaagcctagcaacaccaaggtggacaagagagtggaacccaagagctgtcccatcaagaccgatgtgattacaatggaccccaaggacaactgctccaaggacgccaacgataccctgctgctccagctgaccaacaccagcgcctactacatgtacttgttgctgctgctgaagtccgtggtgtacttcgccatcatcacatgctgcctgctgcggagaaccgccttctgctgcaacggcgagaagtct

SEQ ID NO: 16999 - DNA, 489 bp, synthetic construct
  source 1..489: mol_type = other DNA
gtgtttcctctggctcccagcagcaagtctacaagcggaggaacagccgctctgggctgcctggtcaaggattactttcccgagcctgtgaccgtgtcctggaatagcggagcactgacaagcggcgtgcacacctttccagccgtgctgcaaagcagcggcctgtactctctgagcagcgtggtcacagtgcctagctctagcctgggcacccagacctacatctgcaatgtgaaccacaagcctagcaacaccaaggtggacaagagagtggaacccaagagctgtcccatcaagaccgatgtgattacaatggaccccaaggacaactgctccaaggacgccaacgataccctgctgctccagctgaccaacaccagcgcctactacatgtacttgttgctgctgctgaagtccgtggtgtacttcgccatcatcacatgctgcctgctgcggagaaccgccttctgctgcaacggcgagaagtct

SEQ ID NO: 17000 - DNA, 486 bp, synthetic construct
  source 1..486: mol_type = other DNA
tttcctctggctcccagcagcaagtctacaagcggaggaacagccgctctgggctgcctggtcaaggattactttcccgagcctgtgaccgtgtcctggaatagcggagcactgacaagcggcgtgcacacctttccagccgtgctgcaaagcagcggcctgtactctctgagcagcgtggtcacagtgcctagctctagcctgggcacccagacctacatctgcaatgtgaaccacaagcctagcaacaccaaggtggacaagagagtggaacccaagagctgtcccatcaagaccgatgtgattacaatggaccccaaggacaactgctccaaggacgccaacgataccctgctgctccagctgaccaacaccagcgcctactacatgtacttgttgctgctgctgaagtccgtggtgtacttcgccatcatcacatgctgcctgctgcggagaaccgccttctgctgcaacggcgagaagtct

SEQ ID NO: 17001 - DNA, 483 bp, synthetic construct
  source 1..483: mol_type = other DNA
cctctggctcccagcagcaagtctacaagcggaggaacagccgctctgggctgcctggtcaaggattactttcccgagcctgtgaccgtgtcctggaatagcggagcactgacaagcggcgtgcacacctttccagccgtgctgcaaagcagcggcctgtactctctgagcagcgtggtcacagtgcctagctctagcctgggcacccagacctacatctgcaatgtgaaccacaagcctagcaacaccaaggtggacaagagagtggaacccaagagctgtcccatcaagaccgatgtgattacaatggaccccaaggacaactgctccaaggacgccaacgataccctgctgctccagctgaccaacaccagcgcctactacatgtacttgttgctgctgctgaagtccgtggtgtacttcgccatcatcacatgctgcctgctgcggagaaccgccttctgctgcaacggcgagaagtct

SEQ ID NO: 17002 - DNA, 480 bp, synthetic construct
  source 1..480: mol_type = other DNA
ctggctcccagcagcaagtctacaagcggaggaacagccgctctgggctgcctggtcaaggattactttcccgagcctgtgaccgtgtcctggaatagcggagcactgacaagcggcgtgcacacctttccagccgtgctgcaaagcagcggcctgtactctctgagcagcgtggtcacagtgcctagctctagcctgggcacccagacctacatctgcaatgtgaaccacaagcctagcaacaccaaggtggacaagagagtggaacccaagagctgtcccatcaagaccgatgtgattacaatggaccccaaggacaactgctccaaggacgccaacgataccctgctgctccagctgaccaacaccagcgcctactacatgtacttgttgctgctgctgaagtccgtggtgtacttcgccatcatcacatgctgcctgctgcggagaaccgccttctgctgcaacggcgagaagtct

SEQ ID NO: 17003 - DNA, 420 bp, synthetic construct; identical to SEQ ID NO: 458
  source 1..420: mol_type = other DNA

SEQ ID NO: 17004 - DNA, 417 bp, synthetic construct
  source 1..417: mol_type = other DNA
cagaaccctgatcctgccgtgtaccagctgcgggatagcaagagcagcgacaagagcgtgtgtctgttcaccgacttcgacagccagaccaacgtgtcccagagcaaggactccgacgtgtacatcaccgataagtgcgtgctggacatgcggagcatggacttcaagagcaactccgccgtggcctggtccaacaagtccgatttcgcctgcgccaacgccttcaacaacagcattatccccgaggacacattcttcccaagccccgagagcagctgcgacgtgaagctggtggaaaagagcttcgagacagacaccaacctgaacttccagaacctgagcgtgatcggcttcagaatcctgctgctgaaagtggccggctttaacctgctgatgaccctgcggctgtggtccagc

SEQ ID NO: 17005 - DNA, 414 bp, synthetic construct
  source 1..414: mol_type = other DNA
aaccctgatcctgccgtgtaccagctgcgggatagcaagagcagcgacaagagcgtgtgtctgttcaccgacttcgacagccagaccaacgtgtcccagagcaaggactccgacgtgtacatcaccgataagtgcgtgctggacatgcggagcatggacttcaagagcaactccgccgtggcctggtccaacaagtccgatttcgcctgcgccaacgccttcaacaacagcattatccccgaggacacattcttcccaagccccgagagcagctgcgacgtgaagctggtggaaaagagcttcgagacagacaccaacctgaacttccagaacctgagcgtgatcggcttcagaatcctgctgctgaaagtggccggctttaacctgctgatgaccctgcggctgtggtccagc

SEQ ID NO: 17006 - DNA, 411 bp, synthetic construct; identical to SEQ ID NO: 459
  source 1..411: mol_type = other DNA

SEQ ID NO: 17007 - DNA, 408 bp, synthetic construct
  source 1..408: mol_type = other DNA
gatcctgccgtgtaccagctgcgggatagcaagagcagcgacaagagcgtgtgtctgttcaccgacttcgacagccagaccaacgtgtcccagagcaaggactccgacgtgtacatcaccgataagtgcgtgctggacatgcggagcatggacttcaagagcaactccgccgtggcctggtccaacaagtccgatttcgcctgcgccaacgccttcaacaacagcattatccccgaggacacattcttcccaagccccgagagcagctgcgacgtgaagctggtggaaaagagcttcgagacagacaccaacctgaacttccagaacctgagcgtgatcggcttcagaatcctgctgctgaaagtggccggctttaacctgctgatgaccctgcggctgtggtccagc

SEQ ID NO: 17008 - DNA, 405 bp, synthetic construct
  source 1..405: mol_type = other DNA
cctgccgtgtaccagctgcgggatagcaagagcagcgacaagagcgtgtgtctgttcaccgacttcgacagccagaccaacgtgtcccagagcaaggactccgacgtgtacatcaccgataagtgcgtgctggacatgcggagcatggacttcaagagcaactccgccgtggcctggtccaacaagtccgatttcgcctgcgccaacgccttcaacaacagcattatccccgaggacacattcttcccaagccccgagagcagctgcgacgtgaagctggtggaaaagagcttcgagacagacaccaacctgaacttccagaacctgagcgtgatcggcttcagaatcctgctgctgaaagtggccggctttaacctgctgatgaccctgcggctgtggtccagc

SEQ ID NO: 17009 - DNA, 402 bp, synthetic construct
  source 1..402: mol_type = other DNA
gccgtgtaccagctgcgggatagcaagagcagcgacaagagcgtgtgtctgttcaccgacttcgacagccagaccaacgtgtcccagagcaaggactccgacgtgtacatcaccgataagtgcgtgctggacatgcggagcatggacttcaagagcaactccgccgtggcctggtccaacaagtccgatttcgcctgcgccaacgccttcaacaacagcattatccccgaggacacattcttcccaagccccgagagcagctgcgacgtgaagctggtggaaaagagcttcgagacagacaccaacctgaacttccagaacctgagcgtgatcggcttcagaatcctgctgctgaaagtggccggctttaacctgctgatgaccctgcggctgtggtccagc

SEQ ID NO: 17010 - DNA, 399 bp, synthetic construct
  source 1..399: mol_type = other DNA
gtgtaccagctgcgggatagcaagagcagcgacaagagcgtgtgtctgttcaccgacttcgacagccagaccaacgtgtcccagagcaaggactccgacgtgtacatcaccgataagtgcgtgctggacatgcggagcatggacttcaagagcaactccgccgtggcctggtccaacaagtccgatttcgcctgcgccaacgccttcaacaacagcattatccccgaggacacattcttcccaagccccgagagcagctgcgacgtgaagctggtggaaaagagcttcgagacagacaccaacctgaacttccagaacctgagcgtgatcggcttcagaatcctgctgctgaaagtggccggctttaacctgctgatgaccctgcggctgtggtccagc

SEQ ID NO: 17011 - DNA, 396 bp, synthetic construct
  source 1..396: mol_type = other DNA
taccagctgcgggatagcaagagcagcgacaagagcgtgtgtctgttcaccgacttcgacagccagaccaacgtgtcccagagcaaggactccgacgtgtacatcaccgataagtgcgtgctggacatgcggagcatggacttcaagagcaactccgccgtggcctggtccaacaagtccgatttcgcctgcgccaacgccttcaacaacagcattatccccgaggacacattcttcccaagccccgagagcagctgcgacgtgaagctggtggaaaagagcttcgagacagacaccaacctgaacttccagaacctgagcgtgatcggcttcagaatcctgctgctgaaagtggccggctttaacctgctgatgaccctgcggctgtggtccagc

SEQ ID NO: 17012 - DNA, 393 bp, synthetic construct
  source 1..393: mol_type = other DNA
cagctgcgggatagcaagagcagcgacaagagcgtgtgtctgttcaccgacttcgacagccagaccaacgtgtcccagagcaaggactccgacgtgtacatcaccgataagtgcgtgctggacatgcggagcatggacttcaagagcaactccgccgtggcctggtccaacaagtccgatttcgcctgcgccaacgccttcaacaacagcattatccccgaggacacattcttcccaagccccgagagcagctgcgacgtgaagctggtggaaaagagcttcgagacagacaccaacctgaacttccagaacctgagcgtgatcggcttcagaatcctgctgctgaaagtggccggctttaacctgctgatgaccctgcggctgtggtccagc

SEQ ID NO: 17013 - DNA, 390 bp, synthetic construct
  source 1..390: mol_type = other DNA
ctgcgggatagcaagagcagcgacaagagcgtgtgtctgttcaccgacttcgacagccagaccaacgtgtcccagagcaaggactccgacgtgtacatcaccgataagtgcgtgctggacatgcggagcatggacttcaagagcaactccgccgtggcctggtccaacaagtccgatttcgcctgcgccaacgccttcaacaacagcattatccccgaggacacattcttcccaagccccgagagcagctgcgacgtgaagctggtggaaaagagcttcgagacagacaccaacctgaacttccagaacctgagcgtgatcggcttcagaatcctgctgctgaaagtggccggctttaacctgctgatgaccctgcggctgtggtccagc

SEQ ID NO: 17014 - DNA, 387 bp, synthetic construct
  source 1..387: mol_type = other DNA
cgggatagcaagagcagcgacaagagcgtgtgtctgttcaccgacttcgacagccagaccaacgtgtcccagagcaaggactccgacgtgtacatcaccgataagtgcgtgctggacatgcggagcatggacttcaagagcaactccgccgtggcctggtccaacaagtccgatttcgcctgcgccaacgccttcaacaacagcattatccccgaggacacattcttcccaagccccgagagcagctgcgacgtgaagctggtggaaaagagcttcgagacagacaccaacctgaacttccagaacctgagcgtgatcggcttcagaatcctgctgctgaaagtggccggctttaacctgctgatgaccctgcggctgtggtccagc

SEQ ID NO: 17015 - DNA, 384 bp, synthetic construct
  source 1..384: mol_type = other DNA
gatagcaagagcagcgacaagagcgtgtgtctgttcaccgacttcgacagccagaccaacgtgtcccagagcaaggactccgacgtgtacatcaccgataagtgcgtgctggacatgcggagcatggacttcaagagcaactccgccgtggcctggtccaacaagtccgatttcgcctgcgccaacgccttcaacaacagcattatccccgaggacacattcttcccaagccccgagagcagctgcgacgtgaagctggtggaaaagagcttcgagacagacaccaacctgaacttccagaacctgagcgtgatcggcttcagaatcctgctgctgaaagtggccggctttaacctgctgatgaccctgcggctgtggtccagc

SEQ ID NO: 17016 - DNA, 381 bp, synthetic construct
  source 1..381: mol_type = other DNA
agcaagagcagcgacaagagcgtgtgtctgttcaccgacttcgacagccagaccaacgtgtcccagagcaaggactccgacgtgtacatcaccgataagtgcgtgctggacatgcggagcatggacttcaagagcaactccgccgtggcctggtccaacaagtccgatttcgcctgcgccaacgccttcaacaacagcattatccccgaggacacattcttcccaagccccgagagcagctgcgacgtgaagctggtggaaaagagcttcgagacagacaccaacctgaacttccagaacctgagcgtgatcggcttcagaatcctgctgctgaaagtggccggctttaacctgctgatgaccctgcggctgtggtccagc

SEQ ID NO: 17017 - DNA, 378 bp, synthetic construct
  source 1..378: mol_type = other DNA
aagagcagcgacaagagcgtgtgtctgttcaccgacttcgacagccagaccaacgtgtcccagagcaaggactccgacgtgtacatcaccgataagtgcgtgctggacatgcggagcatggacttcaagagcaactccgccgtggcctggtccaacaagtccgatttcgcctgcgccaacgccttcaacaacagcattatccccgaggacacattcttcccaagccccgagagcagctgcgacgtgaagctggtggaaaagagcttcgagacagacaccaacctgaacttccagaacctgagcgtgatcggcttcagaatcctgctgctgaaagtggccggctttaacctgctgatgaccctgcggctgtggtccagc

SEQ ID NO: 17018 - DNA, 375 bp, synthetic construct
  source 1..375: mol_type = other DNA
agcagcgacaagagcgtgtgtctgttcaccgacttcgacagccagaccaacgtgtcccagagcaaggactccgacgtgtacatcaccgataagtgcgtgctggacatgcggagcatggacttcaagagcaactccgccgtggcctggtccaacaagtccgatttcgcctgcgccaacgccttcaacaacagcattatccccgaggacacattcttcccaagccccgagagcagctgcgacgtgaagctggtggaaaagagcttcgagacagacaccaacctgaacttccagaacctgagcgtgatcggcttcagaatcctgctgctgaaagtggccggctttaacctgctgatgaccctgcggctgtggtccagc

SEQ ID NO: 17019 - DNA, 372 bp, synthetic construct
  source 1..372: mol_type = other DNA
agcgacaagagcgtgtgtctgttcaccgacttcgacagccagaccaacgtgtcccagagcaaggactccgacgtgtacatcaccgataagtgcgtgctggacatgcggagcatggacttcaagagcaactccgccgtggcctggtccaacaagtccgatttcgcctgcgccaacgccttcaacaacagcattatccccgaggacacattcttcccaagccccgagagcagctgcgacgtgaagctggtggaaaagagcttcgagacagacaccaacctgaacttccagaacctgagcgtgatcggcttcagaatcctgctgctgaaagtggccggctttaacctgctgatgaccctgcggctgtggtccagc

SEQ ID NO: 17020 - DNA, 369 bp, synthetic construct
  source 1..369: mol_type = other DNA
gacaagagcgtgtgtctgttcaccgacttcgacagccagaccaacgtgtcccagagcaaggactccgacgtgtacatcaccgataagtgcgtgctggacatgcggagcatggacttcaagagcaactccgccgtggcctggtccaacaagtccgatttcgcctgcgccaacgccttcaacaacagcattatccccgaggacacattcttcccaagccccgagagcagctgcgacgtgaagctggtggaaaagagcttcgagacagacaccaacctgaacttccagaacctgagcgtgatcggcttcagaatcctgctgctgaaagtggccggctttaacctgctgatgaccctgcggctgtggtccagc

SEQ ID NO: 17021 - DNA, 366 bp, synthetic construct
  source 1..366: mol_type = other DNA
aagagcgtgtgtctgttcaccgacttcgacagccagaccaacgtgtcccagagcaaggactccgacgtgtacatcaccgataagtgcgtgctggacatgcggagcatggacttcaagagcaactccgccgtggcctggtccaacaagtccgatttcgcctgcgccaacgccttcaacaacagcattatccccgaggacacattcttcccaagccccgagagcagctgcgacgtgaagctggtggaaaagagcttcgagacagacaccaacctgaacttccagaacctgagcgtgatcggcttcagaatcctgctgctgaaagtggccggctttaacctgctgatgaccctgcggctgtggtccagc

SEQ ID NO: 17022 - DNA, 363 bp, synthetic construct
  source 1..363: mol_type = other DNA
agcgtgtgtctgttcaccgacttcgacagccagaccaacgtgtcccagagcaaggactccgacgtgtacatcaccgataagtgcgtgctggacatgcggagcatggacttcaagagcaactccgccgtggcctggtccaacaagtccgatttcgcctgcgccaacgccttcaacaacagcattatccccgaggacacattcttcccaagccccgagagcagctgcgacgtgaagctggtggaaaagagcttcgagacagacaccaacctgaacttccagaacctgagcgtgatcggcttcagaatcctgctgctgaaagtggccggctttaacctgctgatgaccctgcggctgtggtccagc

SEQ ID NO: 17023 - DNA, 360 bp, synthetic construct
  source 1..360: mol_type = other DNA
gtgtgtctgttcaccgacttcgacagccagaccaacgtgtcccagagcaaggactccgacgtgtacatcaccgataagtgcgtgctggacatgcggagcatggacttcaagagcaactccgccgtggcctggtccaacaagtccgatttcgcctgcgccaacgccttcaacaacagcattatccccgaggacacattcttcccaagccccgagagcagctgcgacgtgaagctggtggaaaagagcttcgagacagacaccaacctgaacttccagaacctgagcgtgatcggcttcagaatcctgctgctgaaagtggccggctttaacctgctgatgaccctgcggctgtggtccagc

SEQ ID NO: 17024 - DNA, 357 bp, synthetic construct
  source 1..357: mol_type = other DNA
tgtctgttcaccgacttcgacagccagaccaacgtgtcccagagcaaggactccgacgtgtacatcaccgataagtgcgtgctggacatgcggagcatggacttcaagagcaactccgccgtggcctggtccaacaagtccgatttcgcctgcgccaacgccttcaacaacagcattatccccgaggacacattcttcccaagccccgagagcagctgcgacgtgaagctggtggaaaagagcttcgagacagacaccaacctgaacttccagaacctgagcgtgatcggcttcagaatcctgctgctgaaagtggccggctttaacctgctgatgaccctgcggctgtggtccagc

SEQ ID NO: 17025 - DNA, 354 bp, synthetic construct
  source 1..354: mol_type = other DNA
ctgttcaccgacttcgacagccagaccaacgtgtcccagagcaaggactccgacgtgtacatcaccgataagtgcgtgctggacatgcggagcatggacttcaagagcaactccgccgtggcctggtccaacaagtccgatttcgcctgcgccaacgccttcaacaacagcattatccccgaggacacattcttcccaagccccgagagcagctgcgacgtgaagctggtggaaaagagcttcgagacagacaccaacctgaacttccagaacctgagcgtgatcggcttcagaatcctgctgctgaaagtggccggctttaacctgctgatgaccctgcggctgtggtccagc

SEQ ID NO: 17026 - DNA, 351 bp, synthetic construct
  source 1..351: mol_type = other DNA
ttcaccgacttcgacagccagaccaacgtgtcccagagcaaggactccgacgtgtacatcaccgataagtgcgtgctggacatgcggagcatggacttcaagagcaactccgccgtggcctggtccaacaagtccgatttcgcctgcgccaacgccttcaacaacagcattatccccgaggacacattcttcccaagccccgagagcagctgcgacgtgaagctggtggaaaagagcttcgagacagacaccaacctgaacttccagaacctgagcgtgatcggcttcagaatcctgctgctgaaagtggccggctttaacctgctgatgaccctgcggctgtggtccagc

SEQ ID NO: 17027 - DNA, 348 bp, synthetic construct
  source 1..348: mol_type = other DNA
accgacttcgacagccagaccaacgtgtcccagagcaaggactccgacgtgtacatcaccgataagtgcgtgctggacatgcggagcatggacttcaagagcaactccgccgtggcctggtccaacaagtccgatttcgcctgcgccaacgccttcaacaacagcattatccccgaggacacattcttcccaagccccgagagcagctgcgacgtgaagctggtggaaaagagcttcgagacagacaccaacctgaacttccagaacctgagcgtgatcggcttcagaatcctgctgctgaaagtggccggctttaacctgctgatgaccctgcggctgtggtccagc

SEQ ID NO: 17028 - DNA, 345 bp, synthetic construct
  source 1..345: mol_type = other DNA
gacttcgacagccagaccaacgtgtcccagagcaaggactccgacgtgtacatcaccgataagtgcgtgctggacatgcggagcatggacttcaagagcaactccgccgtggcctggtccaacaagtccgatttcgcctgcgccaacgccttcaacaacagcattatccccgaggacacattcttcccaagccccgagagcagctgcgacgtgaagctggtggaaaagagcttcgagacagacaccaacctgaacttccagaacctgagcgtgatcggcttcagaatcctgctgctgaaagtggccggctttaacctgctgatgaccctgcggctgtggtccagc

SEQ ID NO: 17029 - DNA, 342 bp, synthetic construct
  source 1..342: mol_type = other DNA
ttcgacagccagaccaacgtgtcccagagcaaggactccgacgtgtacatcaccgataagtgcgtgctggacatgcggagcatggacttcaagagcaactccgccgtggcctggtccaacaagtccgatttcgcctgcgccaacgccttcaacaacagcattatccccgaggacacattcttcccaagccccgagagcagctgcgacgtgaagctggtggaaaagagcttcgagacagacaccaacctgaacttccagaacctgagcgtgatcggcttcagaatcctgctgctgaaagtggccggctttaacctgctgatgaccctgcggctgtggtccagc

SEQ ID NO: 17030 - DNA, 339 bp, synthetic construct
  source 1..339: mol_type = other DNA
gacagccagaccaacgtgtcccagagcaaggactccgacgtgtacatcaccgataagtgcgtgctggacatgcggagcatggacttcaagagcaactccgccgtggcctggtccaacaagtccgatttcgcctgcgccaacgccttcaacaacagcattatccccgaggacacattcttcccaagccccgagagcagctgcgacgtgaagctggtggaaaagagcttcgagacagacaccaacctgaacttccagaacctgagcgtgatcggcttcagaatcctgctgctgaaagtggccggctttaacctgctgatgaccctgcggctgtggtccagc

SEQ ID NO: 17031 - DNA, 336 bp, synthetic construct
  source 1..336: mol_type = other DNA
agccagaccaacgtgtcccagagcaaggactccgacgtgtacatcaccgataagtgcgtgctggacatgcggagcatggacttcaagagcaactccgccgtggcctggtccaacaagtccgatttcgcctgcgccaacgccttcaacaacagcattatccccgaggacacattcttcccaagccccgagagcagctgcgacgtgaagctggtggaaaagagcttcgagacagacaccaacctgaacttccagaacctgagcgtgatcggcttcagaatcctgctgctgaaagtggccggctttaacctgctgatgaccctgcggctgtggtccagc

SEQ ID NO: 17032 - DNA, 333 bp, synthetic construct
  source 1..333: mol_type = other DNA
cagaccaacgtgtcccagagcaaggactccgacgtgtacatcaccgataagtgcgtgctggacatgcggagcatggacttcaagagcaactccgccgtggcctggtccaacaagtccgatttcgcctgcgccaacgccttcaacaacagcattatccccgaggacacattcttcccaagccccgagagcagctgcgacgtgaagctggtggaaaagagcttcgagacagacaccaacctgaacttccagaacctgagcgtgatcggcttcagaatcctgctgctgaaagtggccggctttaacctgctgatgaccctgcggctgtggtccagc

SEQ ID NO: 17033 - DNA, 330 bp, synthetic construct
  source 1..330: mol_type = other DNA
accaacgtgtcccagagcaaggactccgacgtgtacatcaccgataagtgcgtgctggacatgcggagcatggacttcaagagcaactccgccgtggcctggtccaacaagtccgatttcgcctgcgccaacgccttcaacaacagcattatccccgaggacacattcttcccaagccccgagagcagctgcgacgtgaagctggtggaaaagagcttcgagacagacaccaacctgaacttccagaacctgagcgtgatcggcttcagaatcctgctgctgaaagtggccggctttaacctgctgatgaccctgcggctgtggtccagc

SEQ ID NO: 17034 - DNA, 327 bp, synthetic construct
  source 1..327: mol_type = other DNA
aacgtgtcccagagcaaggactccgacgtgtacatcaccgataagtgcgtgctggacatgcggagcatggacttcaagagcaactccgccgtggcctggtccaacaagtccgatttcgcctgcgccaacgccttcaacaacagcattatccccgaggacacattcttcccaagccccgagagcagctgcgacgtgaagctggtggaaaagagcttcgagacagacaccaacctgaacttccagaacctgagcgtgatcggcttcagaatcctgctgctgaaagtggccggctttaacctgctgatgaccctgcggctgtggtccagc

SEQ ID NO: 17035 - DNA, 324 bp, synthetic construct
  source 1..324: mol_type = other DNA
gtgtcccagagcaaggactccgacgtgtacatcaccgataagtgcgtgctggacatgcggagcatggacttcaagagcaactccgccgtggcctggtccaacaagtccgatttcgcctgcgccaacgccttcaacaacagcattatccccgaggacacattcttcccaagccccgagagcagctgcgacgtgaagctggtggaaaagagcttcgagacagacaccaacctgaacttccagaacctgagcgtgatcggcttcagaatcctgctgctgaaagtggccggctttaacctgctgatgaccctgcggctgtggtccagc

SEQ ID NO: 17036 - DNA, 321 bp, synthetic construct
  source 1..321: mol_type = other DNA
tcccagagcaaggactccgacgtgtacatcaccgataagtgcgtgctggacatgcggagcatggacttcaagagcaactccgccgtggcctggtccaacaagtccgatttcgcctgcgccaacgccttcaacaacagcattatccccgaggacacattcttcccaagccccgagagcagctgcgacgtgaagctggtggaaaagagcttcgagacagacaccaacctgaacttccagaacctgagcgtgatcggcttcagaatcctgctgctgaaagtggccggctttaacctgctgatgaccctgcggctgtggtccagc

SEQ ID NO: 17037 - DNA, 318 bp, synthetic construct
  source 1..318: mol_type = other DNA
cagagcaaggactccgacgtgtacatcaccgataagtgcgtgctggacatgcggagcatggacttcaagagcaactccgccgtggcctggtccaacaagtccgatttcgcctgcgccaacgccttcaacaacagcattatccccgaggacacattcttcccaagccccgagagcagctgcgacgtgaagctggtggaaaagagcttcgagacagacaccaacctgaacttccagaacctgagcgtgatcggcttcagaatcctgctgctgaaagtggccggctttaacctgctgatgaccctgcggctgtggtccagc

SEQ ID NO: 17038 - DNA, 315 bp, synthetic construct
  source 1..315: mol_type = other DNA
agcaaggactccgacgtgtacatcaccgataagtgcgtgctggacatgcggagcatggacttcaagagcaactccgccgtggcctggtccaacaagtccgatttcgcctgcgccaacgccttcaacaacagcattatccccgaggacacattcttcccaagccccgagagcagctgcgacgtgaagctggtggaaaagagcttcgagacagacaccaacctgaacttccagaacctgagcgtgatcggcttcagaatcctgctgctgaaagtggccggctttaacctgctgatgaccctgcggctgtggtccagc

SEQ ID NO: 17039 - DNA, 312 bp, synthetic construct
  source 1..312: mol_type = other DNA
aaggactccgacgtgtacatcaccgataagtgcgtgctggacatgcggagcatggacttcaagagcaactccgccgtggcctggtccaacaagtccgatttcgcctgcgccaacgccttcaacaacagcattatccccgaggacacattcttcccaagccccgagagcagctgcgacgtgaagctggtggaaaagagcttcgagacagacaccaacctgaacttccagaacctgagcgtgatcggcttcagaatcctgctgctgaaagtggccggctttaacctgctgatgaccctgcggctgtggtccagc

SEQ ID NO: 17040 - DNA, 309 bp, synthetic construct
  source 1..309: mol_type = other DNA
gactccgacgtgtacatcaccgataagtgcgtgctggacatgcggagcatggacttcaagagcaactccgccgtggcctggtccaacaagtccgatttcgcctgcgccaacgccttcaacaacagcattatccccgaggacacattcttcccaagccccgagagcagctgcgacgtgaagctggtggaaaagagcttcgagacagacaccaacctgaacttccagaacctgagcgtgatcggcttcagaatcctgctgctgaaagtggccggctttaacctgctgatgaccctgcggctgtggtccagc

SEQ ID NO: 17041 - DNA, 306 bp, synthetic construct
  source 1..306: mol_type = other DNA
tccgacgtgtacatcaccgataagtgcgtgctggacatgcggagcatggacttcaagagcaactccgccgtggcctggtccaacaagtccgatttcgcctgcgccaacgccttcaacaacagcattatccccgaggacacattcttcccaagccccgagagcagctgcgacgtgaagctggtggaaaagagcttcgagacagacaccaacctgaacttccagaacctgagcgtgatcggcttcagaatcctgctgctgaaagtggccggctttaacctgctgatgaccctgcggctgtggtccagc

SEQ ID NO: 17042 - DNA, 303 bp, synthetic construct
  source 1..303: mol_type = other DNA
gacgtgtacatcaccgataagtgcgtgctggacatgcggagcatggacttcaagagcaactccgccgtggcctggtccaacaagtccgatttcgcctgcgccaacgccttcaacaacagcattatccccgaggacacattcttcccaagccccgagagcagctgcgacgtgaagctggtggaaaagagcttcgagacagacaccaacctgaacttccagaacctgagcgtgatcggcttcagaatcctgctgctgaaagtggccggctttaacctgctgatgaccctgcggctgtggtccagc

SEQ ID NO: 17043 - DNA, 300 bp, synthetic construct
  source 1..300: mol_type = other DNA
gtgtacatcaccgataagtgcgtgctggacatgcggagcatggacttcaagagcaactccgccgtggcctggtccaacaagtccgatttcgcctgcgccaacgccttcaacaacagcattatccccgaggacacattcttcccaagccccgagagcagctgcgacgtgaagctggtggaaaagagcttcgagacagacaccaacctgaacttccagaacctgagcgtgatcggcttcagaatcctgctgctgaaagtggccggctttaacctgctgatgaccctgcggctgtggtccagc

SEQ ID NO: 17044 - DNA, 297 bp, synthetic construct
  source 1..297: mol_type = other DNA
tacatcaccgataagtgcgtgctggacatgcggagcatggacttcaagagcaactccgccgtggcctggtccaacaagtccgatttcgcctgcgccaacgccttcaacaacagcattatccccgaggacacattcttcccaagccccgagagcagctgcgacgtgaagctggtggaaaagagcttcgagacagacaccaacctgaacttccagaacctgagcgtgatcggcttcagaatcctgctgctgaaagtggccggctttaacctgctgatgaccctgcggctgtggtccagc

SEQ ID NO: 17045 - DNA, 294 bp, synthetic construct
  source 1..294: mol_type = other DNA
atcaccgataagtgcgtgctggacatgcggagcatggacttcaagagcaactccgccgtggcctggtccaacaagtccgatttcgcctgcgccaacgccttcaacaacagcattatccccgaggacacattcttcccaagccccgagagcagctgcgacgtgaagctggtggaaaagagcttcgagacagacaccaacctgaacttccagaacctgagcgtgatcggcttcagaatcctgctgctgaaagtggccggctttaacctgctgatgaccctgcggctgtggtccagc

SEQ ID NO: 17046 - DNA, 291 bp, synthetic construct
  source 1..291: mol_type = other DNA
accgataagtgcgtgctggacatgcggagcatggacttcaagagcaactccgccgtggcctggtccaacaagtccgatttcgcctgcgccaacgccttcaacaacagcattatccccgaggacacattcttcccaagccccgagagcagctgcgacgtgaagctggtggaaaagagcttcgagacagacaccaacctgaacttccagaacctgagcgtgatcggcttcagaatcctgctgctgaaagtggccggctttaacctgctgatgaccctgcggctgtggtccagc

SEQ ID NO: 17047 - DNA, 288 bp, synthetic construct
  source 1..288: mol_type = other DNA
gataagtgcgtgctggacatgcggagcatggacttcaagagcaactccgccgtggcctggtccaacaagtccgatttcgcctgcgccaacgccttcaacaacagcattatccccgaggacacattcttcccaagccccgagagcagctgcgacgtgaagctggtggaaaagagcttcgagacagacaccaacctgaacttccagaacctgagcgtgatcggcttcagaatcctgctgctgaaagtggccggctttaacctgctgatgaccctgcggctgtggtccagc

SEQ ID NO: 17048 - DNA, 282 bp, synthetic construct
  source 1..282: mol_type = other DNA
tgcgtgctggacatgcggagcatggacttcaagagcaactccgccgtggcctggtccaacaagtccgatttcgcctgcgccaacgccttcaacaacagcattatccccgaggacacattcttcccaagccccgagagcagctgcgacgtgaagctggtggaaaagagcttcgagacagacaccaacctgaacttccagaacctgagcgtgatcggcttcagaatcctgctgctgaaagtggccggctttaacctgctgatgaccctgcggctgtggtccagc

SEQ ID NO: 17049 - DNA, 279 bp, synthetic construct
  source 1..279: mol_type = other DNA
gtgctggacatgcggagcatggacttcaagagcaactccgccgtggcctggtccaacaagtccgatttcgcctgcgccaacgccttcaacaacagcattatccccgaggacacattcttcccaagccccgagagcagctgcgacgtgaagctggtggaaaagagcttcgagacagacaccaacctgaacttccagaacctgagcgtgatcggcttcagaatcctgctgctgaaagtggccggctttaacctgctgatgaccctgcggctgtggtccagc

SEQ ID NO: 17050 - DNA, 276 bp, synthetic construct
  source 1..276: mol_type = other DNA
ctggacatgcggagcatggacttcaagagcaactccgccgtggcctggtccaacaagtccgatttcgcctgcgccaacgccttcaacaacagcattatccccgaggacacattcttcccaagccccgagagcagctgcgacgtgaagctggtggaaaagagcttcgagacagacaccaacctgaacttccagaacctgagcgtgatcggcttcagaatcctgctgctgaaagtggccggctttaacctgctgatgaccctgcggctgtggtccagc

SEQ ID NO: 17051 - DNA, 273 bp, synthetic construct
  source 1..273: mol_type = other DNA
gacatgcggagcatggacttcaagagcaactccgccgtggcctggtccaacaagtccgatttcgcctgcgccaacgccttcaacaacagcattatccccgaggacacattcttcccaagccccgagagcagctgcgacgtgaagctggtggaaaagagcttcgagacagacaccaacctgaacttccagaacctgagcgtgatcggcttcagaatcctgctgctgaaagtggccggctttaacctgctgatgaccctgcggctgtggtccagc

SEQ ID NO: 17052 - DNA, 270 bp, synthetic construct
  source 1..270: mol_type = other DNA
atgcggagcatggacttcaagagcaactccgccgtggcctggtccaacaagtccgatttcgcctgcgccaacgccttcaacaacagcattatccccgaggacacattcttcccaagccccgagagcagctgcgacgtgaagctggtggaaaagagcttcgagacagacaccaacctgaacttccagaacctgagcgtgatcggcttcagaatcctgctgctgaaagtggccggctttaacctgctgatgaccctgcggctgtggtccagc

SEQ ID NO: 17053 - DNA, 267 bp, synthetic construct
  source 1..267: mol_type = other DNA
cggagcatggacttcaagagcaactccgccgtggcctggtccaacaagtccgatttcgcctgcgccaacgccttcaacaacagcattatccccgaggacacattcttcccaagccccgagagcagctgcgacgtgaagctggtggaaaagagcttcgagacagacaccaacctgaacttccagaacctgagcgtgatcggcttcagaatcctgctgctgaaagtggccggctttaacctgctgatgaccctgcggctgtggtccagc

SEQ ID NO: 17054 - DNA, 264 bp, synthetic construct
  source 1..264: mol_type = other DNA
agcatggacttcaagagcaactccgccgtggcctggtccaacaagtccgatttcgcctgcgccaacgccttcaacaacagcattatccccgaggacacattcttcccaagccccgagagcagctgcgacgtgaagctggtggaaaagagcttcgagacagacaccaacctgaacttccagaacctgagcgtgatcggcttcagaatcctgctgctgaaagtggccggctttaacctgctgatgaccctgcggctgtggtccagc

SEQ ID NO: 17055 - DNA, 261 bp, synthetic construct
  source 1..261: mol_type = other DNA
atggacttcaagagcaactccgccgtggcctggtccaacaagtccgatttcgcctgcgccaacgccttcaacaacagcattatccccgaggacacattcttcccaagccccgagagcagctgcgacgtgaagctggtggaaaagagcttcgagacagacaccaacctgaacttccagaacctgagcgtgatcggcttcagaatcctgctgctgaaagtggccggctttaacctgctgatgaccctgcggctgtggtccagc

SEQ ID NO: 17056 - DNA, 258 bp, synthetic construct
  source 1..258: mol_type = other DNA
gacttcaagagcaactccgccgtggcctggtccaacaagtccgatttcgcctgcgccaacgccttcaacaacagcattatccccgaggacacattcttcccaagccccgagagcagctgcgacgtgaagctggtggaaaagagcttcgagacagacaccaacctgaacttccagaacctgagcgtgatcggcttcagaatcctgctgctgaaagtggccggctttaacctgctgatgaccctgcggctgtggtccagc

SEQ ID NO: 17057 - DNA, 255 bp, synthetic construct
  source 1..255: mol_type = other DNA
ttcaagagcaactccgccgtggcctggtccaacaagtccgatttcgcctgcgccaacgccttcaacaacagcattatccccgaggacacattcttcccaagccccgagagcagctgcgacgtgaagctggtggaaaagagcttcgagacagacaccaacctgaacttccagaacctgagcgtgatcggcttcagaatcctgctgctgaaagtggccggctttaacctgctgatgaccctgcggctgtggtccagc

SEQ ID NO: 17058 - DNA, 252 bp, synthetic construct
  source 1..252: mol_type = other DNA
aagagcaactccgccgtggcctggtccaacaagtccgatttcgcctgcgccaacgccttcaacaacagcattatccccgaggacacattcttcccaagccccgagagcagctgcgacgtgaagctggtggaaaagagcttcgagacagacaccaacctgaacttccagaacctgagcgtgatcggcttcagaatcctgctgctgaaagtggccggctttaacctgctgatgaccctgcggctgtggtccagc

SEQ ID NO: 17059 - DNA, 249 bp, synthetic construct
  source 1..249: mol_type = other DNA
agcaactccgccgtggcctggtccaacaagtccgatttcgcctgcgccaacgccttcaacaacagcattatccccgaggacacattcttcccaagccccgagagcagctgcgacgtgaagctggtggaaaagagcttcgagacagacaccaacctgaacttccagaacctgagcgtgatcggcttcagaatcctgctgctgaaagtggccggctttaacctgctgatgaccctgcggctgtggtccagc

SEQ ID NO: 17060 - DNA, 246 bp, synthetic construct
  source 1..246: mol_type = other DNA
aactccgccgtggcctggtccaacaagtccgatttcgcctgcgccaacgccttcaacaacagcattatccccgaggacacattcttcccaagccccgagagcagctgcgacgtgaagctggtggaaaagagcttcgagacagacaccaacctgaacttccagaacctgagcgtgatcggcttcagaatcctgctgctgaaagtggccggctttaacctgctgatgaccctgcggctgtggtccagc

SEQ ID NO: 17061 - DNA, 243 bp, synthetic construct
  source 1..243: mol_type = other DNA
tccgccgtggcctggtccaacaagtccgatttcgcctgcgccaacgccttcaacaacagcattatccccgaggacacattcttcccaagccccgagagcagctgcgacgtgaagctggtggaaaagagcttcgagacagacaccaacctgaacttccagaacctgagcgtgatcggcttcagaatcctgctgctgaaagtggccggctttaacctgctgatgaccctgcggctgtggtccagc

SEQ ID NO: 17062 - DNA, 240 bp, synthetic construct
  source 1..240: mol_type = other DNA
gccgtggcctggtccaacaagtccgatttcgcctgcgccaacgccttcaacaacagcattatccccgaggacacattcttcccaagccccgagagcagctgcgacgtgaagctggtggaaaagagcttcgagacagacaccaacctgaacttccagaacctgagcgtgatcggcttcagaatcctgctgctgaaagtggccggctttaacctgctgatgaccctgcggctgtggtccagc

SEQ ID NO: 17063 - DNA, 237 bp, synthetic construct
  source 1..237: mol_type = other DNA
gtggcctggtccaacaagtccgatttcgcctgcgccaacgccttcaacaacagcattatccccgaggacacattcttcccaagccccgagagcagctgcgacgtgaagctggtggaaaagagcttcgagacagacaccaacctgaacttccagaacctgagcgtgatcggcttcagaatcctgctgctgaaagtggccggctttaacctgctgatgaccctgcggctgtggtccagc

SEQ ID NO: 17064 - DNA, 234 bp, synthetic construct
  source 1..234: mol_type = other DNA
gcctggtccaacaagtccgatttcgcctgcgccaacgccttcaacaacagcattatccccgaggacacattcttcccaagccccgagagcagctgcgacgtgaagctggtggaaaagagcttcgagacagacaccaacctgaacttccagaacctgagcgtgatcggcttcagaatcctgctgctgaaagtggccggctttaacctgctgatgaccctgcggctgtggtccagc

SEQ ID NO: 17065 - DNA, 231 bp, synthetic construct
  source 1..231: mol_type = other DNA
tggtccaacaagtccgatttcgcctgcgccaacgccttcaacaacagcattatccccgaggacacattcttcccaagccccgagagcagctgcgacgtgaagctggtggaaaagagcttcgagacagacaccaacctgaacttccagaacctgagcgtgatcggcttcagaatcctgctgctgaaagtggccggctttaacctgctgatgaccctgcggctgtggtccagc

SEQ ID NO: 17066 - DNA, 228 bp, synthetic construct
  source 1..228: mol_type = other DNA
tccaacaagtccgatttcgcctgcgccaacgccttcaacaacagcattatccccgaggacacattcttcccaagccccgagagcagctgcgacgtgaagctggtggaaaagagcttcgagacagacaccaacctgaacttccagaacctgagcgtgatcggcttcagaatcctgctgctgaaagtggccggctttaacctgctgatgaccctgcggctgtggtccagc

SEQ ID NO: 17067 - DNA, 225 bp, synthetic construct
  source 1..225: mol_type = other DNA
aacaagtccgatttcgcctgcgccaacgccttcaacaacagcattatccccgaggacacattcttcccaagccccgagagcagctgcgacgtgaagctggtggaaaagagcttcgagacagacaccaacctgaacttccagaacctgagcgtgatcggcttcagaatcctgctgctgaaagtggccggctttaacctgctgatgaccctgcggctgtggtccagc

SEQ ID NO: 17068 - DNA, 222 bp, synthetic construct
  source 1..222: mol_type = other DNA
aagtccgatttcgcctgcgccaacgccttcaacaacagcattatccccgaggacacattcttcccaagccccgagagcagctgcgacgtgaagctggtggaaaagagcttcgagacagacaccaacctgaacttccagaacctgagcgtgatcggcttcagaatcctgctgctgaaagtggccggctttaacctgctgatgaccctgcggctgtggtccagc

SEQ ID NO: 17069 - DNA, 219 bp, synthetic construct
  source 1..219: mol_type = other DNA
tccgatttcgcctgcgccaacgccttcaacaacagcattatccccgaggacacattcttcccaagccccgagagcagctgcgacgtgaagctggtggaaaagagcttcgagacagacaccaacctgaacttccagaacctgagcgtgatcggcttcagaatcctgctgctgaaagtggccggctttaacctgctgatgaccctgcggctgtggtccagc

SEQ ID NO: 17070 - DNA, 216 bp, synthetic construct
  source 1..216: mol_type = other DNA
gatttcgcctgcgccaacgccttcaacaacagcattatccccgaggacacattcttcccaagccccgagagcagctgcgacgtgaagctggtggaaaagagcttcgagacagacaccaacctgaacttccagaacctgagcgtgatcggcttcagaatcctgctgctgaaagtggccggctttaacctgctgatgaccctgcggctgtggtccagc

SEQ ID NO: 17071 - DNA, 213 bp, synthetic construct
  source 1..213: mol_type = other DNA
ttcgcctgcgccaacgccttcaacaacagcattatccccgaggacacattcttcccaagccccgagagcagctgcgacgtgaagctggtggaaaagagcttcgagacagacaccaacctgaacttccagaacctgagcgtgatcggcttcagaatcctgctgctgaaagtggccggctttaacctgctgatgaccctgcggctgtggtccagc

SEQ ID NO: 17072 - DNA, 210 bp, synthetic construct
  source 1..210: mol_type = other DNA
gcctgcgccaacgccttcaacaacagcattatccccgaggacacattcttcccaagccccgagagcagctgcgacgtgaagctggtggaaaagagcttcgagacagacaccaacctgaacttccagaacctgagcgtgatcggcttcagaatcctgctgctgaaagtggccggctttaacctgctgatgaccctgcggctgtggtccagc

SEQ ID NO: 17073 - DNA, 207 bp, synthetic construct
  source 1..207: mol_type = other DNA
tgcgccaacgccttcaacaacagcattatccccgaggacacattcttcccaagccccgagagcagctgcgacgtgaagctggtggaaaagagcttcgagacagacaccaacctgaacttccagaacctgagcgtgatcggcttcagaatcctgctgctgaaagtggccggctttaacctgctgatgaccctgcggctgtggtccagc

SEQ ID NO: 17074 - DNA, 204 bp, synthetic construct
  source 1..204: mol_type = other DNA
gccaacgccttcaacaacagcattatccccgaggacacattcttcccaagccccgagagcagctgcgacgtgaagctggtggaaaagagcttcgagacagacaccaacctgaacttccagaacctgagcgtgatcggcttcagaatcctgctgctgaaagtggccggctttaacctgctgatgaccctgcggctgtggtccagc

SEQ ID NO: 17075 - DNA, 201 bp, synthetic construct
  source 1..201: mol_type = other DNA
aacgccttcaacaacagcattatccccgaggacacattcttcccaagccccgagagcagctgcgacgtgaagctggtggaaaagagcttcgagacagacaccaacctgaacttccagaacctgagcgtgatcggcttcagaatcctgctgctgaaagtggccggctttaacctgctgatgaccctgcggctgtggtccagc

SEQ ID NO: 17076 - DNA, 198 bp, synthetic construct
  source 1..198: mol_type = other DNA
gccttcaacaacagcattatccccgaggacacattcttcccaagccccgagagcagctgcgacgtgaagctggtggaaaagagcttcgagacagacaccaacctgaacttccagaacctgagcgtgatcggcttcagaatcctgctgctgaaagtggccggctttaacctgctgatgaccctgcggctgtggtccagc

SEQ ID NO: 17077 - DNA, 195 bp, synthetic construct
  source 1..195: mol_type = other DNA
ttcaacaacagcattatccccgaggacacattcttcccaagccccgagagcagctgcgacgtgaagctggtggaaaagagcttcgagacagacaccaacctgaacttccagaacctgagcgtgatcggcttcagaatcctgctgctgaaagtggccggctttaacctgctgatgaccctgcggctgtggtccagc

SEQ ID NO: 17078 - DNA, 192 bp, synthetic construct
  source 1..192: mol_type = other DNA
aacaacagcattatccccgaggacacattcttcccaagccccgagagcagctgcgacgtgaagctggtggaaaagagcttcgagacagacaccaacctgaacttccagaacctgagcgtgatcggcttcagaatcctgctgctgaaagtggccggctttaacctgctgatgaccctgcggctgtggtccagc

SEQ ID NO: 17079 - DNA, 189 bp, synthetic construct
  source 1..189: mol_type = other DNA
aacagcattatccccgaggacacattcttcccaagccccgagagcagctgcgacgtgaagctggtggaaaagagcttcgagacagacaccaacctgaacttccagaacctgagcgtgatcggcttcagaatcctgctgctgaaagtggccggctttaacctgctgatgaccctgcggctgtggtccagc

SEQ ID NO: 17080 - DNA, 186 bp, synthetic construct
  source 1..186: mol_type = other DNA
agcattatccccgaggacacattcttcccaagccccgagagcagctgcgacgtgaagctggtggaaaagagcttcgagacagacaccaacctgaacttccagaacctgagcgtgatcggcttcagaatcctgctgctgaaagtggccggctttaacctgctgatgaccctgcggctgtggtccagc

SEQ ID NO: 17081 - DNA, 183 bp, synthetic construct
  source 1..183: mol_type = other DNA
attatccccgaggacacattcttcccaagccccgagagcagctgcgacgtgaagctggtggaaaagagcttcgagacagacaccaacctgaacttccagaacctgagcgtgatcggcttcagaatcctgctgctgaaagtggccggctttaacctgctgatgaccctgcggctgtggtccagc

SEQ ID NO: 17082 - DNA, 180 bp, synthetic construct; identical to SEQ ID NO: 514
  source 1..180: mol_type = other DNA

SEQ ID NO: 17083 - DNA, 177 bp, synthetic construct
  source 1..177: mol_type = other DNA
cccgaggacacattcttcccaagccccgagagcagctgcgacgtgaagctggtggaaaagagcttcgagacagacaccaacctgaacttccagaacctgagcgtgatcggcttcagaatcctgctgctgaaagtggccggctttaacctgctgatgaccctgcggctgtggtccagc

SEQ ID NO: 17084 - DNA, 174 bp, synthetic construct
  source 1..174: mol_type = other DNA
gaggacacattcttcccaagccccgagagcagctgcgacgtgaagctggtggaaaagagcttcgagacagacaccaacctgaacttccagaacctgagcgtgatcggcttcagaatcctgctgctgaaagtggccggctttaacctgctgatgaccctgcggctgtggtccagc

SEQ ID NO: 17085 - DNA, 171 bp, synthetic construct
  source 1..171: mol_type = other DNA
gacacattcttcccaagccccgagagcagctgcgacgtgaagctggtggaaaagagcttcgagacagacaccaacctgaacttccagaacctgagcgtgatcggcttcagaatcctgctgctgaaagtggccggctttaacctgctgatgaccctgcggctgtggtccagc

SEQ ID NO: 17086 - DNA, 168 bp, synthetic construct
  source 1..168: mol_type = other DNA
acattcttcccaagccccgagagcagctgcgacgtgaagctggtggaaaagagcttcgagacagacaccaacctgaacttccagaacctgagcgtgatcggcttcagaatcctgctgctgaaagtggccggctttaacctgctgatgaccctgcggctgtggtccagc

SEQ ID NO: 17087 - DNA, 165 bp, synthetic construct
  source 1..165: mol_type = other DNA
ttcttcccaagccccgagagcagctgcgacgtgaagctggtggaaaagagcttcgagacagacaccaacctgaacttccagaacctgagcgtgatcggcttcagaatcctgctgctgaaagtggccggctttaacctgctgatgaccctgcggctgtggtccagc

SEQ ID NO: 17088 - DNA, 162 bp, synthetic construct
  source 1..162: mol_type = other DNA
ttcccaagccccgagagcagctgcgacgtgaagctggtggaaaagagcttcgagacagacaccaacctgaacttccagaacctgagcgtgatcggcttcagaatcctgctgctgaaagtggccggctttaacctgctgatgaccctgcggctgtggtccagc

SEQ ID NO: 17089 - DNA, 159 bp, synthetic construct
  source 1..159: mol_type = other DNA
ccaagccccgagagcagctgcgacgtgaagctggtggaaaagagcttcgagacagacaccaacctgaacttccagaacctgagcgtgatcggcttcagaatcctgctgctgaaagtggccggctttaacctgctgatgaccctgcggctgtggtccagc

SEQ ID NO: 17090 - DNA, 156 bp, synthetic construct
  source 1..156: mol_type = other DNA
agccccgagagcagctgcgacgtgaagctggtggaaaagagcttcgagacagacaccaacctgaacttccagaacctgagcgtgatcggcttcagaatcctgctgctgaaagtggccggctttaacctgctgatgaccctgcggctgtggtccagc

SEQ ID NO: 17091 - DNA, 153 bp, synthetic construct
  source 1..153: mol_type = other DNA
cccgagagcagctgcgacgtgaagctggtggaaaagagcttcgagacagacaccaacctgaacttccagaacctgagcgtgatcggcttcagaatcctgctgctgaaagtggccggctttaacctgctgatgaccctgcggctgtggtccagc

SEQ ID NO: 17092 - DNA, 150 bp, synthetic construct; identical to SEQ ID NO: 515
  source 1..150: mol_type = other DNA

SEQ ID NO: 17093 - DNA, 147 bp, synthetic construct
  source 1..147: mol_type = other DNA
agcagctgcgacgtgaagctggtggaaaagagcttcgagacagacaccaacctgaacttccagaacctgagcgtgatcggcttcagaatcctgctgctgaaagtggccggctttaacctgctgatgaccctgcggctgtggtccagc

SEQ ID NO: 17094 - DNA, 144 bp, synthetic construct
  source 1..144: mol_type = other DNA
agctgcgacgtgaagctggtggaaaagagcttcgagacagacaccaacctgaacttccagaacctgagcgtgatcggcttcagaatcctgctgctgaaagtggccggctttaacctgctgatgaccctgcggctgtggtccagc

SEQ ID NO: 17095 - DNA, 141 bp, synthetic construct
  source 1..141: mol_type = other DNA
tgcgacgtgaagctggtggaaaagagcttcgagacagacaccaacctgaacttccagaacctgagcgtgatcggcttcagaatcctgctgctgaaagtggccggctttaacctgctgatgaccctgcggctgtggtccagc

SEQ ID NO: 17096 - DNA, 138 bp, synthetic construct
  source 1..138: mol_type = other DNA
gacgtgaagctggtggaaaagagcttcgagacagacaccaacctgaacttccagaacctgagcgtgatcggcttcagaatcctgctgctgaaagtggccggctttaacctgctgatgaccctgcggctgtggtccagc

SEQ ID NO: 17097 - DNA, 135 bp, synthetic construct
  source 1..135: mol_type = other DNA
gtgaagctggtggaaaagagcttcgagacagacaccaacctgaacttccagaacctgagcgtgatcggcttcagaatcctgctgctgaaagtggccggctttaacctgctgatgaccctgcggctgtggtccagc

SEQ ID NO: 17098 - DNA, 132 bp, synthetic construct
  source 1..132: mol_type = other DNA
aagctggtggaaaagagcttcgagacagacaccaacctgaacttccagaacctgagcgtgatcggcttcagaatcctgctgctgaaagtggccggctttaacctgctgatgaccctgcggctgtggtccagc

SEQ ID NO: 17099 - DNA, 129 bp, synthetic construct
  source 1..129: mol_type = other DNA
ctggtggaaaagagcttcgagacagacaccaacctgaacttccagaacctgagcgtgatcggcttcagaatcctgctgctgaaagtggccggctttaacctgctgatgaccctgcggctgtggtccagc

SEQ ID NO: 17100 - DNA, 126 bp, synthetic construct
  source 1..126: mol_type = other DNA
gtggaaaagagcttcgagacagacaccaacctgaacttccagaacctgagcgtgatcggcttcagaatcctgctgctgaaagtggccggctttaacctgctgatgaccctgcggctgtggtccagc

SEQ ID NO: 17101 - DNA, 123 bp, synthetic construct
  source 1..123: mol_type = other DNA
gaaaagagcttcgagacagacaccaacctgaacttccagaacctgagcgtgatcggcttcagaatcctgctgctgaaagtggccggctttaacctgctgatgaccctgcggctgtggtccagc

SEQ ID NO: 17102 - DNA, 120 bp, synthetic construct
  source 1..120: mol_type = other DNA
aagagcttcgagacagacaccaacctgaacttccagaacctgagcgtgatcggcttcagaatcctgctgctgaaagtggccggctttaacctgctgatgaccctgcggctgtggtccagc

SEQ ID NO: 17103 - DNA, 117 bp, synthetic construct
  source 1..117: mol_type = other DNA
agcttcgagacagacaccaacctgaacttccagaacctgagcgtgatcggcttcagaatcctgctgctgaaagtggccggctttaacctgctgatgaccctgcggctgtggtccagc

SEQ ID NO: 17104 - DNA, 537 bp, synthetic construct; identical to SEQ ID NO: 470
  source 1..537: mol_type = other DNA

SEQ ID NO: 17105 - DNA, 534 bp, synthetic construct
  source 1..534: mol_type = other DNA
gacctgaagaacgtgttcccacctgaggtggccgtgttcgagcctagcgaggccgagatcagccacacccagaaagccaccctcgtgtgcctggctaccggcttctaccccgaccatgtggaactgtcttggtgggtcaacggcaaagaggtgcacagcggcgtgtgtaccgacccccagccactgaaagaacagcccgccctgaacgacagccggtactgcctgagcagcagactgagagtgtccgccaccttctggcagaacccccggaaccacttcagatgccaggtgcagttctacggcctgagcgagaacgacgagtggacccaggacagagccaagcccgtgacccagatcgtgtctgccgaagcctggggcagagccgattgcggctttaccagcgagagctaccagcagggcgtgctgagcgccaccatcctgtacgagatcctgctgggcaaggccaccctgtacgccgtgctggtgtctgccctggtgctgatggctatggtcaagcggaaggacagccgggga

SEQ ID NO: 17106 - DNA, 531 bp, synthetic construct
  source 1..531: mol_type = other DNA
ctgaagaacgtgttcccacctgaggtggccgtgttcgagcctagcgaggccgagatcagccacacccagaaagccaccctcgtgtgcctggctaccggcttctaccccgaccatgtggaactgtcttggtgggtcaacggcaaagaggtgcacagcggcgtgtgtaccgacccccagccactgaaagaacagcccgccctgaacgacagccggtactgcctgagcagcagactgagagtgtccgccaccttctggcagaacccccggaaccacttcagatgccaggtgcagttctacggcctgagcgagaacgacgagtggacccaggacagagccaagcccgtgacccagatcgtgtctgccgaagcctggggcagagccgattgcggctttaccagcgagagctaccagcagggcgtgctgagcgccaccatcctgtacgagatcctgctgggcaaggccaccctgtacgccgtgctggtgtctgccctggtgctgatggctatggtcaagcggaaggacagccgggga

SEQ ID NO: 17107 - DNA, 528 bp, synthetic construct
  source 1..528: mol_type = other DNA
aagaacgtgttcccacctgaggtggccgtgttcgagcctagcgaggccgagatcagccacacccagaaagccaccctcgtgtgcctggctaccggcttctaccccgaccatgtggaactgtcttggtgggtcaacggcaaagaggtgcacagcggcgtgtgtaccgacccccagccactgaaagaacagcccgccctgaacgacagccggtactgcctgagcagcagactgagagtgtccgccaccttctggcagaacccccggaaccacttcagatgccaggtgcagttctacggcctgagcgagaacgacgagtggacccaggacagagccaagcccgtgacccagatcgtgtctgccgaagcctggggcagagccgattgcggctttaccagcgagagctaccagcagggcgtgctgagcgccaccatcctgtacgagatcctgctgggcaaggccaccctgtacgccgtgctggtgtctgccctggtgctgatggctatggtcaagcggaaggacagccgggga

SEQ ID NO: 17108 - DNA, 525 bp, synthetic construct
  source 1..525: mol_type = other DNA
aacgtgttcccacctgaggtggccgtgttcgagcctagcgaggccgagatcagccacacccagaaagccaccctcgtgtgcctggctaccggcttctaccccgaccatgtggaactgtcttggtgggtcaacggcaaagaggtgcacagcggcgtgtgtaccgacccccagccactgaaagaacagcccgccctgaacgacagccggtactgcctgagcagcagactgagagtgtccgccaccttctggcagaacccccggaaccacttcagatgccaggtgcagttctacggcctgagcgagaacgacgagtggacccaggacagagccaagcccgtgacccagatcgtgtctgccgaagcctggggcagagccgattgcggctttaccagcgagagctaccagcagggcgtgctgagcgccaccatcctgtacgagatcctgctgggcaaggccaccctgtacgccgtgctggtgtctgccctggtgctgatggctatggtcaagcggaaggacagccgggga

SEQ ID NO: 17109 - DNA, 522 bp, synthetic construct
  source 1..522: mol_type = other DNA
gtgttcccacctgaggtggccgtgttcgagcctagcgaggccgagatcagccacacccagaaagccaccctcgtgtgcctggctaccggcttctaccccgaccatgtggaactgtcttggtgggtcaacggcaaagaggtgcacagcggcgtgtgtaccgacccccagccactgaaagaacagcccgccctgaacgacagccggtactgcctgagcagcagactgagagtgtccgccaccttctggcagaacccccggaaccacttcagatgccaggtgcagttctacggcctgagcgagaacgacgagtggacccaggacagagccaagcccgtgacccagatcgtgtctgccgaagcctggggcagagccgattgcggctttaccagcgagagctaccagcagggcgtgctgagcgccaccatcctgtacgagatcctgctgggcaaggccaccctgtacgccgtgctggtgtctgccctggtgctgatggctatggtcaagcggaaggacagccgggga

SEQ ID NO: 17110 - DNA, 519 bp, synthetic construct
  source 1..519: mol_type = other DNA
ttcccacctgaggtggccgtgttcgagcctagcgaggccgagatcagccacacccagaaagccaccctcgtgtgcctggctaccggcttctaccccgaccatgtggaactgtcttggtgggtcaacggcaaagaggtgcacagcggcgtgtgtaccgacccccagccactgaaagaacagcccgccctgaacgacagccggtactgcctgagcagcagactgagagtgtccgccaccttctggcagaacccccggaaccacttcagatgccaggtgcagttctacggcctgagcgagaacgacgagtggacccaggacagagccaagcccgtgacccagatcgtgtctgccgaagcctggggcagagccgattgcggctttaccagcgagagctaccagcagggcgtgctgagcgccaccatcctgtacgagatcctgctgggcaaggccaccctgtacgccgtgctggtgtctgccctggtgctgatggctatggtcaagcggaaggacagccgggga

SEQ ID NO: 17111 - DNA, 516 bp, synthetic construct
  source 1..516: mol_type = other DNA
ccacctgaggtggccgtgttcgagcctagcgaggccgagatcagccacacccagaaagccaccctcgtgtgcctggctaccggcttctaccccgaccatgtggaactgtcttggtgggtcaacggcaaagaggtgcacagcggcgtgtgtaccgacccccagccactgaaagaacagcccgccctgaacgacagccggtactgcctgagcagcagactgagagtgtccgccaccttctggcagaacccccggaaccacttcagatgccaggtgcagttctacggcctgagcgagaacgacgagtggacccaggacagagccaagcccgtgacccagatcgtgtctgccgaagcctggggcagagccgattgcggctttaccagcgagagctaccagcagggcgtgctgagcgccaccatcctgtacgagatcctgctgggcaaggccaccctgtacgccgtgctggtgtctgccctggtgctgatggctatggtcaagcggaaggacagccgggga

SEQ ID NO: 17112 - DNA, 513 bp, synthetic construct
  source 1..513: mol_type = other DNA
cctgaggtggccgtgttcgagcctagcgaggccgagatcagccacacccagaaagccaccctcgtgtgcctggctaccggcttctaccccgaccatgtggaactgtcttggtgggtcaacggcaaagaggtgcacagcggcgtgtgtaccgacccccagccactgaaagaacagcccgccctgaacgacagccggtactgcctgagcagcagactgagagtgtccgccaccttctggcagaacccccggaaccacttcagatgccaggtgcagttctacggcctgagcgagaacgacgagtggacccaggacagagccaagcccgtgacccagatcgtgtctgccgaagcctggggcagagccgattgcggctttaccagcgagagctaccagcagggcgtgctgagcgccaccatcctgtacgagatcctgctgggcaaggccaccctgtacgccgtgctggtgtctgccctggtgctgatggctatggtcaagcggaaggacagccgggga

SEQ ID NO: 17113 - DNA, 510 bp, synthetic construct
  source 1..510: mol_type = other DNA
gaggtggccgtgttcgagcctagcgaggccgagatcagccacacccagaaagccaccctcgtgtgcctggctaccggcttctaccccgaccatgtggaactgtcttggtgggtcaacggcaaagaggtgcacagcggcgtgtgtaccgacccccagccactgaaagaacagcccgccctgaacgacagccggtactgcctgagcagcagactgagagtgtccgccaccttctggcagaacccccggaaccacttcagatgccaggtgcagttctacggcctgagcgagaacgacgagtggacccaggacagagccaagcccgtgacccagatcgtgtctgccgaagcctggggcagagccgattgcggctttaccagcgagagctaccagcagggcgtgctgagcgccaccatcctgtacgagatcctgctgggcaaggccaccctgtacgccgtgctggtgtctgccctggtgctgatggctatggtcaagcggaaggacagccgggga

SEQ ID NO: 17114 - DNA, 507 bp, synthetic construct
  source 1..507: mol_type = other DNA
gtggccgtgttcgagcctagcgaggccgagatcagccacacccagaaagccaccctcgtgtgcctggctaccggcttctaccccgaccatgtggaactgtcttggtgggtcaacggcaaagaggtgcacagcggcgtgtgtaccgacccccagccactgaaagaacagcccgccctgaacgacagccggtactgcctgagcagcagactgagagtgtccgccaccttctggcagaacccccggaaccacttcagatgccaggtgcagttctacggcctgagcgagaacgacgagtggacccaggacagagccaagcccgtgacccagatcgtgtctgccgaagcctggggcagagccgattgcggctttaccagcgagagctaccagcagggcgtgctgagcgccaccatcctgtacgagatcctgctgggcaaggccaccctgtacgccgtgctggtgtctgccctggtgctgatggctatggtcaagcggaaggacagccgggga

SEQ ID NO: 17115 - DNA, 504 bp, synthetic construct
  source 1..504: mol_type = other DNA
gccgtgttcgagcctagcgaggccgagatcagccacacccagaaagccaccctcgtgtgcctggctaccggcttctaccccgaccatgtggaactgtcttggtgggtcaacggcaaagaggtgcacagcggcgtgtgtaccgacccccagccactgaaagaacagcccgccctgaacgacagccggtactgcctgagcagcagactgagagtgtccgccaccttctggcagaacccccggaaccacttcagatgccaggtgcagttctacggcctgagcgagaacgacgagtggacccaggacagagccaagcccgtgacccagatcgtgtctgccgaagcctggggcagagccgattgcggctttaccagcgagagctaccagcagggcgtgctgagcgccaccatcctgtacgagatcctgctgggcaaggccaccctgtacgccgtgctggtgtctgccctggtgctgatggctatggtcaagcggaaggacagccgggga

SEQ ID NO: 17116 - DNA, 501 bp, synthetic construct
  source 1..501: mol_type = other DNA
gtgttcgagcctagcgaggccgagatcagccacacccagaaagccaccctcgtgtgcctggctaccggcttctaccccgaccatgtggaactgtcttggtgggtcaacggcaaagaggtgcacagcggcgtgtgtaccgacccccagccactgaaagaacagcccgccctgaacgacagccggtactgcctgagcagcagactgagagtgtccgccaccttctggcagaacccccggaaccacttcagatgccaggtgcagttctacggcctgagcgagaacgacgagtggacccaggacagagccaagcccgtgacccagatcgtgtctgccgaagcctggggcagagccgattgcggctttaccagcgagagctaccagcagggcgtgctgagcgccaccatcctgtacgagatcctgctgggcaaggccaccctgtacgccgtgctggtgtctgccctggtgctgatggctatggtcaagcggaaggacagccgggga

SEQ ID NO: 17117 - DNA, 498 bp, synthetic construct
  source 1..498: mol_type = other DNA
ttcgagcctagcgaggccgagatcagccacacccagaaagccaccctcgtgtgcctggctaccggcttctaccccgaccatgtggaactgtcttggtgggtcaacggcaaagaggtgcacagcggcgtgtgtaccgacccccagccactgaaagaacagcccgccctgaacgacagccggtactgcctgagcagcagactgagagtgtccgccaccttctggcagaacccccggaaccacttcagatgccaggtgcagttctacggcctgagcgagaacgacgagtggacccaggacagagccaagcccgtgacccagatcgtgtctgccgaagcctggggcagagccgattgcggctttaccagcgagagctaccagcagggcgtgctgagcgccaccatcctgtacgagatcctgctgggcaaggccaccctgtacgccgtgctggtgtctgccctggtgctgatggctatggtcaagcggaaggacagccgggga

SEQ ID NO: 17118 - DNA, 495 bp, synthetic construct
  source 1..495: mol_type = other DNA
gagcctagcgaggccgagatcagccacacccagaaagccaccctcgtgtgcctggctaccggcttctaccccgaccatgtggaactgtcttggtgggtcaacggcaaagaggtgcacagcggcgtgtgtaccgacccccagccactgaaagaacagcccgccctgaacgacagccggtactgcctgagcagcagactgagagtgtccgccaccttctggcagaacccccggaaccacttcagatgccaggtgcagttctacggcctgagcgagaacgacgagtggacccaggacagagccaagcccgtgacccagatcgtgtctgccgaagcctggggcagagccgattgcggctttaccagcgagagctaccagcagggcgtgctgagcgccaccatcctgtacgagatcctgctgggcaaggccaccctgtacgccgtgctggtgtctgccctggtgctgatggctatggtcaagcggaaggacagccgggga

SEQ ID NO: 17119 - DNA, 492 bp, synthetic construct
  source 1..492: mol_type = other DNA
cctagcgaggccgagatcagccacacccagaaagccaccctcgtgtgcctggctaccggcttctaccccgaccatgtggaactgtcttggtgggtcaacggcaaagaggtgcacagcggcgtgtgtaccgacccccagccactgaaagaacagcccgccctgaacgacagccggtactgcctgagcagcagactgagagtgtccgccaccttctggcagaacccccggaaccacttcagatgccaggtgcagttctacggcctgagcgagaacgacgagtggacccaggacagagccaagcccgtgacccagatcgtgtctgccgaagcctggggcagagccgattgcggctttaccagcgagagctaccagcagggcgtgctgagcgccaccatcctgtacgagatcctgctgggcaaggccaccctgtacgccgtgctggtgtctgccctggtgctgatggctatggtcaagcggaaggacagccgggga

SEQ ID NO: 17120 - DNA, 489 bp, synthetic construct
  source 1..489: mol_type = other DNA
agcgaggccgagatcagccacacccagaaagccaccctcgtgtgcctggctaccggcttctaccccgaccatgtggaactgtcttggtgggtcaacggcaaagaggtgcacagcggcgtgtgtaccgacccccagccactgaaagaacagcccgccctgaacgacagccggtactgcctgagcagcagactgagagtgtccgccaccttctggcagaacccccggaaccacttcagatgccaggtgcagttctacggcctgagcgagaacgacgagtggacccaggacagagccaagcccgtgacccagatcgtgtctgccgaagcctggggcagagccgattgcggctttaccagcgagagctaccagcagggcgtgctgagcgccaccatcctgtacgagatcctgctgggcaaggccaccctgtacgccgtgctggtgtctgccctggtgctgatggctatggtcaagcggaaggacagccgggga

SEQ ID NO: 17121 - DNA, 486 bp, synthetic construct
  source 1..486: mol_type = other DNA
gaggccgagatcagccacacccagaaagccaccctcgtgtgcctggctaccggcttctaccccgaccatgtggaactgtcttggtgggtcaacggcaaagaggtgcacagcggcgtgtgtaccgacccccagccactgaaagaacagcccgccctgaacgacagccggtactgcctgagcagcagactgagagtgtccgccaccttctggcagaacccccggaaccacttcagatgccaggtgcagttctacggcctgagcgagaacgacgagtggacccaggacagagccaagcccgtgacccagatcgtgtctgccgaagcctggggcagagccgattgcggctttaccagcgagagctaccagcagggcgtgctgagcgccaccatcctgtacgagatcctgctgggcaaggccaccctgtacgccgtgctggtgtctgccctggtgctgatggctatggtcaagcggaaggacagccgggga

SEQ ID NO: 17122 - DNA, 483 bp, synthetic construct
  source 1..483: mol_type = other DNA
gccgagatcagccacacccagaaagccaccctcgtgtgcctggctaccggcttctaccccgaccatgtggaactgtcttggtgggtcaacggcaaagaggtgcacagcggcgtgtgtaccgacccccagccactgaaagaacagcccgccctgaacgacagccggtactgcctgagcagcagactgagagtgtccgccaccttctggcagaacccccggaaccacttcagatgccaggtgcagttctacggcctgagcgagaacgacgagtggacccaggacagagccaagcccgtgacccagatcgtgtctgccgaagcctggggcagagccgattgcggctttaccagcgagagctaccagcagggcgtgctgagcgccaccatcctgtacgagatcctgctgggcaaggccaccctgtacgccgtgctggtgtctgccctggtgctgatggctatggtcaagcggaaggacagccgggga

SEQ ID NO: 17123 - DNA, 480 bp, synthetic construct
  source 1..480: mol_type = other DNA
gagatcagccacacccagaaagccaccctcgtgtgcctggctaccggcttctaccccgaccatgtggaactgtcttggtgggtcaacggcaaagaggtgcacagcggcgtgtgtaccgacccccagccactgaaagaacagcccgccctgaacgacagccggtactgcctgagcagcagactgagagtgtccgccaccttctggcagaacccccggaaccacttcagatgccaggtgcagttctacggcctgagcgagaacgacgagtggacccaggacagagccaagcccgtgacccagatcgtgtctgccgaagcctggggcagagccgattgcggctttaccagcgagagctaccagcagggcgtgctgagcgccaccatcctgtacgagatcctgctgggcaaggccaccctgtacgccgtgctggtgtctgccctggtgctgatggctatggtcaagcggaaggacagccgggga

SEQ ID NO: 17124 - DNA, 477 bp, synthetic construct
  source 1..477: mol_type = other DNA
atcagccacacccagaaagccaccctcgtgtgcctggctaccggcttctaccccgaccatgtggaactgtcttggtgggtcaacggcaaagaggtgcacagcggcgtgtgtaccgacccccagccactgaaagaacagcccgccctgaacgacagccggtactgcctgagcagcagactgagagtgtccgccaccttctggcagaacccccggaaccacttcagatgccaggtgcagttctacggcctgagcgagaacgacgagtggacccaggacagagccaagcccgtgacccagatcgtgtctgccgaagcctggggcagagccgattgcggctttaccagcgagagctaccagcagggcgtgctgagcgccaccatcctgtacgagatcctgctgggcaaggccaccctgtacgccgtgctggtgtctgccctggtgctgatggctatggtcaagcggaaggacagccgggga

SEQ ID NO: 17125 - DNA, 474 bp, synthetic construct
  source 1..474: mol_type = other DNA
agccacacccagaaagccaccctcgtgtgcctggctaccggcttctaccccgaccatgtggaactgtcttggtgggtcaacggcaaagaggtgcacagcggcgtgtgtaccgacccccagccactgaaagaacagcccgccctgaacgacagccggtactgcctgagcagcagactgagagtgtccgccaccttctggcagaacccccggaaccacttcagatgccaggtgcagttctacggcctgagcgagaacgacgagtggacccaggacagagccaagcccgtgacccagatcgtgtctgccgaagcctggggcagagccgattgcggctttaccagcgagagctaccagcagggcgtgctgagcgccaccatcctgtacgagatcctgctgggcaaggccaccctgtacgccgtgctggtgtctgccctggtgctgatggctatggtcaagcggaaggacagccgggga

SEQ ID NO: 17126 - DNA, 471 bp, synthetic construct
  source 1..471: mol_type = other DNA
cacacccagaaagccaccctcgtgtgcctggctaccggcttctaccccgaccatgtggaactgtcttggtgggtcaacggcaaagaggtgcacagcggcgtgtgtaccgacccccagccactgaaagaacagcccgccctgaacgacagccggtactgcctgagcagcagactgagagtgtccgccaccttctggcagaacccccggaaccacttcagatgccaggtgcagttctacggcctgagcgagaacgacgagtggacccaggacagagccaagcccgtgacccagatcgtgtctgccgaagcctggggcagagccgattgcggctttaccagcgagagctaccagcagggcgtgctgagcgccaccatcctgtacgagatcctgctgggcaaggccaccctgtacgccgtgctggtgtctgccctggtgctgatggctatggtcaagcggaaggacagccgggga

SEQ ID NO: 17127 - DNA, 468 bp, synthetic construct
  source 1..468: mol_type = other DNA
acccagaaagccaccctcgtgtgcctggctaccggcttctaccccgaccatgtggaactgtcttggtgggtcaacggcaaagaggtgcacagcggcgtgtgtaccgacccccagccactgaaagaacagcccgccctgaacgacagccggtactgcctgagcagcagactgagagtgtccgccaccttctggcagaacccccggaaccacttcagatgccaggtgcagttctacggcctgagcgagaacgacgagtggacccaggacagagccaagcccgtgacccagatcgtgtctgccgaagcctggggcagagccgattgcggctttaccagcgagagctaccagcagggcgtgctgagcgccaccatcctgtacgagatcctgctgggcaaggccaccctgtacgccgtgctggtgtctgccctggtgctgatggctatggtcaagcggaaggacagccgggga

SEQ ID NO: 17128 - DNA, 465 bp, synthetic construct
  source 1..465: mol_type = other DNA
cagaaagccaccctcgtgtgcctggctaccggcttctaccccgaccatgtggaactgtcttggtgggtcaacggcaaagaggtgcacagcggcgtgtgtaccgacccccagccactgaaagaacagcccgccctgaacgacagccggtactgcctgagcagcagactgagagtgtccgccaccttctggcagaacccccggaaccacttcagatgccaggtgcagttctacggcctgagcgagaacgacgagtggacccaggacagagccaagcccgtgacccagatcgtgtctgccgaagcctggggcagagccgattgcggctttaccagcgagagctaccagcagggcgtgctgagcgccaccatcctgtacgagatcctgctgggcaaggccaccctgtacgccgtgctggtgtctgccctggtgctgatggctatggtcaagcggaaggacagccgggga

SEQ ID NO: 17129 - DNA, 462 bp, synthetic construct
  source 1..462: mol_type = other DNA
aaagccaccctcgtgtgcctggctaccggcttctaccccgaccatgtggaactgtcttggtgggtcaacggcaaagaggtgcacagcggcgtgtgtaccgacccccagccactgaaagaacagcccgccctgaacgacagccggtactgcctgagcagcagactgagagtgtccgccaccttctggcagaacccccggaaccacttcagatgccaggtgcagttctacggcctgagcgagaacgacgagtggacccaggacagagccaagcccgtgacccagatcgtgtctgccgaagcctggggcagagccgattgcggctttaccagcgagagctaccagcagggcgtgctgagcgccaccatcctgtacgagatcctgctgggcaaggccaccctgtacgccgtgctggtgtctgccctggtgctgatggctatggtcaagcggaaggacagccgggga

SEQ ID NO: 17130 - DNA, 459 bp, synthetic construct
  source 1..459: mol_type = other DNA
gccaccctcgtgtgcctggctaccggcttctaccccgaccatgtggaactgtcttggtgggtcaacggcaaagaggtgcacagcggcgtgtgtaccgacccccagccactgaaagaacagcccgccctgaacgacagccggtactgcctgagcagcagactgagagtgtccgccaccttctggcagaacccccggaaccacttcagatgccaggtgcagttctacggcctgagcgagaacgacgagtggacccaggacagagccaagcccgtgacccagatcgtgtctgccgaagcctggggcagagccgattgcggctttaccagcgagagctaccagcagggcgtgctgagcgccaccatcctgtacgagatcctgctgggcaaggccaccctgtacgccgtgctggtgtctgccctggtgctgatggctatggtcaagcggaaggacagccgggga

SEQ ID NO: 17131 - DNA, 456 bp, synthetic construct
  source 1..456: mol_type = other DNA
accctcgtgtgcctggctaccggcttctaccccgaccatgtggaactgtcttggtgggtcaacggcaaagaggtgcacagcggcgtgtgtaccgacccccagccactgaaagaacagcccgccctgaacgacagccggtactgcctgagcagcagactgagagtgtccgccaccttctggcagaacccccggaaccacttcagatgccaggtgcagttctacggcctgagcgagaacgacgagtggacccaggacagagccaagcccgtgacccagatcgtgtctgccgaagcctggggcagagccgattgcggctttaccagcgagagctaccagcagggcgtgctgagcgccaccatcctgtacgagatcctgctgggcaaggccaccctgtacgccgtgctggtgtctgccctggtgctgatggctatggtcaagcggaaggacagccgggga

SEQ ID NO: 17132 - DNA, 453 bp, synthetic construct
  source 1..453: mol_type = other DNA
ctcgtgtgcctggctaccggcttctaccccgaccatgtggaactgtcttggtgggtcaacggcaaagaggtgcacagcggcgtgtgtaccgacccccagccactgaaagaacagcccgccctgaacgacagccggtactgcctgagcagcagactgagagtgtccgccaccttctggcagaacccccggaaccacttcagatgccaggtgcagttctacggcctgagcgagaacgacgagtggacccaggacagagccaagcccgtgacccagatcgtgtctgccgaagcctggggcagagccgattgcggctttaccagcgagagctaccagcagggcgtgctgagcgccaccatcctgtacgagatcctgctgggcaaggccaccctgtacgccgtgctggtgtctgccctggtgctgatggctatggtcaagcggaaggacagccgggga

SEQ ID NO: 17133 - DNA, 450 bp, synthetic construct
  source 1..450: mol_type = other DNA
gtgtgcctggctaccggcttctaccccgaccatgtggaactgtcttggtgggtcaacggcaaagaggtgcacagcggcgtgtgtaccgacccccagccactgaaagaacagcccgccctgaacgacagccggtactgcctgagcagcagactgagagtgtccgccaccttctggcagaacccccggaaccacttcagatgccaggtgcagttctacggcctgagcgagaacgacgagtggacccaggacagagccaagcccgtgacccagatcgtgtctgccgaagcctggggcagagccgattgcggctttaccagcgagagctaccagcagggcgtgctgagcgccaccatcctgtacgagatcctgctgggcaaggccaccctgtacgccgtgctggtgtctgccctggtgctgatggctatggtcaagcggaaggacagccgggga

SEQ ID NO: 17134 - DNA, 447 bp, synthetic construct
  source 1..447: mol_type = other DNA
tgcctggctaccggcttctaccccgaccatgtggaactgtcttggtgggtcaacggcaaagaggtgcacagcggcgtgtgtaccgacccccagccactgaaagaacagcccgccctgaacgacagccggtactgcctgagcagcagactgagagtgtccgccaccttctggcagaacccccggaaccacttcagatgccaggtgcagttctacggcctgagcgagaacgacgagtggacccaggacagagccaagcccgtgacccagatcgtgtctgccgaagcctggggcagagccgattgcggctttaccagcgagagctaccagcagggcgtgctgagcgccaccatcctgtacgagatcctgctgggcaaggccaccctgtacgccgtgctggtgtctgccctggtgctgatggctatggtcaagcggaaggacagccgggga

SEQ ID NO: 17135 - DNA, 444 bp, synthetic construct
  source 1..444: mol_type = other DNA
ctggctaccggcttctaccccgaccatgtggaactgtcttggtgggtcaacggcaaagaggtgcacagcggcgtgtgtaccgacccccagccactgaaagaacagcccgccctgaacgacagccggtactgcctgagcagcagactgagagtgtccgccaccttctggcagaacccccggaaccacttcagatgccaggtgcagttctacggcctgagcgagaacgacgagtggacccaggacagagccaagcccgtgacccagatcgtgtctgccgaagcctggggcagagccgattgcggctttaccagcgagagctaccagcagggcgtgctgagcgccaccatcctgtacgagatcctgctgggcaaggccaccctgtacgccgtgctggtgtctgccctggtgctgatggctatggtcaagcggaaggacagccgggga

SEQ ID NO: 17136 - DNA, 441 bp, synthetic construct
  source 1..441: mol_type = other DNA
gctaccggcttctaccccgaccatgtggaactgtcttggtgggtcaacggcaaagaggtgcacagcggcgtgtgtaccgacccccagccactgaaagaacagcccgccctgaacgacagccggtactgcctgagcagcagactgagagtgtccgccaccttctggcagaacccccggaaccacttcagatgccaggtgcagttctacggcctgagcgagaacgacgagtggacccaggacagagccaagcccgtgacccagatcgtgtctgccgaagcctggggcagagccgattgcggctttaccagcgagagctaccagcagggcgtgctgagcgccaccatcctgtacgagatcctgctgggcaaggccaccctgtacgccgtgctggtgtctgccctggtgctgatggctatggtcaagcggaaggacagccgggga

SEQ ID NO: 17137 - DNA, 438 bp, synthetic construct
  source 1..438: mol_type = other DNA
accggcttctaccccgaccatgtggaactgtcttggtgggtcaacggcaaagaggtgcacagcggcgtgtgtaccgacccccagccactgaaagaacagcccgccctgaacgacagccggtactgcctgagcagcagactgagagtgtccgccaccttctggcagaacccccggaaccacttcagatgccaggtgcagttctacggcctgagcgagaacgacgagtggacccaggacagagccaagcccgtgacccagatcgtgtctgccgaagcctggggcagagccgattgcggctttaccagcgagagctaccagcagggcgtgctgagcgccaccatcctgtacgagatcctgctgggcaaggccaccctgtacgccgtgctggtgtctgccctggtgctgatggctatggtcaagcggaaggacagccgggga

SEQ ID NO: 17138 - DNA, 435 bp, synthetic construct
  source 1..435: mol_type = other DNA
ggcttctaccccgaccatgtggaactgtcttggtgggtcaacggcaaagaggtgcacagcggcgtgtgtaccgacccccagccactgaaagaacagcccgccctgaacgacagccggtactgcctgagcagcagactgagagtgtccgccaccttctggcagaacccccggaaccacttcagatgccaggtgcagttctacggcctgagcgagaacgacgagtggacccaggacagagccaagcccgtgacccagatcgtgtctgccgaagcctggggcagagccgattgcggctttaccagcgagagctaccagcagggcgtgctgagcgccaccatcctgtacgagatcctgctgggcaaggccaccctgtacgccgtgctggtgtctgccctggtgctgatggctatggtcaagcggaaggacagccgggga

SEQ ID NO: 17139 - DNA, 432 bp, synthetic construct
  source 1..432: mol_type = other DNA
ttctaccccgaccatgtggaactgtcttggtgggtcaacggcaaagaggtgcacagcggcgtgtgtaccgacccccagccactgaaagaacagcccgccctgaacgacagccggtactgcctgagcagcagactgagagtgtccgccaccttctggcagaacccccggaaccacttcagatgccaggtgcagttctacggcctgagcgagaacgacgagtggacccaggacagagccaagcccgtgacccagatcgtgtctgccgaagcctggggcagagccgattgcggctttaccagcgagagctaccagcagggcgtgctgagcgccaccatcctgtacgagatcctgctgggcaaggccaccctgtacgccgtgctggtgtctgccctggtgctgatggctatggtcaagcggaaggacagccgggga

SEQ ID NO: 17140 - DNA, 429 bp, synthetic construct
  source 1..429: mol_type = other DNA
taccccgaccatgtggaactgtcttggtgggtcaacggcaaagaggtgcacagcggcgtgtgtaccgacccccagccactgaaagaacagcccgccctgaacgacagccggtactgcctgagcagcagactgagagtgtccgccaccttctggcagaacccccggaaccacttcagatgccaggtgcagttctacggcctgagcgagaacgacgagtggacccaggacagagccaagcccgtgacccagatcgtgtctgccgaagcctggggcagagccgattgcggctttaccagcgagagctaccagcagggcgtgctgagcgccaccatcctgtacgagatcctgctgggcaaggccaccctgtacgccgtgctggtgtctgccctggtgctgatggctatggtcaagcggaaggacagccgggga

SEQ ID NO: 17141 - DNA, 426 bp, synthetic construct
  source 1..426: mol_type = other DNA
cccgaccatgtggaactgtcttggtgggtcaacggcaaagaggtgcacagcggcgtgtgtaccgacccccagccactgaaagaacagcccgccctgaacgacagccggtactgcctgagcagcagactgagagtgtccgccaccttctggcagaacccccggaaccacttcagatgccaggtgcagttctacggcctgagcgagaacgacgagtggacccaggacagagccaagcccgtgacccagatcgtgtctgccgaagcctggggcagagccgattgcggctttaccagcgagagctaccagcagggcgtgctgagcgccaccatcctgtacgagatcctgctgggcaaggccaccctgtacgccgtgctggtgtctgccctggtgctgatggctatggtcaagcggaaggacagccgggga

SEQ ID NO: 17142 - DNA, 423 bp, synthetic construct
  source 1..423: mol_type = other DNA
gaccatgtggaactgtcttggtgggtcaacggcaaagaggtgcacagcggcgtgtgtaccgacccccagccactgaaagaacagcccgccctgaacgacagccggtactgcctgagcagcagactgagagtgtccgccaccttctggcagaacccccggaaccacttcagatgccaggtgcagttctacggcctgagcgagaacgacgagtggacccaggacagagccaagcccgtgacccagatcgtgtctgccgaagcctggggcagagccgattgcggctttaccagcgagagctaccagcagggcgtgctgagcgccaccatcctgtacgagatcctgctgggcaaggccaccctgtacgccgtgctggtgtctgccctggtgctgatggctatggtcaagcggaaggacagccgggga

SEQ ID NO: 17143 - DNA, 420 bp, synthetic construct
  source 1..420: mol_type = other DNA
catgtggaactgtcttggtgggtcaacggcaaagaggtgcacagcggcgtgtgtaccgacccccagccactgaaagaacagcccgccctgaacgacagccggtactgcctgagcagcagactgagagtgtccgccaccttctggcagaacccccggaaccacttcagatgccaggtgcagttctacggcctgagcgagaacgacgagtggacccaggacagagccaagcccgtgacccagatcgtgtctgccgaagcctggggcagagccgattgcggctttaccagcgagagctaccagcagggcgtgctgagcgccaccatcctgtacgagatcctgctgggcaaggccaccctgtacgccgtgctggtgtctgccctggtgctgatggctatggtcaagcggaaggacagccgggga

SEQ ID NO: 17144 - DNA, 417 bp, synthetic construct
  source 1..417: mol_type = other DNA
gtggaactgtcttggtgggtcaacggcaaagaggtgcacagcggcgtgtgtaccgacccccagccactgaaagaacagcccgccctgaacgacagccggtactgcctgagcagcagactgagagtgtccgccaccttctggcagaacccccggaaccacttcagatgccaggtgcagttctacggcctgagcgagaacgacgagtggacccaggacagagccaagcccgtgacccagatcgtgtctgccgaagcctggggcagagccgattgcggctttaccagcgagagctaccagcagggcgtgctgagcgccaccatcctgtacgagatcctgctgggcaaggccaccctgtacgccgtgctggtgtctgccctggtgctgatggctatggtcaagcggaaggacagccgggga

SEQ ID NO: 17145 - DNA, 414 bp, synthetic construct
  source 1..414: mol_type = other DNA
gaactgtcttggtgggtcaacggcaaagaggtgcacagcggcgtgtgtaccgacccccagccactgaaagaacagcccgccctgaacgacagccggtactgcctgagcagcagactgagagtgtccgccaccttctggcagaacccccggaaccacttcagatgccaggtgcagttctacggcctgagcgagaacgacgagtggacccaggacagagccaagcccgtgacccagatcgtgtctgccgaagcctggggcagagccgattgcggctttaccagcgagagctaccagcagggcgtgctgagcgccaccatcctgtacgagatcctgctgggcaaggccaccctgtacgccgtgctggtgtctgccctggtgctgatggctatggtcaagcggaaggacagccgggga

SEQ ID NO: 17146 - DNA, 411 bp, synthetic construct
  source 1..411: mol_type = other DNA
ctgtcttggtgggtcaacggcaaagaggtgcacagcggcgtgtgtaccgacccccagccactgaaagaacagcccgccctgaacgacagccggtactgcctgagcagcagactgagagtgtccgccaccttctggcagaacccccggaaccacttcagatgccaggtgcagttctacggcctgagcgagaacgacgagtggacccaggacagagccaagcccgtgacccagatcgtgtctgccgaagcctggggcagagccgattgcggctttaccagcgagagctaccagcagggcgtgctgagcgccaccatcctgtacgagatcctgctgggcaaggccaccctgtacgccgtgctggtgtctgccctggtgctgatggctatggtcaagcggaaggacagccgggga

SEQ ID NO: 17147 - DNA, 408 bp, synthetic construct
  source 1..408: mol_type = other DNA
tcttggtgggtcaacggcaaagaggtgcacagcggcgtgtgtaccgacccccagccactgaaagaacagcccgccctgaacgacagccggtactgcctgagcagcagactgagagtgtccgccaccttctggcagaacccccggaaccacttcagatgccaggtgcagttctacggcctgagcgagaacgacgagtggacccaggacagagccaagcccgtgacccagatcgtgtctgccgaagcctggggcagagccgattgcggctttaccagcgagagctaccagcagggcgtgctgagcgccaccatcctgtacgagatcctgctgggcaaggccaccctgtacgccgtgctggtgtctgccctggtgctgatggctatggtcaagcggaaggacagccgggga

SEQ ID NO: 17148 - DNA, 405 bp, synthetic construct
  source 1..405: mol_type = other DNA
tggtgggtcaacggcaaagaggtgcacagcggcgtgtgtaccgacccccagccactgaaagaacagcccgccctgaacgacagccggtactgcctgagcagcagactgagagtgtccgccaccttctggcagaacccccggaaccacttcagatgccaggtgcagttctacggcctgagcgagaacgacgagtggacccaggacagagccaagcccgtgacccagatcgtgtctgccgaagcctggggcagagccgattgcggctttaccagcgagagctaccagcagggcgtgctgagcgccaccatcctgtacgagatcctgctgggcaaggccaccctgtacgccgtgctggtgtctgccctggtgctgatggctatggtcaagcggaaggacagccgggga

SEQ ID NO: 17149 - DNA, 402 bp, synthetic construct
  source 1..402: mol_type = other DNA
tgggtcaacggcaaagaggtgcacagcggcgtgtgtaccgacccccagccactgaaagaacagcccgccctgaacgacagccggtactgcctgagcagcagactgagagtgtccgccaccttctggcagaacccccggaaccacttcagatgccaggtgcagttctacggcctgagcgagaacgacgagtggacccaggacagagccaagcccgtgacccagatcgtgtctgccgaagcctggggcagagccgattgcggctttaccagcgagagctaccagcagggcgtgctgagcgccaccatcctgtacgagatcctgctgggcaaggccaccctgtacgccgtgctggtgtctgccctggtgctgatggctatggtcaagcggaaggacagccgggga

SEQ ID NO: 17150 - DNA, 399 bp, synthetic construct
  source 1..399: mol_type = other DNA
gtcaacggcaaagaggtgcacagcggcgtgtgtaccgacccccagccactgaaagaacagcccgccctgaacgacagccggtactgcctgagcagcagactgagagtgtccgccaccttctggcagaacccccggaaccacttcagatgccaggtgcagttctacggcctgagcgagaacgacgagtggacccaggacagagccaagcccgtgacccagatcgtgtctgccgaagcctggggcagagccgattgcggctttaccagcgagagctaccagcagggcgtgctgagcgccaccatcctgtacgagatcctgctgggcaaggccaccctgtacgccgtgctggtgtctgccctggtgctgatggctatggtcaagcggaaggacagccgggga

SEQ ID NO: 17151 - DNA, 396 bp, synthetic construct
  source 1..396: mol_type = other DNA
aacggcaaagaggtgcacagcggcgtgtgtaccgacccccagccactgaaagaacagcccgccctgaacgacagccggtactgcctgagcagcagactgagagtgtccgccaccttctggcagaacccccggaaccacttcagatgccaggtgcagttctacggcctgagcgagaacgacgagtggacccaggacagagccaagcccgtgacccagatcgtgtctgccgaagcctggggcagagccgattgcggctttaccagcgagagctaccagcagggcgtgctgagcgccaccatcctgtacgagatcctgctgggcaaggccaccctgtacgccgtgctggtgtctgccctggtgctgatggctatggtcaagcggaaggacagccgggga

SEQ ID NO: 17152 - DNA, 393 bp, synthetic construct
  source 1..393: mol_type = other DNA
ggcaaagaggtgcacagcggcgtgtgtaccgacccccagccactgaaagaacagcccgccctgaacgacagccggtactgcctgagcagcagactgagagtgtccgccaccttctggcagaacccccggaaccacttcagatgccaggtgcagttctacggcctgagcgagaacgacgagtggacccaggacagagccaagcccgtgacccagatcgtgtctgccgaagcctggggcagagccgattgcggctttaccagcgagagctaccagcagggcgtgctgagcgccaccatcctgtacgagatcctgctgggcaaggccaccctgtacgccgtgctggtgtctgccctggtgctgatggctatggtcaagcggaaggacagccgggga

SEQ ID NO: 17153 - DNA, 390 bp, synthetic construct
  source 1..390: mol_type = other DNA
aaagaggtgcacagcggcgtgtgtaccgacccccagccactgaaagaacagcccgccctgaacgacagccggtactgcctgagcagcagactgagagtgtccgccaccttctggcagaacccccggaaccacttcagatgccaggtgcagttctacggcctgagcgagaacgacgagtggacccaggacagagccaagcccgtgacccagatcgtgtctgccgaagcctggggcagagccgattgcggctttaccagcgagagctaccagcagggcgtgctgagcgccaccatcctgtacgagatcctgctgggcaaggccaccctgtacgccgtgctggtgtctgccctggtgctgatggctatggtcaagcggaaggacagccgggga

SEQ ID NO: 17154 - DNA, 387 bp, synthetic construct
  source 1..387: mol_type = other DNA
gaggtgcacagcggcgtgtgtaccgacccccagccactgaaagaacagcccgccctgaacgacagccggtactgcctgagcagcagactgagagtgtccgccaccttctggcagaacccccggaaccacttcagatgccaggtgcagttctacggcctgagcgagaacgacgagtggacccaggacagagccaagcccgtgacccagatcgtgtctgccgaagcctggggcagagccgattgcggctttaccagcgagagctaccagcagggcgtgctgagcgccaccatcctgtacgagatcctgctgggcaaggccaccctgtacgccgtgctggtgtctgccctggtgctgatggctatggtcaagcggaaggacagccgggga

SEQ ID NO: 17155 - DNA, 384 bp, synthetic construct
  source 1..384: mol_type = other DNA
gtgcacagcggcgtgtgtaccgacccccagccactgaaagaacagcccgccctgaacgacagccggtactgcctgagcagcagactgagagtgtccgccaccttctggcagaacccccggaaccacttcagatgccaggtgcagttctacggcctgagcgagaacgacgagtggacccaggacagagccaagcccgtgacccagatcgtgtctgccgaagcctggggcagagccgattgcggctttaccagcgagagctaccagcagggcgtgctgagcgccaccatcctgtacgagatcctgctgggcaaggccaccctgtacgccgtgctggtgtctgccctggtgctgatggctatggtcaagcggaaggacagccgggga

SEQ ID NO: 17156 - DNA, 381 bp, synthetic construct
  source 1..381: mol_type = other DNA
cacagcggcgtgtgtaccgacccccagccactgaaagaacagcccgccctgaacgacagccggtactgcctgagcagcagactgagagtgtccgccaccttctggcagaacccccggaaccacttcagatgccaggtgcagttctacggcctgagcgagaacgacgagtggacccaggacagagccaagcccgtgacccagatcgtgtctgccgaagcctggggcagagccgattgcggctttaccagcgagagctaccagcagggcgtgctgagcgccaccatcctgtacgagatcctgctgggcaaggccaccctgtacgccgtgctggtgtctgccctggtgctgatggctatggtcaagcggaaggacagccgggga

SEQ ID NO: 17157 - DNA, 378 bp, synthetic construct
  source 1..378: mol_type = other DNA
agcggcgtgtgtaccgacccccagccactgaaagaacagcccgccctgaacgacagccggtactgcctgagcagcagactgagagtgtccgccaccttctggcagaacccccggaaccacttcagatgccaggtgcagttctacggcctgagcgagaacgacgagtggacccaggacagagccaagcccgtgacccagatcgtgtctgccgaagcctggggcagagccgattgcggctttaccagcgagagctaccagcagggcgtgctgagcgccaccatcctgtacgagatcctgctgggcaaggccaccctgtacgccgtgctggtgtctgccctggtgctgatggctatggtcaagcggaaggacagccgggga

SEQ ID NO: 17158 - DNA, 375 bp, synthetic construct
  source 1..375: mol_type = other DNA
ggcgtgtgtaccgacccccagccactgaaagaacagcccgccctgaacgacagccggtactgcctgagcagcagactgagagtgtccgccaccttctggcagaacccccggaaccacttcagatgccaggtgcagttctacggcctgagcgagaacgacgagtggacccaggacagagccaagcccgtgacccagatcgtgtctgccgaagcctggggcagagccgattgcggctttaccagcgagagctaccagcagggcgtgctgagcgccaccatcctgtacgagatcctgctgggcaaggccaccctgtacgccgtgctggtgtctgccctggtgctgatggctatggtcaagcggaaggacagccgggga

SEQ ID NO: 17159 - DNA, 372 bp, synthetic construct
  source 1..372: mol_type = other DNA
gtgtgtaccgacccccagccactgaaagaacagcccgccctgaacgacagccggtactgcctgagcagcagactgagagtgtccgccaccttctggcagaacccccggaaccacttcagatgccaggtgcagttctacggcctgagcgagaacgacgagtggacccaggacagagccaagcccgtgacccagatcgtgtctgccgaagcctggggcagagccgattgcggctttaccagcgagagctaccagcagggcgtgctgagcgccaccatcctgtacgagatcctgctgggcaaggccaccctgtacgccgtgctggtgtctgccctggtgctgatggctatggtcaagcggaaggacagccgggga

SEQ ID NO: 17160 - DNA, 369 bp, synthetic construct
  source 1..369: mol_type = other DNA
tgtaccgacccccagccactgaaagaacagcccgccctgaacgacagccggtactgcctgagcagcagactgagagtgtccgccaccttctggcagaacccccggaaccacttcagatgccaggtgcagttctacggcctgagcgagaacgacgagtggacccaggacagagccaagcccgtgacccagatcgtgtctgccgaagcctggggcagagccgattgcggctttaccagcgagagctaccagcagggcgtgctgagcgccaccatcctgtacgagatcctgctgggcaaggccaccctgtacgccgtgctggtgtctgccctggtgctgatggctatggtcaagcggaaggacagccgggga

SEQ ID NO: 17161 - DNA, 366 bp, synthetic construct
  source 1..366: mol_type = other DNA
accgacccccagccactgaaagaacagcccgccctgaacgacagccggtactgcctgagcagcagactgagagtgtccgccaccttctggcagaacccccggaaccacttcagatgccaggtgcagttctacggcctgagcgagaacgacgagtggacccaggacagagccaagcccgtgacccagatcgtgtctgccgaagcctggggcagagccgattgcggctttaccagcgagagctaccagcagggcgtgctgagcgccaccatcctgtacgagatcctgctgggcaaggccaccctgtacgccgtgctggtgtctgccctggtgctgatggctatggtcaagcggaaggacagccgggga

SEQ ID NO: 17162 - DNA, 363 bp, synthetic construct
  source 1..363: mol_type = other DNA
gacccccagccactgaaagaacagcccgccctgaacgacagccggtactgcctgagcagcagactgagagtgtccgccaccttctggcagaacccccggaaccacttcagatgccaggtgcagttctacggcctgagcgagaacgacgagtggacccaggacagagccaagcccgtgacccagatcgtgtctgccgaagcctggggcagagccgattgcggctttaccagcgagagctaccagcagggcgtgctgagcgccaccatcctgtacgagatcctgctgggcaaggccaccctgtacgccgtgctggtgtctgccctggtgctgatggctatggtcaagcggaaggacagccgggga

SEQ ID NO: 17163 - DNA, 360 bp, synthetic construct
  source 1..360: mol_type = other DNA
ccccagccactgaaagaacagcccgccctgaacgacagccggtactgcctgagcagcagactgagagtgtccgccaccttctggcagaacccccggaaccacttcagatgccaggtgcagttctacggcctgagcgagaacgacgagtggacccaggacagagccaagcccgtgacccagatcgtgtctgccgaagcctggggcagagccgattgcggctttaccagcgagagctaccagcagggcgtgctgagcgccaccatcctgtacgagatcctgctgggcaaggccaccctgtacgccgtgctggtgtctgccctggtgctgatggctatggtcaagcggaaggacagccgggga

SEQ ID NO: 17164 - DNA, 357 bp, synthetic construct
  source 1..357: mol_type = other DNA
cagccactgaaagaacagcccgccctgaacgacagccggtactgcctgagcagcagactgagagtgtccgccaccttctggcagaacccccggaaccacttcagatgccaggtgcagttctacggcctgagcgagaacgacgagtggacccaggacagagccaagcccgtgacccagatcgtgtctgccgaagcctggggcagagccgattgcggctttaccagcgagagctaccagcagggcgtgctgagcgccaccatcctgtacgagatcctgctgggcaaggccaccctgtacgccgtgctggtgtctgccctggtgctgatggctatggtcaagcggaaggacagccgggga

SEQ ID NO: 17165 - DNA, 354 bp, synthetic construct
  source 1..354: mol_type = other DNA
ccactgaaagaacagcccgccctgaacgacagccggtactgcctgagcagcagactgagagtgtccgccaccttctggcagaacccccggaaccacttcagatgccaggtgcagttctacggcctgagcgagaacgacgagtggacccaggacagagccaagcccgtgacccagatcgtgtctgccgaagcctggggcagagccgattgcggctttaccagcgagagctaccagcagggcgtgctgagcgccaccatcctgtacgagatcctgctgggcaaggccaccctgtacgccgtgctggtgtctgccctggtgctgatggctatggtcaagcggaaggacagccgggga

SEQ ID NO: 17166 - DNA, 351 bp, synthetic construct
  source 1..351: mol_type = other DNA
ctgaaagaacagcccgccctgaacgacagccggtactgcctgagcagcagactgagagtgtccgccaccttctggcagaacccccggaaccacttcagatgccaggtgcagttctacggcctgagcgagaacgacgagtggacccaggacagagccaagcccgtgacccagatcgtgtctgccgaagcctggggcagagccgattgcggctttaccagcgagagctaccagcagggcgtgctgagcgccaccatcctgtacgagatcctgctgggcaaggccaccctgtacgccgtgctggtgtctgccctggtgctgatggctatggtcaagcggaaggacagccgggga

SEQ ID NO: 17167 - DNA, 348 bp, synthetic construct
  source 1..348: mol_type = other DNA
aaagaacagcccgccctgaacgacagccggtactgcctgagcagcagactgagagtgtccgccaccttctggcagaacccccggaaccacttcagatgccaggtgcagttctacggcctgagcgagaacgacgagtggacccaggacagagccaagcccgtgacccagatcgtgtctgccgaagcctggggcagagccgattgcggctttaccagcgagagctaccagcagggcgtgctgagcgccaccatcctgtacgagatcctgctgggcaaggccaccctgtacgccgtgctggtgtctgccctggtgctgatggctatggtcaagcggaaggacagccgggga

SEQ ID NO: 17168 - DNA, 345 bp, synthetic construct; identical to SEQ ID NO: 517
  source 1..345: mol_type = other DNA

SEQ ID NO: 17169 - DNA, 342 bp, synthetic construct
  source 1..342: mol_type = other DNA
cagcccgccctgaacgacagccggtactgcctgagcagcagactgagagtgtccgccaccttctggcagaacccccggaaccacttcagatgccaggtgcagttctacggcctgagcgagaacgacgagtggacccaggacagagccaagcccgtgacccagatcgtgtctgccgaagcctggggcagagccgattgcggctttaccagcgagagctaccagcagggcgtgctgagcgccaccatcctgtacgagatcctgctgggcaaggccaccctgtacgccgtgctggtgtctgccctggtgctgatggctatggtcaagcggaaggacagccgggga

SEQ ID NO: 17170 - DNA, 339 bp, synthetic construct
  source 1..339: mol_type = other DNA
cccgccctgaacgacagccggtactgcctgagcagcagactgagagtgtccgccaccttctggcagaacccccggaaccacttcagatgccaggtgcagttctacggcctgagcgagaacgacgagtggacccaggacagagccaagcccgtgacccagatcgtgtctgccgaagcctggggcagagccgattgcggctttaccagcgagagctaccagcagggcgtgctgagcgccaccatcctgtacgagatcctgctgggcaaggccaccctgtacgccgtgctggtgtctgccctggtgctgatggctatggtcaagcggaaggacagccgggga

SEQ ID NO: 17171 - DNA, 336 bp, synthetic construct
  source 1..336: mol_type = other DNA
gccctgaacgacagccggtactgcctgagcagcagactgagagtgtccgccaccttctggcagaacccccggaaccacttcagatgccaggtgcagttctacggcctgagcgagaacgacgagtggacccaggacagagccaagcccgtgacccagatcgtgtctgccgaagcctggggcagagccgattgcggctttaccagcgagagctaccagcagggcgtgctgagcgccaccatcctgtacgagatcctgctgggcaaggccaccctgtacgccgtgctggtgtctgccctggtgctgatggctatggtcaagcggaaggacagccgggga

SEQ ID NO: 17172 - DNA, 333 bp, synthetic construct
  source 1..333: mol_type = other DNA
ctgaacgacagccggtactgcctgagcagcagactgagagtgtccgccaccttctggcagaacccccggaaccacttcagatgccaggtgcagttctacggcctgagcgagaacgacgagtggacccaggacagagccaagcccgtgacccagatcgtgtctgccgaagcctggggcagagccgattgcggctttaccagcgagagctaccagcagggcgtgctgagcgccaccatcctgtacgagatcctgctgggcaaggccaccctgtacgccgtgctggtgtctgccctggtgctgatggctatggtcaagcggaaggacagccgggga

SEQ ID NO: 17173 - DNA, 330 bp, synthetic construct
  source 1..330: mol_type = other DNA
aacgacagccggtactgcctgagcagcagactgagagtgtccgccaccttctggcagaacccccggaaccacttcagatgccaggtgcagttctacggcctgagcgagaacgacgagtggacccaggacagagccaagcccgtgacccagatcgtgtctgccgaagcctggggcagagccgattgcggctttaccagcgagagctaccagcagggcgtgctgagcgccaccatcctgtacgagatcctgctgggcaaggccaccctgtacgccgtgctggtgtctgccctggtgctgatggctatggtcaagcggaaggacagccgggga

SEQ ID NO: 17174 - DNA, 327 bp, synthetic construct
  source 1..327: mol_type = other DNA
gacagccggtactgcctgagcagcagactgagagtgtccgccaccttctggcagaacccccggaaccacttcagatgccaggtgcagttctacggcctgagcgagaacgacgagtggacccaggacagagccaagcccgtgacccagatcgtgtctgccgaagcctggggcagagccgattgcggctttaccagcgagagctaccagcagggcgtgctgagcgccaccatcctgtacgagatcctgctgggcaaggccaccctgtacgccgtgctggtgtctgccctggtgctgatggctatggtcaagcggaaggacagccgggga

SEQ ID NO: 17175 - DNA, 324 bp, synthetic construct
  source 1..324: mol_type = other DNA
agccggtactgcctgagcagcagactgagagtgtccgccaccttctggcagaacccccggaaccacttcagatgccaggtgcagttctacggcctgagcgagaacgacgagtggacccaggacagagccaagcccgtgacccagatcgtgtctgccgaagcctggggcagagccgattgcggctttaccagcgagagctaccagcagggcgtgctgagcgccaccatcctgtacgagatcctgctgggcaaggccaccctgtacgccgtgctggtgtctgccctggtgctgatggctatggtcaagcggaaggacagccgggga

SEQ ID NO: 17176 - DNA, 321 bp, synthetic construct
  source 1..321: mol_type = other DNA
cggtactgcctgagcagcagactgagagtgtccgccaccttctggcagaacccccggaaccacttcagatgccaggtgcagttctacggcctgagcgagaacgacgagtggacccaggacagagccaagcccgtgacccagatcgtgtctgccgaagcctggggcagagccgattgcggctttaccagcgagagctaccagcagggcgtgctgagcgccaccatcctgtacgagatcctgctgggcaaggccaccctgtacgccgtgctggtgtctgccctggtgctgatggctatggtcaagcggaaggacagccgggga

SEQ ID NO: 17177 - DNA, 318 bp, synthetic construct
  source 1..318: mol_type = other DNA
tactgcctgagcagcagactgagagtgtccgccaccttctggcagaacccccggaaccacttcagatgccaggtgcagttctacggcctgagcgagaacgacgagtggacccaggacagagccaagcccgtgacccagatcgtgtctgccgaagcctggggcagagccgattgcggctttaccagcgagagctaccagcagggcgtgctgagcgccaccatcctgtacgagatcctgctgggcaaggccaccctgtacgccgtgctggtgtctgccctggtgctgatggctatggtcaagcggaaggacagccgggga

SEQ ID NO: 17178 - DNA, 315 bp, synthetic construct
  source 1..315: mol_type = other DNA
tgcctgagcagcagactgagagtgtccgccaccttctggcagaacccccggaaccacttcagatgccaggtgcagttctacggcctgagcgagaacgacgagtggacccaggacagagccaagcccgtgacccagatcgtgtctgccgaagcctggggcagagccgattgcggctttaccagcgagagctaccagcagggcgtgctgagcgccaccatcctgtacgagatcctgctgggcaaggccaccctgtacgccgtgctggtgtctgccctggtgctgatggctatggtcaagcggaaggacagccgggga

SEQ ID NO: 17179 - DNA, 312 bp, synthetic construct
  source 1..312: mol_type = other DNA
ctgagcagcagactgagagtgtccgccaccttctggcagaacccccggaaccacttcagatgccaggtgcagttctacggcctgagcgagaacgacgagtggacccaggacagagccaagcccgtgacccagatcgtgtctgccgaagcctggggcagagccgattgcggctttaccagcgagagctaccagcagggcgtgctgagcgccaccatcctgtacgagatcctgctgggcaaggccaccctgtacgccgtgctggtgtctgccctggtgctgatggctatggtcaagcggaaggacagccgggga

SEQ ID NO: 17180 - DNA, 309 bp, synthetic construct
  source 1..309: mol_type = other DNA
agcagcagactgagagtgtccgccaccttctggcagaacccccggaaccacttcagatgccaggtgcagttctacggcctgagcgagaacgacgagtggacccaggacagagccaagcccgtgacccagatcgtgtctgccgaagcctggggcagagccgattgcggctttaccagcgagagctaccagcagggcgtgctgagcgccaccatcctgtacgagatcctgctgggcaaggccaccctgtacgccgtgctggtgtctgccctggtgctgatggctatggtcaagcggaaggacagccgggga

SEQ ID NO: 17181 - DNA, 306 bp, synthetic construct
  source 1..306: mol_type = other DNA
agcagactgagagtgtccgccaccttctggcagaacccccggaaccacttcagatgccaggtgcagttctacggcctgagcgagaacgacgagtggacccaggacagagccaagcccgtgacccagatcgtgtctgccgaagcctggggcagagccgattgcggctttaccagcgagagctaccagcagggcgtgctgagcgccaccatcctgtacgagatcctgctgggcaaggccaccctgtacgccgtgctggtgtctgccctggtgctgatggctatggtcaagcggaaggacagccgggga

SEQ ID NO: 17182 - DNA, 303 bp, synthetic construct
  source 1..303: mol_type = other DNA
agactgagagtgtccgccaccttctggcagaacccccggaaccacttcagatgccaggtgcagttctacggcctgagcgagaacgacgagtggacccaggacagagccaagcccgtgacccagatcgtgtctgccgaagcctggggcagagccgattgcggctttaccagcgagagctaccagcagggcgtgctgagcgccaccatcctgtacgagatcctgctgggcaaggccaccctgtacgccgtgctggtgtctgccctggtgctgatggctatggtcaagcggaaggacagccgggga

SEQ ID NO: 17183 - DNA, 300 bp, synthetic construct
  source 1..300: mol_type = other DNA
ctgagagtgtccgccaccttctggcagaacccccggaaccacttcagatgccaggtgcagttctacggcctgagcgagaacgacgagtggacccaggacagagccaagcccgtgacccagatcgtgtctgccgaagcctggggcagagccgattgcggctttaccagcgagagctaccagcagggcgtgctgagcgccaccatcctgtacgagatcctgctgggcaaggccaccctgtacgccgtgctggtgtctgccctggtgctgatggctatggtcaagcggaaggacagccgggga

SEQ ID NO: 17184 - DNA, 297 bp, synthetic construct
  source 1..297: mol_type = other DNA
agagtgtccgccaccttctggcagaacccccggaaccacttcagatgccaggtgcagttctacggcctgagcgagaacgacgagtggacccaggacagagccaagcccgtgacccagatcgtgtctgccgaagcctggggcagagccgattgcggctttaccagcgagagctaccagcagggcgtgctgagcgccaccatcctgtacgagatcctgctgggcaaggccaccctgtacgccgtgctggtgtctgccctggtgctgatggctatggtcaagcggaaggacagccgggga

SEQ ID NO: 17185 - DNA, 294 bp, synthetic construct
  source 1..294: mol_type = other DNA
gtgtccgccaccttctggcagaacccccggaaccacttcagatgccaggtgcagttctacggcctgagcgagaacgacgagtggacccaggacagagccaagcccgtgacccagatcgtgtctgccgaagcctggggcagagccgattgcggctttaccagcgagagctaccagcagggcgtgctgagcgccaccatcctgtacgagatcctgctgggcaaggccaccctgtacgccgtgctggtgtctgccctggtgctgatggctatggtcaagcggaaggacagccgggga

SEQ ID NO: 17186 - DNA, 291 bp, synthetic construct
  source 1..291: mol_type = other DNA
tccgccaccttctggcagaacccccggaaccacttcagatgccaggtgcagttctacggcctgagcgagaacgacgagtggacccaggacagagccaagcccgtgacccagatcgtgtctgccgaagcctggggcagagccgattgcggctttaccagcgagagctaccagcagggcgtgctgagcgccaccatcctgtacgagatcctgctgggcaaggccaccctgtacgccgtgctggtgtctgccctggtgctgatggctatggtcaagcggaaggacagccgggga

SEQ ID NO: 17187 - DNA, 288 bp, synthetic construct
  source 1..288: mol_type = other DNA
gccaccttctggcagaacccccggaaccacttcagatgccaggtgcagttctacggcctgagcgagaacgacgagtggacccaggacagagccaagcccgtgacccagatcgtgtctgccgaagcctggggcagagccgattgcggctttaccagcgagagctaccagcagggcgtgctgagcgccaccatcctgtacgagatcctgctgggcaaggccaccctgtacgccgtgctggtgtctgccctggtgctgatggctatggtcaagcggaaggacagccgggga

SEQ ID NO: 17188 - DNA, 285 bp, synthetic construct
  source 1..285: mol_type = other DNA
accttctggcagaacccccggaaccacttcagatgccaggtgcagttctacggcctgagcgagaacgacgagtggacccaggacagagccaagcccgtgacccagatcgtgtctgccgaagcctggggcagagccgattgcggctttaccagcgagagctaccagcagggcgtgctgagcgccaccatcctgtacgagatcctgctgggcaaggccaccctgtacgccgtgctggtgtctgccctggtgctgatggctatggtcaagcggaaggacagccgggga

SEQ ID NO: 17189 - DNA, 282 bp, synthetic construct
  source 1..282: mol_type = other DNA
ttctggcagaacccccggaaccacttcagatgccaggtgcagttctacggcctgagcgagaacgacgagtggacccaggacagagccaagcccgtgacccagatcgtgtctgccgaagcctggggcagagccgattgcggctttaccagcgagagctaccagcagggcgtgctgagcgccaccatcctgtacgagatcctgctgggcaaggccaccctgtacgccgtgctggtgtctgccctggtgctgatggctatggtcaagcggaaggacagccgggga

SEQ ID NO: 17190 - DNA, 279 bp, synthetic construct
  source 1..279: mol_type = other DNA
tggcagaacccccggaaccacttcagatgccaggtgcagttctacggcctgagcgagaacgacgagtggacccaggacagagccaagcccgtgacccagatcgtgtctgccgaagcctggggcagagccgattgcggctttaccagcgagagctaccagcagggcgtgctgagcgccaccatcctgtacgagatcctgctgggcaaggccaccctgtacgccgtgctggtgtctgccctggtgctgatggctatggtcaagcggaaggacagccgggga

SEQ ID NO: 17191 - DNA, 276 bp, synthetic construct
  source 1..276: mol_type = other DNA
cagaacccccggaaccacttcagatgccaggtgcagttctacggcctgagcgagaacgacgagtggacccaggacagagccaagcccgtgacccagatcgtgtctgccgaagcctggggcagagccgattgcggctttaccagcgagagctaccagcagggcgtgctgagcgccaccatcctgtacgagatcctgctgggcaaggccaccctgtacgccgtgctggtgtctgccctggtgctgatggctatggtcaagcggaaggacagccgggga

SEQ ID NO: 17192 - DNA, 273 bp, synthetic construct
  source 1..273: mol_type = other DNA
aacccccggaaccacttcagatgccaggtgcagttctacggcctgagcgagaacgacgagtggacccaggacagagccaagcccgtgacccagatcgtgtctgccgaagcctggggcagagccgattgcggctttaccagcgagagctaccagcagggcgtgctgagcgccaccatcctgtacgagatcctgctgggcaaggccaccctgtacgccgtgctggtgtctgccctggtgctgatggctatggtcaagcggaaggacagccgggga

SEQ ID NO: 17193 - DNA, 270 bp, synthetic construct
  source 1..270: mol_type = other DNA
ccccggaaccacttcagatgccaggtgcagttctacggcctgagcgagaacgacgagtggacccaggacagagccaagcccgtgacccagatcgtgtctgccgaagcctggggcagagccgattgcggctttaccagcgagagctaccagcagggcgtgctgagcgccaccatcctgtacgagatcctgctgggcaaggccaccctgtacgccgtgctggtgtctgccctggtgctgatggctatggtcaagcggaaggacagccgggga

SEQ ID NO: 17194 - DNA, 267 bp, synthetic construct
  source 1..267: mol_type = other DNA
cggaaccacttcagatgccaggtgcagttctacggcctgagcgagaacgacgagtggacccaggacagagccaagcccgtgacccagatcgtgtctgccgaagcctggggcagagccgattgcggctttaccagcgagagctaccagcagggcgtgctgagcgccaccatcctgtacgagatcctgctgggcaaggccaccctgtacgccgtgctggtgtctgccctggtgctgatggctatggtcaagcggaaggacagccgggga

SEQ ID NO: 17195 - DNA, 264 bp, synthetic construct
  source 1..264: mol_type = other DNA
aaccacttcagatgccaggtgcagttctacggcctgagcgagaacgacgagtggacccaggacagagccaagcccgtgacccagatcgtgtctgccgaagcctggggcagagccgattgcggctttaccagcgagagctaccagcagggcgtgctgagcgccaccatcctgtacgagatcctgctgggcaaggccaccctgtacgccgtgctggtgtctgccctggtgctgatggctatggtcaagcggaaggacagccgggga

SEQ ID NO: 17196 - DNA, 261 bp, synthetic construct
  source 1..261: mol_type = other DNA
cacttcagatgccaggtgcagttctacggcctgagcgagaacgacgagtggacccaggacagagccaagcccgtgacccagatcgtgtctgccgaagcctggggcagagccgattgcggctttaccagcgagagctaccagcagggcgtgctgagcgccaccatcctgtacgagatcctgctgggcaaggccaccctgtacgccgtgctggtgtctgccctggtgctgatggctatggtcaagcggaaggacagccgggga

SEQ ID NO: 17197 - DNA, 258 bp, synthetic construct
  source 1..258: mol_type = other DNA
ttcagatgccaggtgcagttctacggcctgagcgagaacgacgagtggacccaggacagagccaagcccgtgacccagatcgtgtctgccgaagcctggggcagagccgattgcggctttaccagcgagagctaccagcagggcgtgctgagcgccaccatcctgtacgagatcctgctgggcaaggccaccctgtacgccgtgctggtgtctgccctggtgctgatggctatggtcaagcggaaggacagccgggga

SEQ ID NO: 17198 - DNA, 255 bp, synthetic construct
  source 1..255: mol_type = other DNA
agatgccaggtgcagttctacggcctgagcgagaacgacgagtggacccaggacagagccaagcccgtgacccagatcgtgtctgccgaagcctggggcagagccgattgcggctttaccagcgagagctaccagcagggcgtgctgagcgccaccatcctgtacgagatcctgctgggcaaggccaccctgtacgccgtgctggtgtctgccctggtgctgatggctatggtcaagcggaaggacagccgggga

SEQ ID NO: 17199 - DNA, 252 bp, synthetic construct
  source 1..252: mol_type = other DNA
tgccaggtgcagttctacggcctgagcgagaacgacgagtggacccaggacagagccaagcccgtgacccagatcgtgtctgccgaagcctggggcagagccgattgcggctttaccagcgagagctaccagcagggcgtgctgagcgccaccatcctgtacgagatcctgctgggcaaggccaccctgtacgccgtgctggtgtctgccctggtgctgatggctatggtcaagcggaaggacagccgggga

SEQ ID NO: 17200 - DNA, 249 bp, synthetic construct
  source 1..249: mol_type = other DNA
caggtgcagttctacggcctgagcgagaacgacgagtggacccaggacagagccaagcccgtgacccagatcgtgtctgccgaagcctggggcagagccgattgcggctttaccagcgagagctaccagcagggcgtgctgagcgccaccatcctgtacgagatcctgctgggcaaggccaccctgtacgccgtgctggtgtctgccctggtgctgatggctatggtcaagcggaaggacagccgggga

SEQ ID NO: 17201 - DNA, 246 bp, synthetic construct
  source 1..246: mol_type = other DNA
gtgcagttctacggcctgagcgagaacgacgagtggacccaggacagagccaagcccgtgacccagatcgtgtctgccgaagcctggggcagagccgattgcggctttaccagcgagagctaccagcagggcgtgctgagcgccaccatcctgtacgagatcctgctgggcaaggccaccctgtacgccgtgctggtgtctgccctggtgctgatggctatggtcaagcggaaggacagccgggga

SEQ ID NO: 17202 - DNA, 243 bp, synthetic construct
  source 1..243: mol_type = other DNA
cagttctacggcctgagcgagaacgacgagtggacccaggacagagccaagcccgtgacccagatcgtgtctgccgaagcctggggcagagccgattgcggctttaccagcgagagctaccagcagggcgtgctgagcgccaccatcctgtacgagatcctgctgggcaaggccaccctgtacgccgtgctggtgtctgccctggtgctgatggctatggtcaagcggaaggacagccgggga

SEQ ID NO: 17203 - DNA, 240 bp, synthetic construct
  source 1..240: mol_type = other DNA
ttctacggcctgagcgagaacgacgagtggacccaggacagagccaagcccgtgacccagatcgtgtctgccgaagcctggggcagagccgattgcggctttaccagcgagagctaccagcagggcgtgctgagcgccaccatcctgtacgagatcctgctgggcaaggccaccctgtacgccgtgctggtgtctgccctggtgctgatggctatggtcaagcggaaggacagccgggga

SEQ ID NO: 17204 - DNA, 237 bp, synthetic construct
  source 1..237: mol_type = other DNA
tacggcctgagcgagaacgacgagtggacccaggacagagccaagcccgtgacccagatcgtgtctgccgaagcctggggcagagccgattgcggctttaccagcgagagctaccagcagggcgtgctgagcgccaccatcctgtacgagatcctgctgggcaaggccaccctgtacgccgtgctggtgtctgccctggtgctgatggctatggtcaagcggaaggacagccgggga

SEQ ID NO: 17205 - DNA, 234 bp, synthetic construct
  source 1..234: mol_type = other DNA
ggcctgagcgagaacgacgagtggacccaggacagagccaagcccgtgacccagatcgtgtctgccgaagcctggggcagagccgattgcggctttaccagcgagagctaccagcagggcgtgctgagcgccaccatcctgtacgagatcctgctgggcaaggccaccctgtacgccgtgctggtgtctgccctggtgctgatggctatggtcaagcggaaggacagccgggga

SEQ ID NO: 17206 - DNA, 231 bp, synthetic construct
  source 1..231: mol_type = other DNA
ctgagcgagaacgacgagtggacccaggacagagccaagcccgtgacccagatcgtgtctgccgaagcctggggcagagccgattgcggctttaccagcgagagctaccagcagggcgtgctgagcgccaccatcctgtacgagatcctgctgggcaaggccaccctgtacgccgtgctggtgtctgccctggtgctgatggctatggtcaagcggaaggacagccgggga

SEQ ID NO: 17207 - DNA, 228 bp, synthetic construct
  source 1..228: mol_type = other DNA
agcgagaacgacgagtggacccaggacagagccaagcccgtgacccagatcgtgtctgccgaagcctggggcagagccgattgcggctttaccagcgagagctaccagcagggcgtgctgagcgccaccatcctgtacgagatcctgctgggcaaggccaccctgtacgccgtgctggtgtctgccctggtgctgatggctatggtcaagcggaaggacagccgggga

SEQ ID NO: 17208 - DNA, 225 bp, synthetic construct
  source 1..225: mol_type = other DNA
gagaacgacgagtggacccaggacagagccaagcccgtgacccagatcgtgtctgccgaagcctggggcagagccgattgcggctttaccagcgagagctaccagcagggcgtgctgagcgccaccatcctgtacgagatcctgctgggcaaggccaccctgtacgccgtgctggtgtctgccctggtgctgatggctatggtcaagcggaaggacagccgggga

SEQ ID NO: 17209 - DNA, 222 bp, synthetic construct
  source 1..222: mol_type = other DNA
aacgacgagtggacccaggacagagccaagcccgtgacccagatcgtgtctgccgaagcctggggcagagccgattgcggctttaccagcgagagctaccagcagggcgtgctgagcgccaccatcctgtacgagatcctgctgggcaaggccaccctgtacgccgtgctggtgtctgccctggtgctgatggctatggtcaagcggaaggacagccgggga

SEQ ID NO: 17210 - DNA, 219 bp, synthetic construct
  source 1..219: mol_type = other DNA
gacgagtggacccaggacagagccaagcccgtgacccagatcgtgtctgccgaagcctggggcagagccgattgcggctttaccagcgagagctaccagcagggcgtgctgagcgccaccatcctgtacgagatcctgctgggcaaggccaccctgtacgccgtgctggtgtctgccctggtgctgatggctatggtcaagcggaaggacagccgggga

SEQ ID NO: 17211 - DNA, 216 bp, synthetic construct
  source 1..216: mol_type = other DNA
gagtggacccaggacagagccaagcccgtgacccagatcgtgtctgccgaagcctggggcagagccgattgcggctttaccagcgagagctaccagcagggcgtgctgagcgccaccatcctgtacgagatcctgctgggcaaggccaccctgtacgccgtgctggtgtctgccctggtgctgatggctatggtcaagcggaaggacagccgggga

SEQ ID NO: 17212 - DNA, 213 bp, synthetic construct
  source 1..213: mol_type = other DNA
tggacccaggacagagccaagcccgtgacccagatcgtgtctgccgaagcctggggcagagccgattgcggctttaccagcgagagctaccagcagggcgtgctgagcgccaccatcctgtacgagatcctgctgggcaaggccaccctgtacgccgtgctggtgtctgccctggtgctgatggctatggtcaagcggaaggacagccgggga

SEQ ID NO: 17213 - DNA, 210 bp, synthetic construct
  source 1..210: mol_type = other DNA
acccaggacagagccaagcccgtgacccagatcgtgtctgccgaagcctggggcagagccgattgcggctttaccagcgagagctaccagcagggcgtgctgagcgccaccatcctgtacgagatcctgctgggcaaggccaccctgtacgccgtgctggtgtctgccctggtgctgatggctatggtcaagcggaaggacagccgggga

SEQ ID NO: 17214 - DNA, 207 bp, synthetic construct
  source 1..207: mol_type = other DNA
caggacagagccaagcccgtgacccagatcgtgtctgccgaagcctggggcagagccgattgcggctttaccagcgagagctaccagcagggcgtgctgagcgccaccatcctgtacgagatcctgctgggcaaggccaccctgtacgccgtgctggtgtctgccctggtgctgatggctatggtcaagcggaaggacagccgggga

SEQ ID NO: 17215 - DNA, 204 bp, synthetic construct
  source 1..204: mol_type = other DNA
gacagagccaagcccgtgacccagatcgtgtctgccgaagcctggggcagagccgattgcggctttaccagcgagagctaccagcagggcgtgctgagcgccaccatcctgtacgagatcctgctgggcaaggccaccctgtacgccgtgctggtgtctgccctggtgctgatggctatggtcaagcggaaggacagccgggga

SEQ ID NO: 17216 - DNA, 201 bp, synthetic construct
  source 1..201: mol_type = other DNA
agagccaagcccgtgacccagatcgtgtctgccgaagcctggggcagagccgattgcggctttaccagcgagagctaccagcagggcgtgctgagcgccaccatcctgtacgagatcctgctgggcaaggccaccctgtacgccgtgctggtgtctgccctggtgctgatggctatggtcaagcggaaggacagccgggga

SEQ ID NO: 17217 - DNA, 198 bp, synthetic construct
  source 1..198: mol_type = other DNA
gccaagcccgtgacccagatcgtgtctgccgaagcctggggcagagccgattgcggctttaccagcgagagctaccagcagggcgtgctgagcgccaccatcctgtacgagatcctgctgggcaaggccaccctgtacgccgtgctggtgtctgccctggtgctgatggctatggtcaagcggaaggacagccgggga

SEQ ID NO: 17218 - DNA, 195 bp, synthetic construct
  source 1..195: mol_type = other DNA
aagcccgtgacccagatcgtgtctgccgaagcctggggcagagccgattgcggctttaccagcgagagctaccagcagggcgtgctgagcgccaccatcctgtacgagatcctgctgggcaaggccaccctgtacgccgtgctggtgtctgccctggtgctgatggctatggtcaagcggaaggacagccgggga

SEQ ID NO: 17219 - DNA, 192 bp, synthetic construct
  source 1..192: mol_type = other DNA
cccgtgacccagatcgtgtctgccgaagcctggggcagagccgattgcggctttaccagcgagagctaccagcagggcgtgctgagcgccaccatcctgtacgagatcctgctgggcaaggccaccctgtacgccgtgctggtgtctgccctggtgctgatggctatggtcaagcggaaggacagccgggga

SEQ ID NO: 17220 - DNA, 189 bp, synthetic construct
  source 1..189: mol_type = other DNA
gtgacccagatcgtgtctgccgaagcctggggcagagccgattgcggctttaccagcgagagctaccagcagggcgtgctgagcgccaccatcctgtacgagatcctgctgggcaaggccaccctgtacgccgtgctggtgtctgccctggtgctgatggctatggtcaagcggaaggacagccgggga

SEQ ID NO: 17221 - DNA, 186 bp, synthetic construct
  source 1..186: mol_type = other DNA
acccagatcgtgtctgccgaagcctggggcagagccgattgcggctttaccagcgagagctaccagcagggcgtgctgagcgccaccatcctgtacgagatcctgctgggcaaggccaccctgtacgccgtgctggtgtctgccctggtgctgatggctatggtcaagcggaaggacagccgggga

SEQ ID NO: 17222 - DNA, 183 bp, synthetic construct
  source 1..183: mol_type = other DNA
cagatcgtgtctgccgaagcctggggcagagccgattgcggctttaccagcgagagctaccagcagggcgtgctgagcgccaccatcctgtacgagatcctgctgggcaaggccaccctgtacgccgtgctggtgtctgccctggtgctgatggctatggtcaagcggaaggacagccgggga

SEQ ID NO: 17223 - DNA, 180 bp, synthetic construct
  source 1..180: mol_type = other DNA
atcgtgtctgccgaagcctggggcagagccgattgcggctttaccagcgagagctaccagcagggcgtgctgagcgccaccatcctgtacgagatcctgctgggcaaggccaccctgtacgccgtgctggtgtctgccctggtgctgatggctatggtcaagcggaaggacagccgggga

SEQ ID NO: 17224 - DNA, 177 bp, synthetic construct
  source 1..177: mol_type = other DNA
gtgtctgccgaagcctggggcagagccgattgcggctttaccagcgagagctaccagcagggcgtgctgagcgccaccatcctgtacgagatcctgctgggcaaggccaccctgtacgccgtgctggtgtctgccctggtgctgatggctatggtcaagcggaaggacagccgggga

SEQ ID NO: 17225 - DNA, 174 bp, synthetic construct
  source 1..174: mol_type = other DNA
tctgccgaagcctggggcagagccgattgcggctttaccagcgagagctaccagcagggcgtgctgagcgccaccatcctgtacgagatcctgctgggcaaggccaccctgtacgccgtgctggtgtctgccctggtgctgatggctatggtcaagcggaaggacagccgggga

SEQ ID NO: 17226 - DNA, 171 bp, synthetic construct
  source 1..171: mol_type = other DNA
gccgaagcctggggcagagccgattgcggctttaccagcgagagctaccagcagggcgtgctgagcgccaccatcctgtacgagatcctgctgggcaaggccaccctgtacgccgtgctggtgtctgccctggtgctgatggctatggtcaagcggaaggacagccgggga

SEQ ID NO: 17227 - DNA, 168 bp, synthetic construct
  source 1..168: mol_type = other DNA
gaagcctggggcagagccgattgcggctttaccagcgagagctaccagcagggcgtgctgagcgccaccatcctgtacgagatcctgctgggcaaggccaccctgtacgccgtgctggtgtctgccctggtgctgatggctatggtcaagcggaaggacagccgggga

SEQ ID NO: 17228 - DNA, 165 bp, synthetic construct
  source 1..165: mol_type = other DNA
gcctggggcagagccgattgcggctttaccagcgagagctaccagcagggcgtgctgagcgccaccatcctgtacgagatcctgctgggcaaggccaccctgtacgccgtgctggtgtctgccctggtgctgatggctatggtcaagcggaaggacagccgggga

SEQ ID NO: 17229 - DNA, 162 bp, synthetic construct
  source 1..162: mol_type = other DNA
tggggcagagccgattgcggctttaccagcgagagctaccagcagggcgtgctgagcgccaccatcctgtacgagatcctgctgggcaaggccaccctgtacgccgtgctggtgtctgccctggtgctgatggctatggtcaagcggaaggacagccgggga

SEQ ID NO: 17230 - DNA, 159 bp, synthetic construct; identical to SEQ ID NO: 518
  source 1..159: mol_type = other DNA

SEQ ID NO: 17231 - DNA, 519 bp, synthetic construct; identical to SEQ ID NO: 493
  source 1..519: mol_type = other DNA

SEQ ID NO: 17232 - DNA, 516 bp, synthetic construct
  source 1..516: mol_type = other DNA
aagcagctggacgccgacgtgtcccccaagcctaccatcttcctgccctctatcgccgagacaaagctccagaaggccggcacctacctgtgcctgctggaaaagttcttcccagatgtgattaagatccactggcaggaaaagaagtccaacaccatcctgggcagccaggaaggcaacaccatgaagaccaacgacacctacatgaagttcagctggctgaccgtgcccgagaagtccctggacaaagaacacagatgcatcgtgcggcacgaaaacaacaagaacggcgtggaccaggaaatcatcttcccacccatcaagaccgatgtgattacaatggaccccaaggacaactgctccaaggacgccaacgataccctgctgctccagctgaccaacaccagcgcctactacatgtacttgttgctgctgctgaagtccgtggtgtacttcgccatcatcacatgctgcctgctgcggagaaccgccttctgctgcaacggcgagaagtct

SEQ ID NO: 17233 - DNA, 513 bp, synthetic construct
  source 1..513: mol_type = other DNA
cagctggacgccgacgtgtcccccaagcctaccatcttcctgccctctatcgccgagacaaagctccagaaggccggcacctacctgtgcctgctggaaaagttcttcccagatgtgattaagatccactggcaggaaaagaagtccaacaccatcctgggcagccaggaaggcaacaccatgaagaccaacgacacctacatgaagttcagctggctgaccgtgcccgagaagtccctggacaaagaacacagatgcatcgtgcggcacgaaaacaacaagaacggcgtggaccaggaaatcatcttcccacccatcaagaccgatgtgattacaatggaccccaaggacaactgctccaaggacgccaacgataccctgctgctccagctgaccaacaccagcgcctactacatgtacttgttgctgctgctgaagtccgtggtgtacttcgccatcatcacatgctgcctgctgcggagaaccgccttctgctgcaacggcgagaagtct

SEQ ID NO: 17234 - DNA, 510 bp, synthetic construct
  source 1..510: mol_type = other DNA
ctggacgccgacgtgtcccccaagcctaccatcttcctgccctctatcgccgagacaaagctccagaaggccggcacctacctgtgcctgctggaaaagttcttcccagatgtgattaagatccactggcaggaaaagaagtccaacaccatcctgggcagccaggaaggcaacaccatgaagaccaacgacacctacatgaagttcagctggctgaccgtgcccgagaagtccctggacaaagaacacagatgcatcgtgcggcacgaaaacaacaagaacggcgtggaccaggaaatcatcttcccacccatcaagaccgatgtgattacaatggaccccaaggacaactgctccaaggacgccaacgataccctgctgctccagctgaccaacaccagcgcctactacatgtacttgttgctgctgctgaagtccgtggtgtacttcgccatcatcacatgctgcctgctgcggagaaccgccttctgctgcaacggcgagaagtct

SEQ ID NO: 17235 - DNA, 507 bp, synthetic construct
  source 1..507: mol_type = other DNA
gacgccgacgtgtcccccaagcctaccatcttcctgccctctatcgccgagacaaagctccagaaggccggcacctacctgtgcctgctggaaaagttcttcccagatgtgattaagatccactggcaggaaaagaagtccaacaccatcctgggcagccaggaaggcaacaccatgaagaccaacgacacctacatgaagttcagctggctgaccgtgcccgagaagtccctggacaaagaacacagatgcatcgtgcggcacgaaaacaacaagaacggcgtggaccaggaaatcatcttcccacccatcaagaccgatgtgattacaatggaccccaaggacaactgctccaaggacgccaacgataccctgctgctccagctgaccaacaccagcgcctactacatgtacttgttgctgctgctgaagtccgtggtgtacttcgccatcatcacatgctgcctgctgcggagaaccgccttctgctgcaacggcgagaagtct

SEQ ID NO: 17236 - DNA, 504 bp, synthetic construct; identical to SEQ ID NO: 521
  source 1..504: mol_type = other DNA

SEQ ID NO: 17237 - DNA, 501 bp, synthetic construct
  source 1..501: mol_type = other DNA
gacgtgtcccccaagcctaccatcttcctgccctctatcgccgagacaaagctccagaaggccggcacctacctgtgcctgctggaaaagttcttcccagatgtgattaagatccactggcaggaaaagaagtccaacaccatcctgggcagccaggaaggcaacaccatgaagaccaacgacacctacatgaagttcagctggctgaccgtgcccgagaagtccctggacaaagaacacagatgcatcgtgcggcacgaaaacaacaagaacggcgtggaccaggaaatcatcttcccacccatcaagaccgatgtgattacaatggaccccaaggacaactgctccaaggacgccaacgataccctgctgctccagctgaccaacaccagcgcctactacatgtacttgttgctgctgctgaagtccgtggtgtacttcgccatcatcacatgctgcctgctgcggagaaccgccttctgctgcaacggcgagaagtct

SEQ ID NO: 17238 - DNA, 498 bp, synthetic construct; identical to SEQ ID NO: 522
  source 1..498: mol_type = other DNA

SEQ ID NO: 17239 - DNA, 495 bp, synthetic construct
  source 1..495: mol_type = other DNA
tcccccaagcctaccatcttcctgccctctatcgccgagacaaagctccagaaggccggcacctacctgtgcctgctggaaaagttcttcccagatgtgattaagatccactggcaggaaaagaagtccaacaccatcctgggcagccaggaaggcaacaccatgaagaccaacgacacctacatgaagttcagctggctgaccgtgcccgagaagtccctggacaaagaacacagatgcatcgtgcggcacgaaaacaacaagaacggcgtggaccaggaaatcatcttcccacccatcaagaccgatgtgattacaatggaccccaaggacaactgctccaaggacgccaacgataccctgctgctccagctgaccaacaccagcgcctactacatgtacttgttgctgctgctgaagtccgtggtgtacttcgccatcatcacatgctgcctgctgcggagaaccgccttctgctgcaacggcgagaagtct

SEQ ID NO: 17240 - DNA, 492 bp, synthetic construct
  source 1..492: mol_type = other DNA
cccaagcctaccatcttcctgccctctatcgccgagacaaagctccagaaggccggcacctacctgtgcctgctggaaaagttcttcccagatgtgattaagatccactggcaggaaaagaagtccaacaccatcctgggcagccaggaaggcaacaccatgaagaccaacgacacctacatgaagttcagctggctgaccgtgcccgagaagtccctggacaaagaacacagatgcatcgtgcggcacgaaaacaacaagaacggcgtggaccaggaaatcatcttcccacccatcaagaccgatgtgattacaatggaccccaaggacaactgctccaaggacgccaacgataccctgctgctccagctgaccaacaccagcgcctactacatgtacttgttgctgctgctgaagtccgtggtgtacttcgccatcatcacatgctgcctgctgcggagaaccgccttctgctgcaacggcgagaagtct

SEQ ID NO: 17241 - DNA, 489 bp, synthetic construct
  source 1..489: mol_type = other DNA
aagcctaccatcttcctgccctctatcgccgagacaaagctccagaaggccggcacctacctgtgcctgctggaaaagttcttcccagatgtgattaagatccactggcaggaaaagaagtccaacaccatcctgggcagccaggaaggcaacaccatgaagaccaacgacacctacatgaagttcagctggctgaccgtgcccgagaagtccctggacaaagaacacagatgcatcgtgcggcacgaaaacaacaagaacggcgtggaccaggaaatcatcttcccacccatcaagaccgatgtgattacaatggaccccaaggacaactgctccaaggacgccaacgataccctgctgctccagctgaccaacaccagcgcctactacatgtacttgttgctgctgctgaagtccgtggtgtacttcgccatcatcacatgctgcctgctgcggagaaccgccttctgctgcaacggcgagaagtct

SEQ ID NO: 17242 - DNA, 486 bp, synthetic construct
  source 1..486: mol_type = other DNA
cctaccatcttcctgccctctatcgccgagacaaagctccagaaggccggcacctacctgtgcctgctggaaaagttcttcccagatgtgattaagatccactggcaggaaaagaagtccaacaccatcctgggcagccaggaaggcaacaccatgaagaccaacgacacctacatgaagttcagctggctgaccgtgcccgagaagtccctggacaaagaacacagatgcatcgtgcggcacgaaaacaacaagaacggcgtggaccaggaaatcatcttcccacccatcaagaccgatgtgattacaatggaccccaaggacaactgctccaaggacgccaacgataccctgctgctccagctgaccaacaccagcgcctactacatgtacttgttgctgctgctgaagtccgtggtgtacttcgccatcatcacatgctgcctgctgcggagaaccgccttctgctgcaacggcgagaagtct

SEQ ID NO: 17243 - DNA, 483 bp, synthetic construct; identical to SEQ ID NO: 523
  source 1..483: mol_type = other DNA

SEQ ID NO: 17244 - DNA, 480 bp, synthetic construct
  source 1..480: mol_type = other DNA
atcttcctgccctctatcgccgagacaaagctccagaaggccggcacctacctgtgcctgctggaaaagttcttcccagatgtgattaagatccactggcaggaaaagaagtccaacaccatcctgggcagccaggaaggcaacaccatgaagaccaacgacacctacatgaagttcagctggctgaccgtgcccgagaagtccctggacaaagaacacagatgcatcgtgcggcacgaaaacaacaagaacggcgtggaccaggaaatcatcttcccacccatcaagaccgatgtgattacaatggaccccaaggacaactgctccaaggacgccaacgataccctgctgctccagctgaccaacaccagcgcctactacatgtacttgttgctgctgctgaagtccgtggtgtacttcgccatcatcacatgctgcctgctgcggagaaccgccttctgctgcaacggcgagaagtct

SEQ ID NO: 17245 - DNA, 477 bp, synthetic construct
  source 1..477: mol_type = other DNA
ttcctgccctctatcgccgagacaaagctccagaaggccggcacctacctgtgcctgctggaaaagttcttcccagatgtgattaagatccactggcaggaaaagaagtccaacaccatcctgggcagccaggaaggcaacaccatgaagaccaacgacacctacatgaagttcagctggctgaccgtgcccgagaagtccctggacaaagaacacagatgcatcgtgcggcacgaaaacaacaagaacggcgtggaccaggaaatcatcttcccacccatcaagaccgatgtgattacaatggaccccaaggacaactgctccaaggacgccaacgataccctgctgctccagctgaccaacaccagcgcctactacatgtacttgttgctgctgctgaagtccgtggtgtacttcgccatcatcacatgctgcctgctgcggagaaccgccttctgctgcaacggcgagaagtct

SEQ ID NO: 17246 - DNA, 474 bp, synthetic construct
  source 1..474: mol_type = other DNA
ctgccctctatcgccgagacaaagctccagaaggccggcacctacctgtgcctgctggaaaagttcttcccagatgtgattaagatccactggcaggaaaagaagtccaacaccatcctgggcagccaggaaggcaacaccatgaagaccaacgacacctacatgaagttcagctggctgaccgtgcccgagaagtccctggacaaagaacacagatgcatcgtgcggcacgaaaacaacaagaacggcgtggaccaggaaatcatcttcccacccatcaagaccgatgtgattacaatggaccccaaggacaactgctccaaggacgccaacgataccctgctgctccagctgaccaacaccagcgcctactacatgtacttgttgctgctgctgaagtccgtggtgtacttcgccatcatcacatgctgcctgctgcggagaaccgccttctgctgcaacggcgagaagtct

SEQ ID NO: 17247 - DNA, 471 bp, synthetic construct
  source 1..471: mol_type = other DNA
ccctctatcgccgagacaaagctccagaaggccggcacctacctgtgcctgctggaaaagttcttcccagatgtgattaagatccactggcaggaaaagaagtccaacaccatcctgggcagccaggaaggcaacaccatgaagaccaacgacacctacatgaagttcagctggctgaccgtgcccgagaagtccctggacaaagaacacagatgcatcgtgcggcacgaaaacaacaagaacggcgtggaccaggaaatcatcttcccacccatcaagaccgatgtgattacaatggaccccaaggacaactgctccaaggacgccaacgataccctgctgctccagctgaccaacaccagcgcctactacatgtacttgttgctgctgctgaagtccgtggtgtacttcgccatcatcacatgctgcctgctgcggagaaccgccttctgctgcaacggcgagaagtct

SEQ ID NO: 17248 - DNA, 468 bp, synthetic construct
  source 1..468: mol_type = other DNA
tctatcgccgagacaaagctccagaaggccggcacctacctgtgcctgctggaaaagttcttcccagatgtgattaagatccactggcaggaaaagaagtccaacaccatcctgggcagccaggaaggcaacaccatgaagaccaacgacacctacatgaagttcagctggctgaccgtgcccgagaagtccctggacaaagaacacagatgcatcgtgcggcacgaaaacaacaagaacggcgtggaccaggaaatcatcttcccacccatcaagaccgatgtgattacaatggaccccaaggacaactgctccaaggacgccaacgataccctgctgctccagctgaccaacaccagcgcctactacatgtacttgttgctgctgctgaagtccgtggtgtacttcgccatcatcacatgctgcctgctgcggagaaccgccttctgctgcaacggcgagaagtct

SEQ ID NO: 17249 - DNA, 465 bp, synthetic construct
  source 1..465: mol_type = other DNA
atcgccgagacaaagctccagaaggccggcacctacctgtgcctgctggaaaagttcttcccagatgtgattaagatccactggcaggaaaagaagtccaacaccatcctgggcagccaggaaggcaacaccatgaagaccaacgacacctacatgaagttcagctggctgaccgtgcccgagaagtccctggacaaagaacacagatgcatcgtgcggcacgaaaacaacaagaacggcgtggaccaggaaatcatcttcccacccatcaagaccgatgtgattacaatggaccccaaggacaactgctccaaggacgccaacgataccctgctgctccagctgaccaacaccagcgcctactacatgtacttgttgctgctgctgaagtccgtggtgtacttcgccatcatcacatgctgcctgctgcggagaaccgccttctgctgcaacggcgagaagtct

SEQ ID NO: 17250 - DNA, 462 bp, synthetic construct
  source 1..462: mol_type = other DNA
gccgagacaaagctccagaaggccggcacctacctgtgcctgctggaaaagttcttcccagatgtgattaagatccactggcaggaaaagaagtccaacaccatcctgggcagccaggaaggcaacaccatgaagaccaacgacacctacatgaagttcagctggctgaccgtgcccgagaagtccctggacaaagaacacagatgcatcgtgcggcacgaaaacaacaagaacggcgtggaccaggaaatcatcttcccacccatcaagaccgatgtgattacaatggaccccaaggacaactgctccaaggacgccaacgataccctgctgctccagctgaccaacaccagcgcctactacatgtacttgttgctgctgctgaagtccgtggtgtacttcgccatcatcacatgctgcctgctgcggagaaccgccttctgctgcaacggcgagaagtct

SEQ ID NO: 17251 - DNA, 459 bp, synthetic construct
  source 1..459: mol_type = other DNA
gagacaaagctccagaaggccggcacctacctgtgcctgctggaaaagttcttcccagatgtgattaagatccactggcaggaaaagaagtccaacaccatcctgggcagccaggaaggcaacaccatgaagaccaacgacacctacatgaagttcagctggctgaccgtgcccgagaagtccctggacaaagaacacagatgcatcgtgcggcacgaaaacaacaagaacggcgtggaccaggaaatcatcttcccacccatcaagaccgatgtgattacaatggaccccaaggacaactgctccaaggacgccaacgataccctgctgctccagctgaccaacaccagcgcctactacatgtacttgttgctgctgctgaagtccgtggtgtacttcgccatcatcacatgctgcctgctgcggagaaccgccttctgctgcaacggcgagaagtct

SEQ ID NO: 17252 - DNA, 456 bp, synthetic construct
  source 1..456: mol_type = other DNA
acaaagctccagaaggccggcacctacctgtgcctgctggaaaagttcttcccagatgtgattaagatccactggcaggaaaagaagtccaacaccatcctgggcagccaggaaggcaacaccatgaagaccaacgacacctacatgaagttcagctggctgaccgtgcccgagaagtccctggacaaagaacacagatgcatcgtgcggcacgaaaacaacaagaacggcgtggaccaggaaatcatcttcccacccatcaagaccgatgtgattacaatggaccccaaggacaactgctccaaggacgccaacgataccctgctgctccagctgaccaacaccagcgcctactacatgtacttgttgctgctgctgaagtccgtggtgtacttcgccatcatcacatgctgcctgctgcggagaaccgccttctgctgcaacggcgagaagtct

SEQ ID NO: 17253 - DNA, 453 bp, synthetic construct
  source 1..453: mol_type = other DNA
aagctccagaaggccggcacctacctgtgcctgctggaaaagttcttcccagatgtgattaagatccactggcaggaaaagaagtccaacaccatcctgggcagccaggaaggcaacaccatgaagaccaacgacacctacatgaagttcagctggctgaccgtgcccgagaagtccctggacaaagaacacagatgcatcgtgcggcacgaaaacaacaagaacggcgtggaccaggaaatcatcttcccacccatcaagaccgatgtgattacaatggaccccaaggacaactgctccaaggacgccaacgataccctgctgctccagctgaccaacaccagcgcctactacatgtacttgttgctgctgctgaagtccgtggtgtacttcgccatcatcacatgctgcctgctgcggagaaccgccttctgctgcaacggcgagaagtct

SEQ ID NO: 17254 - DNA, 450 bp, synthetic construct
  source 1..450: mol_type = other DNA
ctccagaaggccggcacctacctgtgcctgctggaaaagttcttcccagatgtgattaagatccactggcaggaaaagaagtccaacaccatcctgggcagccaggaaggcaacaccatgaagaccaacgacacctacatgaagttcagctggctgaccgtgcccgagaagtccctggacaaagaacacagatgcatcgtgcggcacgaaaacaacaagaacggcgtggaccaggaaatcatcttcccacccatcaagaccgatgtgattacaatggaccccaaggacaactgctccaaggacgccaacgataccctgctgctccagctgaccaacaccagcgcctactacatgtacttgttgctgctgctgaagtccgtggtgtacttcgccatcatcacatgctgcctgctgcggagaaccgccttctgctgcaacggcgagaagtct

SEQ ID NO: 17255 - DNA, 447 bp, synthetic construct
  source 1..447: mol_type = other DNA
cagaaggccggcacctacctgtgcctgctggaaaagttcttcccagatgtgattaagatccactggcaggaaaagaagtccaacaccatcctgggcagccaggaaggcaacaccatgaagaccaacgacacctacatgaagttcagctggctgaccgtgcccgagaagtccctggacaaagaacacagatgcatcgtgcggcacgaaaacaacaagaacggcgtggaccaggaaatcatcttcccacccatcaagaccgatgtgattacaatggaccccaaggacaactgctccaaggacgccaacgataccctgctgctccagctgaccaacaccagcgcctactacatgtacttgttgctgctgctgaagtccgtggtgtacttcgccatcatcacatgctgcctgctgcggagaaccgccttctgctgcaacggcgagaagtct

SEQ ID NO: 17256 - DNA, 444 bp, synthetic construct
  source 1..444: mol_type = other DNA
aaggccggcacctacctgtgcctgctggaaaagttcttcccagatgtgattaagatccactggcaggaaaagaagtccaacaccatcctgggcagccaggaaggcaacaccatgaagaccaacgacacctacatgaagttcagctggctgaccgtgcccgagaagtccctggacaaagaacacagatgcatcgtgcggcacgaaaacaacaagaacggcgtggaccaggaaatcatcttcccacccatcaagaccgatgtgattacaatggaccccaaggacaactgctccaaggacgccaacgataccctgctgctccagctgaccaacaccagcgcctactacatgtacttgttgctgctgctgaagtccgtggtgtacttcgccatcatcacatgctgcctgctgcggagaaccgccttctgctgcaacggcgagaagtct

SEQ ID NO: 17257 - DNA, 441 bp, synthetic construct
  source 1..441: mol_type = other DNA
gccggcacctacctgtgcctgctggaaaagttcttcccagatgtgattaagatccactggcaggaaaagaagtccaacaccatcctgggcagccaggaaggcaacaccatgaagaccaacgacacctacatgaagttcagctggctgaccgtgcccgagaagtccctggacaaagaacacagatgcatcgtgcggcacgaaaacaacaagaacggcgtggaccaggaaatcatcttcccacccatcaagaccgatgtgattacaatggaccccaaggacaactgctccaaggacgccaacgataccctgctgctccagctgaccaacaccagcgcctactacatgtacttgttgctgctgctgaagtccgtggtgtacttcgccatcatcacatgctgcctgctgcggagaaccgccttctgctgcaacggcgagaagtct

SEQ ID NO: 17258 - DNA, 438 bp, synthetic construct
  source 1..438: mol_type = other DNA
ggcacctacctgtgcctgctggaaaagttcttcccagatgtgattaagatccactggcaggaaaagaagtccaacaccatcctgggcagccaggaaggcaacaccatgaagaccaacgacacctacatgaagttcagctggctgaccgtgcccgagaagtccctggacaaagaacacagatgcatcgtgcggcacgaaaacaacaagaacggcgtggaccaggaaatcatcttcccacccatcaagaccgatgtgattacaatggaccccaaggacaactgctccaaggacgccaacgataccctgctgctccagctgaccaacaccagcgcctactacatgtacttgttgctgctgctgaagtccgtggtgtacttcgccatcatcacatgctgcctgctgcggagaaccgccttctgctgcaacggcgagaagtct

SEQ ID NO: 17259 - DNA, 435 bp, synthetic construct
  source 1..435: mol_type = other DNA
acctacctgtgcctgctggaaaagttcttcccagatgtgattaagatccactggcaggaaaagaagtccaacaccatcctgggcagccaggaaggcaacaccatgaagaccaacgacacctacatgaagttcagctggctgaccgtgcccgagaagtccctggacaaagaacacagatgcatcgtgcggcacgaaaacaacaagaacggcgtggaccaggaaatcatcttcccacccatcaagaccgatgtgattacaatggaccccaaggacaactgctccaaggacgccaacgataccctgctgctccagctgaccaacaccagcgcctactacatgtacttgttgctgctgctgaagtccgtggtgtacttcgccatcatcacatgctgcctgctgcggagaaccgccttctgctgcaacggcgagaagtct

SEQ ID NO: 17260 - DNA, 432 bp, synthetic construct
  source 1..432: mol_type = other DNA
tacctgtgcctgctggaaaagttcttcccagatgtgattaagatccactggcaggaaaagaagtccaacaccatcctgggcagccaggaaggcaacaccatgaagaccaacgacacctacatgaagttcagctggctgaccgtgcccgagaagtccctggacaaagaacacagatgcatcgtgcggcacgaaaacaacaagaacggcgtggaccaggaaatcatcttcccacccatcaagaccgatgtgattacaatggaccccaaggacaactgctccaaggacgccaacgataccctgctgctccagctgaccaacaccagcgcctactacatgtacttgttgctgctgctgaagtccgtggtgtacttcgccatcatcacatgctgcctgctgcggagaaccgccttctgctgcaacggcgagaagtct

SEQ ID NO: 17261 - DNA, 429 bp, synthetic construct
  source 1..429: mol_type = other DNA
ctgtgcctgctggaaaagttcttcccagatgtgattaagatccactggcaggaaaagaagtccaacaccatcctgggcagccaggaaggcaacaccatgaagaccaacgacacctacatgaagttcagctggctgaccgtgcccgagaagtccctggacaaagaacacagatgcatcgtgcggcacgaaaacaacaagaacggcgtggaccaggaaatcatcttcccacccatcaagaccgatgtgattacaatggaccccaaggacaactgctccaaggacgccaacgataccctgctgctccagctgaccaacaccagcgcctactacatgtacttgttgctgctgctgaagtccgtggtgtacttcgccatcatcacatgctgcctgctgcggagaaccgccttctgctgcaacggcgagaagtct

SEQ ID NO: 17262 - DNA, 426 bp, synthetic construct
  source 1..426: mol_type = other DNA
tgcctgctggaaaagttcttcccagatgtgattaagatccactggcaggaaaagaagtccaacaccatcctgggcagccaggaaggcaacaccatgaagaccaacgacacctacatgaagttcagctggctgaccgtgcccgagaagtccctggacaaagaacacagatgcatcgtgcggcacgaaaacaacaagaacggcgtggaccaggaaatcatcttcccacccatcaagaccgatgtgattacaatggaccccaaggacaactgctccaaggacgccaacgataccctgctgctccagctgaccaacaccagcgcctactacatgtacttgttgctgctgctgaagtccgtggtgtacttcgccatcatcacatgctgcctgctgcggagaaccgccttctgctgcaacggcgagaagtct

SEQ ID NO: 17263 - DNA, 423 bp, synthetic construct
  source 1..423: mol_type = other DNA
ctgctggaaaagttcttcccagatgtgattaagatccactggcaggaaaagaagtccaacaccatcctgggcagccaggaaggcaacaccatgaagaccaacgacacctacatgaagttcagctggctgaccgtgcccgagaagtccctggacaaagaacacagatgcatcgtgcggcacgaaaacaacaagaacggcgtggaccaggaaatcatcttcccacccatcaagaccgatgtgattacaatggaccccaaggacaactgctccaaggacgccaacgataccctgctgctccagctgaccaacaccagcgcctactacatgtacttgttgctgctgctgaagtccgtggtgtacttcgccatcatcacatgctgcctgctgcggagaaccgccttctgctgcaacggcgagaagtct

SEQ ID NO: 17264 - DNA, 420 bp, synthetic construct
  source 1..420: mol_type = other DNA
ctggaaaagttcttcccagatgtgattaagatccactggcaggaaaagaagtccaacaccatcctgggcagccaggaaggcaacaccatgaagaccaacgacacctacatgaagttcagctggctgaccgtgcccgagaagtccctggacaaagaacacagatgcatcgtgcggcacgaaaacaacaagaacggcgtggaccaggaaatcatcttcccacccatcaagaccgatgtgattacaatggaccccaaggacaactgctccaaggacgccaacgataccctgctgctccagctgaccaacaccagcgcctactacatgtacttgttgctgctgctgaagtccgtggtgtacttcgccatcatcacatgctgcctgctgcggagaaccgccttctgctgcaacggcgagaagtct

SEQ ID NO: 17265 - DNA, 417 bp, synthetic construct
  source 1..417: mol_type = other DNA
gaaaagttcttcccagatgtgattaagatccactggcaggaaaagaagtccaacaccatcctgggcagccaggaaggcaacaccatgaagaccaacgacacctacatgaagttcagctggctgaccgtgcccgagaagtccctggacaaagaacacagatgcatcgtgcggcacgaaaacaacaagaacggcgtggaccaggaaatcatcttcccacccatcaagaccgatgtgattacaatggaccccaaggacaactgctccaaggacgccaacgataccctgctgctccagctgaccaacaccagcgcctactacatgtacttgttgctgctgctgaagtccgtggtgtacttcgccatcatcacatgctgcctgctgcggagaaccgccttctgctgcaacggcgagaagtct

SEQ ID NO: 17266 - DNA, 414 bp, synthetic construct
  source 1..414: mol_type = other DNA
aagttcttcccagatgtgattaagatccactggcaggaaaagaagtccaacaccatcctgggcagccaggaaggcaacaccatgaagaccaacgacacctacatgaagttcagctggctgaccgtgcccgagaagtccctggacaaagaacacagatgcatcgtgcggcacgaaaacaacaagaacggcgtggaccaggaaatcatcttcccacccatcaagaccgatgtgattacaatggaccccaaggacaactgctccaaggacgccaacgataccctgctgctccagctgaccaacaccagcgcctactacatgtacttgttgctgctgctgaagtccgtggtgtacttcgccatcatcacatgctgcctgctgcggagaaccgccttctgctgcaacggcgagaagtct

SEQ ID NO: 17267 - DNA, 411 bp, synthetic construct
  source 1..411: mol_type = other DNA
ttcttcccagatgtgattaagatccactggcaggaaaagaagtccaacaccatcctgggcagccaggaaggcaacaccatgaagaccaacgacacctacatgaagttcagctggctgaccgtgcccgagaagtccctggacaaagaacacagatgcatcgtgcggcacgaaaacaacaagaacggcgtggaccaggaaatcatcttcccacccatcaagaccgatgtgattacaatggaccccaaggacaactgctccaaggacgccaacgataccctgctgctccagctgaccaacaccagcgcctactacatgtacttgttgctgctgctgaagtccgtggtgtacttcgccatcatcacatgctgcctgctgcggagaaccgccttctgctgcaacggcgagaagtct

SEQ ID NO: 17268 - DNA, 408 bp, synthetic construct
  source 1..408: mol_type = other DNA
ttcccagatgtgattaagatccactggcaggaaaagaagtccaacaccatcctgggcagccaggaaggcaacaccatgaagaccaacgacacctacatgaagttcagctggctgaccgtgcccgagaagtccctggacaaagaacacagatgcatcgtgcggcacgaaaacaacaagaacggcgtggaccaggaaatcatcttcccacccatcaagaccgatgtgattacaatggaccccaaggacaactgctccaaggacgccaacgataccctgctgctccagctgaccaacaccagcgcctactacatgtacttgttgctgctgctgaagtccgtggtgtacttcgccatcatcacatgctgcctgctgcggagaaccgccttctgctgcaacggcgagaagtct

SEQ ID NO: 17269 - DNA, 405 bp, synthetic construct
  source 1..405: mol_type = other DNA
ccagatgtgattaagatccactggcaggaaaagaagtccaacaccatcctgggcagccaggaaggcaacaccatgaagaccaacgacacctacatgaagttcagctggctgaccgtgcccgagaagtccctggacaaagaacacagatgcatcgtgcggcacgaaaacaacaagaacggcgtggaccaggaaatcatcttcccacccatcaagaccgatgtgattacaatggaccccaaggacaactgctccaaggacgccaacgataccctgctgctccagctgaccaacaccagcgcctactacatgtacttgttgctgctgctgaagtccgtggtgtacttcgccatcatcacatgctgcctgctgcggagaaccgccttctgctgcaacggcgagaagtct

SEQ ID NO: 17270 - DNA, 402 bp, synthetic construct
  source 1..402: mol_type = other DNA
gatgtgattaagatccactggcaggaaaagaagtccaacaccatcctgggcagccaggaaggcaacaccatgaagaccaacgacacctacatgaagttcagctggctgaccgtgcccgagaagtccctggacaaagaacacagatgcatcgtgcggcacgaaaacaacaagaacggcgtggaccaggaaatcatcttcccacccatcaagaccgatgtgattacaatggaccccaaggacaactgctccaaggacgccaacgataccctgctgctccagctgaccaacaccagcgcctactacatgtacttgttgctgctgctgaagtccgtggtgtacttcgccatcatcacatgctgcctgctgcggagaaccgccttctgctgcaacggcgagaagtct

SEQ ID NO: 17271 - DNA, 399 bp, synthetic construct
  source 1..399: mol_type = other DNA
gtgattaagatccactggcaggaaaagaagtccaacaccatcctgggcagccaggaaggcaacaccatgaagaccaacgacacctacatgaagttcagctggctgaccgtgcccgagaagtccctggacaaagaacacagatgcatcgtgcggcacgaaaacaacaagaacggcgtggaccaggaaatcatcttcccacccatcaagaccgatgtgattacaatggaccccaaggacaactgctccaaggacgccaacgataccctgctgctccagctgaccaacaccagcgcctactacatgtacttgttgctgctgctgaagtccgtggtgtacttcgccatcatcacatgctgcctgctgcggagaaccgccttctgctgcaacggcgagaagtct

SEQ ID NO: 17272 - DNA, 396 bp, synthetic construct
  source 1..396: mol_type = other DNA
attaagatccactggcaggaaaagaagtccaacaccatcctgggcagccaggaaggcaacaccatgaagaccaacgacacctacatgaagttcagctggctgaccgtgcccgagaagtccctggacaaagaacacagatgcatcgtgcggcacgaaaacaacaagaacggcgtggaccaggaaatcatcttcccacccatcaagaccgatgtgattacaatggaccccaaggacaactgctccaaggacgccaacgataccctgctgctccagctgaccaacaccagcgcctactacatgtacttgttgctgctgctgaagtccgtggtgtacttcgccatcatcacatgctgcctgctgcggagaaccgccttctgctgcaacggcgagaagtct

SEQ ID NO: 17273 - DNA, 393 bp, synthetic construct
  source 1..393: mol_type = other DNA
aagatccactggcaggaaaagaagtccaacaccatcctgggcagccaggaaggcaacaccatgaagaccaacgacacctacatgaagttcagctggctgaccgtgcccgagaagtccctggacaaagaacacagatgcatcgtgcggcacgaaaacaacaagaacggcgtggaccaggaaatcatcttcccacccatcaagaccgatgtgattacaatggaccccaaggacaactgctccaaggacgccaacgataccctgctgctccagctgaccaacaccagcgcctactacatgtacttgttgctgctgctgaagtccgtggtgtacttcgccatcatcacatgctgcctgctgcggagaaccgccttctgctgcaacggcgagaagtct

SEQ ID NO: 17274 - DNA, 390 bp, synthetic construct
  source 1..390: mol_type = other DNA
atccactggcaggaaaagaagtccaacaccatcctgggcagccaggaaggcaacaccatgaagaccaacgacacctacatgaagttcagctggctgaccgtgcccgagaagtccctggacaaagaacacagatgcatcgtgcggcacgaaaacaacaagaacggcgtggaccaggaaatcatcttcccacccatcaagaccgatgtgattacaatggaccccaaggacaactgctccaaggacgccaacgataccctgctgctccagctgaccaacaccagcgcctactacatgtacttgttgctgctgctgaagtccgtggtgtacttcgccatcatcacatgctgcctgctgcggagaaccgccttctgctgcaacggcgagaagtct

SEQ ID NO: 17275 - DNA, 387 bp, synthetic construct
  source 1..387: mol_type = other DNA
cactggcaggaaaagaagtccaacaccatcctgggcagccaggaaggcaacaccatgaagaccaacgacacctacatgaagttcagctggctgaccgtgcccgagaagtccctggacaaagaacacagatgcatcgtgcggcacgaaaacaacaagaacggcgtggaccaggaaatcatcttcccacccatcaagaccgatgtgattacaatggaccccaaggacaactgctccaaggacgccaacgataccctgctgctccagctgaccaacaccagcgcctactacatgtacttgttgctgctgctgaagtccgtggtgtacttcgccatcatcacatgctgcctgctgcggagaaccgccttctgctgcaacggcgagaagtct

SEQ ID NO: 17276 - DNA, 384 bp, synthetic construct
  source 1..384: mol_type = other DNA
tggcaggaaaagaagtccaacaccatcctgggcagccaggaaggcaacaccatgaagaccaacgacacctacatgaagttcagctggctgaccgtgcccgagaagtccctggacaaagaacacagatgcatcgtgcggcacgaaaacaacaagaacggcgtggaccaggaaatcatcttcccacccatcaagaccgatgtgattacaatggaccccaaggacaactgctccaaggacgccaacgataccctgctgctccagctgaccaacaccagcgcctactacatgtacttgttgctgctgctgaagtccgtggtgtacttcgccatcatcacatgctgcctgctgcggagaaccgccttctgctgcaacggcgagaagtct

SEQ ID NO: 17277 - DNA, 381 bp, synthetic construct
  source 1..381: mol_type = other DNA
caggaaaagaagtccaacaccatcctgggcagccaggaaggcaacaccatgaagaccaacgacacctacatgaagttcagctggctgaccgtgcccgagaagtccctggacaaagaacacagatgcatcgtgcggcacgaaaacaacaagaacggcgtggaccaggaaatcatcttcccacccatcaagaccgatgtgattacaatggaccccaaggacaactgctccaaggacgccaacgataccctgctgctccagctgaccaacaccagcgcctactacatgtacttgttgctgctgctgaagtccgtggtgtacttcgccatcatcacatgctgcctgctgcggagaaccgccttctgctgcaacggcgagaagtct

SEQ ID NO: 17278 - DNA, 378 bp, synthetic construct
  source 1..378: mol_type = other DNA
gaaaagaagtccaacaccatcctgggcagccaggaaggcaacaccatgaagaccaacgacacctacatgaagttcagctggctgaccgtgcccgagaagtccctggacaaagaacacagatgcatcgtgcggcacgaaaacaacaagaacggcgtggaccaggaaatcatcttcccacccatcaagaccgatgtgattacaatggaccccaaggacaactgctccaaggacgccaacgataccctgctgctccagctgaccaacaccagcgcctactacatgtacttgttgctgctgctgaagtccgtggtgtacttcgccatcatcacatgctgcctgctgcggagaaccgccttctgctgcaacggcgagaagtct

SEQ ID NO: 17279 - DNA, 375 bp, synthetic construct
  source 1..375: mol_type = other DNA
aagaagtccaacaccatcctgggcagccaggaaggcaacaccatgaagaccaacgacacctacatgaagttcagctggctgaccgtgcccgagaagtccctggacaaagaacacagatgcatcgtgcggcacgaaaacaacaagaacggcgtggaccaggaaatcatcttcccacccatcaagaccgatgtgattacaatggaccccaaggacaactgctccaaggacgccaacgataccctgctgctccagctgaccaacaccagcgcctactacatgtacttgttgctgctgctgaagtccgtggtgtacttcgccatcatcacatgctgcctgctgcggagaaccgccttctgctgcaacggcgagaagtct

SEQ ID NO: 17280 - DNA, 372 bp, synthetic construct
  source 1..372: mol_type = other DNA
aagtccaacaccatcctgggcagccaggaaggcaacaccatgaagaccaacgacacctacatgaagttcagctggctgaccgtgcccgagaagtccctggacaaagaacacagatgcatcgtgcggcacgaaaacaacaagaacggcgtggaccaggaaatcatcttcccacccatcaagaccgatgtgattacaatggaccccaaggacaactgctccaaggacgccaacgataccctgctgctccagctgaccaacaccagcgcctactacatgtacttgttgctgctgctgaagtccgtggtgtacttcgccatcatcacatgctgcctgctgcggagaaccgccttctgctgcaacggcgagaagtct

SEQ ID NO: 17281 - DNA, 369 bp, synthetic construct
  source 1..369: mol_type = other DNA
tccaacaccatcctgggcagccaggaaggcaacaccatgaagaccaacgacacctacatgaagttcagctggctgaccgtgcccgagaagtccctggacaaagaacacagatgcatcgtgcggcacgaaaacaacaagaacggcgtggaccaggaaatcatcttcccacccatcaagaccgatgtgattacaatggaccccaaggacaactgctccaaggacgccaacgataccctgctgctccagctgaccaacaccagcgcctactacatgtacttgttgctgctgctgaagtccgtggtgtacttcgccatcatcacatgctgcctgctgcggagaaccgccttctgctgcaacggcgagaagtct

SEQ ID NO: 17282 - DNA, 366 bp, synthetic construct
  source 1..366: mol_type = other DNA
aacaccatcctgggcagccaggaaggcaacaccatgaagaccaacgacacctacatgaagttcagctggctgaccgtgcccgagaagtccctggacaaagaacacagatgcatcgtgcggcacgaaaacaacaagaacggcgtggaccaggaaatcatcttcccacccatcaagaccgatgtgattacaatggaccccaaggacaactgctccaaggacgccaacgataccctgctgctccagctgaccaacaccagcgcctactacatgtacttgttgctgctgctgaagtccgtggtgtacttcgccatcatcacatgctgcctgctgcggagaaccgccttctgctgcaacggcgagaagtct

SEQ ID NO: 17283 - DNA, 363 bp, synthetic construct
  source 1..363: mol_type = other DNA
accatcctgggcagccaggaaggcaacaccatgaagaccaacgacacctacatgaagttcagctggctgaccgtgcccgagaagtccctggacaaagaacacagatgcatcgtgcggcacgaaaacaacaagaacggcgtggaccaggaaatcatcttcccacccatcaagaccgatgtgattacaatggaccccaaggacaactgctccaaggacgccaacgataccctgctgctccagctgaccaacaccagcgcctactacatgtacttgttgctgctgctgaagtccgtggtgtacttcgccatcatcacatgctgcctgctgcggagaaccgccttctgctgcaacggcgagaagtct

SEQ ID NO: 17284 - DNA, 360 bp, synthetic construct
  source 1..360: mol_type = other DNA
atcctgggcagccaggaaggcaacaccatgaagaccaacgacacctacatgaagttcagctggctgaccgtgcccgagaagtccctggacaaagaacacagatgcatcgtgcggcacgaaaacaacaagaacggcgtggaccaggaaatcatcttcccacccatcaagaccgatgtgattacaatggaccccaaggacaactgctccaaggacgccaacgataccctgctgctccagctgaccaacaccagcgcctactacatgtacttgttgctgctgctgaagtccgtggtgtacttcgccatcatcacatgctgcctgctgcggagaaccgccttctgctgcaacggcgagaagtct

SEQ ID NO: 17285 - DNA, 357 bp, synthetic construct
  source 1..357: mol_type = other DNA
ctgggcagccaggaaggcaacaccatgaagaccaacgacacctacatgaagttcagctggctgaccgtgcccgagaagtccctggacaaagaacacagatgcatcgtgcggcacgaaaacaacaagaacggcgtggaccaggaaatcatcttcccacccatcaagaccgatgtgattacaatggaccccaaggacaactgctccaaggacgccaacgataccctgctgctccagctgaccaacaccagcgcctactacatgtacttgttgctgctgctgaagtccgtggtgtacttcgccatcatcacatgctgcctgctgcggagaaccgccttctgctgcaacggcgagaagtct

SEQ ID NO: 17286 - DNA, 354 bp, synthetic construct
  source 1..354: mol_type = other DNA
ggcagccaggaaggcaacaccatgaagaccaacgacacctacatgaagttcagctggctgaccgtgcccgagaagtccctggacaaagaacacagatgcatcgtgcggcacgaaaacaacaagaacggcgtggaccaggaaatcatcttcccacccatcaagaccgatgtgattacaatggaccccaaggacaactgctccaaggacgccaacgataccctgctgctccagctgaccaacaccagcgcctactacatgtacttgttgctgctgctgaagtccgtggtgtacttcgccatcatcacatgctgcctgctgcggagaaccgccttctgctgcaacggcgagaagtct

SEQ ID NO: 17287 - DNA, 351 bp, synthetic construct
  source 1..351: mol_type = other DNA
agccaggaaggcaacaccatgaagaccaacgacacctacatgaagttcagctggctgaccgtgcccgagaagtccctggacaaagaacacagatgcatcgtgcggcacgaaaacaacaagaacggcgtggaccaggaaatcatcttcccacccatcaagaccgatgtgattacaatggaccccaaggacaactgctccaaggacgccaacgataccctgctgctccagctgaccaacaccagcgcctactacatgtacttgttgctgctgctgaagtccgtggtgtacttcgccatcatcacatgctgcctgctgcggagaaccgccttctgctgcaacggcgagaagtct

SEQ ID NO: 17288 - DNA, 348 bp, synthetic construct
  source 1..348: mol_type = other DNA
caggaaggcaacaccatgaagaccaacgacacctacatgaagttcagctggctgaccgtgcccgagaagtccctggacaaagaacacagatgcatcgtgcggcacgaaaacaacaagaacggcgtggaccaggaaatcatcttcccacccatcaagaccgatgtgattacaatggaccccaaggacaactgctccaaggacgccaacgataccctgctgctccagctgaccaacaccagcgcctactacatgtacttgttgctgctgctgaagtccgtggtgtacttcgccatcatcacatgctgcctgctgcggagaaccgccttctgctgcaacggcgagaagtct

SEQ ID NO: 17289 - DNA, 345 bp, synthetic construct
  source 1..345: mol_type = other DNA
gaaggcaacaccatgaagaccaacgacacctacatgaagttcagctggctgaccgtgcccgagaagtccctggacaaagaacacagatgcatcgtgcggcacgaaaacaacaagaacggcgtggaccaggaaatcatcttcccacccatcaagaccgatgtgattacaatggaccccaaggacaactgctccaaggacgccaacgataccctgctgctccagctgaccaacaccagcgcctactacatgtacttgttgctgctgctgaagtccgtggtgtacttcgccatcatcacatgctgcctgctgcggagaaccgccttctgctgcaacggcgagaagtct

SEQ ID NO: 17290 - DNA, 342 bp, synthetic construct
  source 1..342: mol_type = other DNA
ggcaacaccatgaagaccaacgacacctacatgaagttcagctggctgaccgtgcccgagaagtccctggacaaagaacacagatgcatcgtgcggcacgaaaacaacaagaacggcgtggaccaggaaatcatcttcccacccatcaagaccgatgtgattacaatggaccccaaggacaactgctccaaggacgccaacgataccctgctgctccagctgaccaacaccagcgcctactacatgtacttgttgctgctgctgaagtccgtggtgtacttcgccatcatcacatgctgcctgctgcggagaaccgccttctgctgcaacggcgagaagtct

SEQ ID NO: 17291 - DNA, 339 bp, synthetic construct
  source 1..339: mol_type = other DNA
aacaccatgaagaccaacgacacctacatgaagttcagctggctgaccgtgcccgagaagtccctggacaaagaacacagatgcatcgtgcggcacgaaaacaacaagaacggcgtggaccaggaaatcatcttcccacccatcaagaccgatgtgattacaatggaccccaaggacaactgctccaaggacgccaacgataccctgctgctccagctgaccaacaccagcgcctactacatgtacttgttgctgctgctgaagtccgtggtgtacttcgccatcatcacatgctgcctgctgcggagaaccgccttctgctgcaacggcgagaagtct

SEQ ID NO: 17292 - DNA, 336 bp, synthetic construct
  source 1..336: mol_type = other DNA
accatgaagaccaacgacacctacatgaagttcagctggctgaccgtgcccgagaagtccctggacaaagaacacagatgcatcgtgcggcacgaaaacaacaagaacggcgtggaccaggaaatcatcttcccacccatcaagaccgatgtgattacaatggaccccaaggacaactgctccaaggacgccaacgataccctgctgctccagctgaccaacaccagcgcctactacatgtacttgttgctgctgctgaagtccgtggtgtacttcgccatcatcacatgctgcctgctgcggagaaccgccttctgctgcaacggcgagaagtct

SEQ ID NO: 17293 - DNA, 333 bp, synthetic construct
  source 1..333: mol_type = other DNA
atgaagaccaacgacacctacatgaagttcagctggctgaccgtgcccgagaagtccctggacaaagaacacagatgcatcgtgcggcacgaaaacaacaagaacggcgtggaccaggaaatcatcttcccacccatcaagaccgatgtgattacaatggaccccaaggacaactgctccaaggacgccaacgataccctgctgctccagctgaccaacaccagcgcctactacatgtacttgttgctgctgctgaagtccgtggtgtacttcgccatcatcacatgctgcctgctgcggagaaccgccttctgctgcaacggcgagaagtct

SEQ ID NO: 17294 - DNA, 330 bp, synthetic construct
  source 1..330: mol_type = other DNA
aagaccaacgacacctacatgaagttcagctggctgaccgtgcccgagaagtccctggacaaagaacacagatgcatcgtgcggcacgaaaacaacaagaacggcgtggaccaggaaatcatcttcccacccatcaagaccgatgtgattacaatggaccccaaggacaactgctccaaggacgccaacgataccctgctgctccagctgaccaacaccagcgcctactacatgtacttgttgctgctgctgaagtccgtggtgtacttcgccatcatcacatgctgcctgctgcggagaaccgccttctgctgcaacggcgagaagtct

SEQ ID NO: 17295 - DNA, 327 bp, synthetic construct
  source 1..327: mol_type = other DNA
accaacgacacctacatgaagttcagctggctgaccgtgcccgagaagtccctggacaaagaacacagatgcatcgtgcggcacgaaaacaacaagaacggcgtggaccaggaaatcatcttcccacccatcaagaccgatgtgattacaatggaccccaaggacaactgctccaaggacgccaacgataccctgctgctccagctgaccaacaccagcgcctactacatgtacttgttgctgctgctgaagtccgtggtgtacttcgccatcatcacatgctgcctgctgcggagaaccgccttctgctgcaacggcgagaagtct

SEQ ID NO: 17296 - DNA, 324 bp, synthetic construct
  source 1..324: mol_type = other DNA
aacgacacctacatgaagttcagctggctgaccgtgcccgagaagtccctggacaaagaacacagatgcatcgtgcggcacgaaaacaacaagaacggcgtggaccaggaaatcatcttcccacccatcaagaccgatgtgattacaatggaccccaaggacaactgctccaaggacgccaacgataccctgctgctccagctgaccaacaccagcgcctactacatgtacttgttgctgctgctgaagtccgtggtgtacttcgccatcatcacatgctgcctgctgcggagaaccgccttctgctgcaacggcgagaagtct

SEQ ID NO: 17297 - DNA, 321 bp, synthetic construct
  source 1..321: mol_type = other DNA
gacacctacatgaagttcagctggctgaccgtgcccgagaagtccctggacaaagaacacagatgcatcgtgcggcacgaaaacaacaagaacggcgtggaccaggaaatcatcttcccacccatcaagaccgatgtgattacaatggaccccaaggacaactgctccaaggacgccaacgataccctgctgctccagctgaccaacaccagcgcctactacatgtacttgttgctgctgctgaagtccgtggtgtacttcgccatcatcacatgctgcctgctgcggagaaccgccttctgctgcaacggcgagaagtct

SEQ ID NO: 17298 - DNA, 318 bp, synthetic construct
  source 1..318: mol_type = other DNA
acctacatgaagttcagctggctgaccgtgcccgagaagtccctggacaaagaacacagatgcatcgtgcggcacgaaaacaacaagaacggcgtggaccaggaaatcatcttcccacccatcaagaccgatgtgattacaatggaccccaaggacaactgctccaaggacgccaacgataccctgctgctccagctgaccaacaccagcgcctactacatgtacttgttgctgctgctgaagtccgtggtgtacttcgccatcatcacatgctgcctgctgcggagaaccgccttctgctgcaacggcgagaagtct

SEQ ID NO: 17299 - DNA, 315 bp, synthetic construct
  source 1..315: mol_type = other DNA
tacatgaagttcagctggctgaccgtgcccgagaagtccctggacaaagaacacagatgcatcgtgcggcacgaaaacaacaagaacggcgtggaccaggaaatcatcttcccacccatcaagaccgatgtgattacaatggaccccaaggacaactgctccaaggacgccaacgataccctgctgctccagctgaccaacaccagcgcctactacatgtacttgttgctgctgctgaagtccgtggtgtacttcgccatcatcacatgctgcctgctgcggagaaccgccttctgctgcaacggcgagaagtct

SEQ ID NO: 17300 - DNA, 312 bp, synthetic construct
  source 1..312: mol_type = other DNA
atgaagttcagctggctgaccgtgcccgagaagtccctggacaaagaacacagatgcatcgtgcggcacgaaaacaacaagaacggcgtggaccaggaaatcatcttcccacccatcaagaccgatgtgattacaatggaccccaaggacaactgctccaaggacgccaacgataccctgctgctccagctgaccaacaccagcgcctactacatgtacttgttgctgctgctgaagtccgtggtgtacttcgccatcatcacatgctgcctgctgcggagaaccgccttctgctgcaacggcgagaagtct

SEQ ID NO: 17301 - DNA, 309 bp, synthetic construct
  source 1..309: mol_type = other DNA
aagttcagctggctgaccgtgcccgagaagtccctggacaaagaacacagatgcatcgtgcggcacgaaaacaacaagaacggcgtggaccaggaaatcatcttcccacccatcaagaccgatgtgattacaatggaccccaaggacaactgctccaaggacgccaacgataccctgctgctccagctgaccaacaccagcgcctactacatgtacttgttgctgctgctgaagtccgtggtgtacttcgccatcatcacatgctgcctgctgcggagaaccgccttctgctgcaacggcgagaagtct

SEQ ID NO: 17302 - DNA, 306 bp, synthetic construct
  source 1..306: mol_type = other DNA
ttcagctggctgaccgtgcccgagaagtccctggacaaagaacacagatgcatcgtgcggcacgaaaacaacaagaacggcgtggaccaggaaatcatcttcccacccatcaagaccgatgtgattacaatggaccccaaggacaactgctccaaggacgccaacgataccctgctgctccagctgaccaacaccagcgcctactacatgtacttgttgctgctgctgaagtccgtggtgtacttcgccatcatcacatgctgcctgctgcggagaaccgccttctgctgcaacggcgagaagtct

SEQ ID NO: 17303 - DNA, 303 bp, synthetic construct
  source 1..303: mol_type = other DNA
agctggctgaccgtgcccgagaagtccctggacaaagaacacagatgcatcgtgcggcacgaaaacaacaagaacggcgtggaccaggaaatcatcttcccacccatcaagaccgatgtgattacaatggaccccaaggacaactgctccaaggacgccaacgataccctgctgctccagctgaccaacaccagcgcctactacatgtacttgttgctgctgctgaagtccgtggtgtacttcgccatcatcacatgctgcctgctgcggagaaccgccttctgctgcaacggcgagaagtct

SEQ ID NO: 17304 - DNA, 300 bp, synthetic construct
  source 1..300: mol_type = other DNA
tggctgaccgtgcccgagaagtccctggacaaagaacacagatgcatcgtgcggcacgaaaacaacaagaacggcgtggaccaggaaatcatcttcccacccatcaagaccgatgtgattacaatggaccccaaggacaactgctccaaggacgccaacgataccctgctgctccagctgaccaacaccagcgcctactacatgtacttgttgctgctgctgaagtccgtggtgtacttcgccatcatcacatgctgcctgctgcggagaaccgccttctgctgcaacggcgagaagtct

SEQ ID NO: 17305 - DNA, 297 bp, synthetic construct
  source 1..297: mol_type = other DNA
ctgaccgtgcccgagaagtccctggacaaagaacacagatgcatcgtgcggcacgaaaacaacaagaacggcgtggaccaggaaatcatcttcccacccatcaagaccgatgtgattacaatggaccccaaggacaactgctccaaggacgccaacgataccctgctgctccagctgaccaacaccagcgcctactacatgtacttgttgctgctgctgaagtccgtggtgtacttcgccatcatcacatgctgcctgctgcggagaaccgccttctgctgcaacggcgagaagtct

SEQ ID NO: 17306 - DNA, 294 bp, synthetic construct
  source 1..294: mol_type = other DNA
accgtgcccgagaagtccctggacaaagaacacagatgcatcgtgcggcacgaaaacaacaagaacggcgtggaccaggaaatcatcttcccacccatcaagaccgatgtgattacaatggaccccaaggacaactgctccaaggacgccaacgataccctgctgctccagctgaccaacaccagcgcctactacatgtacttgttgctgctgctgaagtccgtggtgtacttcgccatcatcacatgctgcctgctgcggagaaccgccttctgctgcaacggcgagaagtct

SEQ ID NO: 17307 - DNA, 291 bp, synthetic construct
  source 1..291: mol_type = other DNA
gtgcccgagaagtccctggacaaagaacacagatgcatcgtgcggcacgaaaacaacaagaacggcgtggaccaggaaatcatcttcccacccatcaagaccgatgtgattacaatggaccccaaggacaactgctccaaggacgccaacgataccctgctgctccagctgaccaacaccagcgcctactacatgtacttgttgctgctgctgaagtccgtggtgtacttcgccatcatcacatgctgcctgctgcggagaaccgccttctgctgcaacggcgagaagtct

SEQ ID NO: 17308 - DNA, 288 bp, synthetic construct
  source 1..288: mol_type = other DNA
cccgagaagtccctggacaaagaacacagatgcatcgtgcggcacgaaaacaacaagaacggcgtggaccaggaaatcatcttcccacccatcaagaccgatgtgattacaatggaccccaaggacaactgctccaaggacgccaacgataccctgctgctccagctgaccaacaccagcgcctactacatgtacttgttgctgctgctgaagtccgtggtgtacttcgccatcatcacatgctgcctgctgcggagaaccgccttctgctgcaacggcgagaagtct

SEQ ID NO: 17309 - DNA, 285 bp, synthetic construct
  source 1..285: mol_type = other DNA
gagaagtccctggacaaagaacacagatgcatcgtgcggcacgaaaacaacaagaacggcgtggaccaggaaatcatcttcccacccatcaagaccgatgtgattacaatggaccccaaggacaactgctccaaggacgccaacgataccctgctgctccagctgaccaacaccagcgcctactacatgtacttgttgctgctgctgaagtccgtggtgtacttcgccatcatcacatgctgcctgctgcggagaaccgccttctgctgcaacggcgagaagtct

SEQ ID NO: 17310 - DNA, 282 bp, synthetic construct
  source 1..282: mol_type = other DNA
aagtccctggacaaagaacacagatgcatcgtgcggcacgaaaacaacaagaacggcgtggaccaggaaatcatcttcccacccatcaagaccgatgtgattacaatggaccccaaggacaactgctccaaggacgccaacgataccctgctgctccagctgaccaacaccagcgcctactacatgtacttgttgctgctgctgaagtccgtggtgtacttcgccatcatcacatgctgcctgctgcggagaaccgccttctgctgcaacggcgagaagtct

SEQ ID NO: 17311 - DNA, 279 bp, synthetic construct
  source 1..279: mol_type = other DNA
tccctggacaaagaacacagatgcatcgtgcggcacgaaaacaacaagaacggcgtggaccaggaaatcatcttcccacccatcaagaccgatgtgattacaatggaccccaaggacaactgctccaaggacgccaacgataccctgctgctccagctgaccaacaccagcgcctactacatgtacttgttgctgctgctgaagtccgtggtgtacttcgccatcatcacatgctgcctgctgcggagaaccgccttctgctgcaacggcgagaagtct

SEQ ID NO: 17312 - DNA, 276 bp, synthetic construct
  source 1..276: mol_type = other DNA
ctggacaaagaacacagatgcatcgtgcggcacgaaaacaacaagaacggcgtggaccaggaaatcatcttcccacccatcaagaccgatgtgattacaatggaccccaaggacaactgctccaaggacgccaacgataccctgctgctccagctgaccaacaccagcgcctactacatgtacttgttgctgctgctgaagtccgtggtgtacttcgccatcatcacatgctgcctgctgcggagaaccgccttctgctgcaacggcgagaagtct

SEQ ID NO: 17313 - DNA, 273 bp, synthetic construct
  source 1..273: mol_type = other DNA
gacaaagaacacagatgcatcgtgcggcacgaaaacaacaagaacggcgtggaccaggaaatcatcttcccacccatcaagaccgatgtgattacaatggaccccaaggacaactgctccaaggacgccaacgataccctgctgctccagctgaccaacaccagcgcctactacatgtacttgttgctgctgctgaagtccgtggtgtacttcgccatcatcacatgctgcctgctgcggagaaccgccttctgctgcaacggcgagaagtct

SEQ ID NO: 17314 - DNA, 270 bp, synthetic construct
  source 1..270: mol_type = other DNA
aaagaacacagatgcatcgtgcggcacgaaaacaacaagaacggcgtggaccaggaaatcatcttcccacccatcaagaccgatgtgattacaatggaccccaaggacaactgctccaaggacgccaacgataccctgctgctccagctgaccaacaccagcgcctactacatgtacttgttgctgctgctgaagtccgtggtgtacttcgccatcatcacatgctgcctgctgcggagaaccgccttctgctgcaacggcgagaagtct

SEQ ID NO: 17315 - DNA, 267 bp, synthetic construct
  source 1..267: mol_type = other DNA
gaacacagatgcatcgtgcggcacgaaaacaacaagaacggcgtggaccaggaaatcatcttcccacccatcaagaccgatgtgattacaatggaccccaaggacaactgctccaaggacgccaacgataccctgctgctccagctgaccaacaccagcgcctactacatgtacttgttgctgctgctgaagtccgtggtgtacttcgccatcatcacatgctgcctgctgcggagaaccgccttctgctgcaacggcgagaagtct

SEQ ID NO: 17316 - DNA, 264 bp, synthetic construct
  source 1..264: mol_type = other DNA
cacagatgcatcgtgcggcacgaaaacaacaagaacggcgtggaccaggaaatcatcttcccacccatcaagaccgatgtgattacaatggaccccaaggacaactgctccaaggacgccaacgataccctgctgctccagctgaccaacaccagcgcctactacatgtacttgttgctgctgctgaagtccgtggtgtacttcgccatcatcacatgctgcctgctgcggagaaccgccttctgctgcaacggcgagaagtct

SEQ ID NO: 17317 - DNA, 261 bp, synthetic construct
  source 1..261: mol_type = other DNA
agatgcatcgtgcggcacgaaaacaacaagaacggcgtggaccaggaaatcatcttcccacccatcaagaccgatgtgattacaatggaccccaaggacaactgctccaaggacgccaacgataccctgctgctccagctgaccaacaccagcgcctactacatgtacttgttgctgctgctgaagtccgtggtgtacttcgccatcatcacatgctgcctgctgcggagaaccgccttctgctgcaacggcgagaagtct

SEQ ID NO: 17318 - DNA, 258 bp, synthetic construct
  source 1..258: mol_type = other DNA
tgcatcgtgcggcacgaaaacaacaagaacggcgtggaccaggaaatcatcttcccacccatcaagaccgatgtgattacaatggaccccaaggacaactgctccaaggacgccaacgataccctgctgctccagctgaccaacaccagcgcctactacatgtacttgttgctgctgctgaagtccgtggtgtacttcgccatcatcacatgctgcctgctgcggagaaccgccttctgctgcaacggcgagaagtct

SEQ ID NO: 17319 - DNA, 255 bp, synthetic construct
  source 1..255: mol_type = other DNA
atcgtgcggcacgaaaacaacaagaacggcgtggaccaggaaatcatcttcccacccatcaagaccgatgtgattacaatggaccccaaggacaactgctccaaggacgccaacgataccctgctgctccagctgaccaacaccagcgcctactacatgtacttgttgctgctgctgaagtccgtggtgtacttcgccatcatcacatgctgcctgctgcggagaaccgccttctgctgcaacggcgagaagtct

SEQ ID NO: 17320 - DNA, 252 bp, synthetic construct
  source 1..252: mol_type = other DNA
gtgcggcacgaaaacaacaagaacggcgtggaccaggaaatcatcttcccacccatcaagaccgatgtgattacaatggaccccaaggacaactgctccaaggacgccaacgataccctgctgctccagctgaccaacaccagcgcctactacatgtacttgttgctgctgctgaagtccgtggtgtacttcgccatcatcacatgctgcctgctgcggagaaccgccttctgctgcaacggcgagaagtct

SEQ ID NO: 17321 - DNA, 249 bp, synthetic construct
  source 1..249: mol_type = other DNA
cggcacgaaaacaacaagaacggcgtggaccaggaaatcatcttcccacccatcaagaccgatgtgattacaatggaccccaaggacaactgctccaaggacgccaacgataccctgctgctccagctgaccaacaccagcgcctactacatgtacttgttgctgctgctgaagtccgtggtgtacttcgccatcatcacatgctgcctgctgcggagaaccgccttctgctgcaacggcgagaagtct

SEQ ID NO: 17322 - DNA, 246 bp, synthetic construct
  source 1..246: mol_type = other DNA
cacgaaaacaacaagaacggcgtggaccaggaaatcatcttcccacccatcaagaccgatgtgattacaatggaccccaaggacaactgctccaaggacgccaacgataccctgctgctccagctgaccaacaccagcgcctactacatgtacttgttgctgctgctgaagtccgtggtgtacttcgccatcatcacatgctgcctgctgcggagaaccgccttctgctgcaacggcgagaagtct

SEQ ID NO: 17323 - DNA, 243 bp, synthetic construct
  source 1..243: mol_type = other DNA
gaaaacaacaagaacggcgtggaccaggaaatcatcttcccacccatcaagaccgatgtgattacaatggaccccaaggacaactgctccaaggacgccaacgataccctgctgctccagctgaccaacaccagcgcctactacatgtacttgttgctgctgctgaagtccgtggtgtacttcgccatcatcacatgctgcctgctgcggagaaccgccttctgctgcaacggcgagaagtct

SEQ ID NO: 17324 - DNA, 240 bp, synthetic construct
  source 1..240: mol_type = other DNA
aacaacaagaacggcgtggaccaggaaatcatcttcccacccatcaagaccgatgtgattacaatggaccccaaggacaactgctccaaggacgccaacgataccctgctgctccagctgaccaacaccagcgcctactacatgtacttgttgctgctgctgaagtccgtggtgtacttcgccatcatcacatgctgcctgctgcggagaaccgccttctgctgcaacggcgagaagtct

SEQ ID NO: 17325 - DNA, 237 bp, synthetic construct
  source 1..237: mol_type = other DNA
aacaagaacggcgtggaccaggaaatcatcttcccacccatcaagaccgatgtgattacaatggaccccaaggacaactgctccaaggacgccaacgataccctgctgctccagctgaccaacaccagcgcctactacatgtacttgttgctgctgctgaagtccgtggtgtacttcgccatcatcacatgctgcctgctgcggagaaccgccttctgctgcaacggcgagaagtct

SEQ ID NO: 17326 - DNA, 234 bp, synthetic construct
  source 1..234: mol_type = other DNA
aagaacggcgtggaccaggaaatcatcttcccacccatcaagaccgatgtgattacaatggaccccaaggacaactgctccaaggacgccaacgataccctgctgctccagctgaccaacaccagcgcctactacatgtacttgttgctgctgctgaagtccgtggtgtacttcgccatcatcacatgctgcctgctgcggagaaccgccttctgctgcaacggcgagaagtct

SEQ ID NO: 17327 - DNA, 231 bp, synthetic construct
  source 1..231: mol_type = other DNA
aacggcgtggaccaggaaatcatcttcccacccatcaagaccgatgtgattacaatggaccccaaggacaactgctccaaggacgccaacgataccctgctgctccagctgaccaacaccagcgcctactacatgtacttgttgctgctgctgaagtccgtggtgtacttcgccatcatcacatgctgcctgctgcggagaaccgccttctgctgcaacggcgagaagtct

SEQ ID NO: 17328 - DNA, 228 bp, synthetic construct
  source 1..228: mol_type = other DNA
ggcgtggaccaggaaatcatcttcccacccatcaagaccgatgtgattacaatggaccccaaggacaactgctccaaggacgccaacgataccctgctgctccagctgaccaacaccagcgcctactacatgtacttgttgctgctgctgaagtccgtggtgtacttcgccatcatcacatgctgcctgctgcggagaaccgccttctgctgcaacggcgagaagtct

SEQ ID NO: 17329 - DNA, 225 bp, synthetic construct
  source 1..225: mol_type = other DNA
gtggaccaggaaatcatcttcccacccatcaagaccgatgtgattacaatggaccccaaggacaactgctccaaggacgccaacgataccctgctgctccagctgaccaacaccagcgcctactacatgtacttgttgctgctgctgaagtccgtggtgtacttcgccatcatcacatgctgcctgctgcggagaaccgccttctgctgcaacggcgagaagtct

SEQ ID NO: 17330 - DNA, 222 bp, synthetic construct
  source 1..222: mol_type = other DNA
gaccaggaaatcatcttcccacccatcaagaccgatgtgattacaatggaccccaaggacaactgctccaaggacgccaacgataccctgctgctccagctgaccaacaccagcgcctactacatgtacttgttgctgctgctgaagtccgtggtgtacttcgccatcatcacatgctgcctgctgcggagaaccgccttctgctgcaacggcgagaagtct

SEQ ID NO: 17331 - DNA, 219 bp, synthetic construct
  source 1..219: mol_type = other DNA
caggaaatcatcttcccacccatcaagaccgatgtgattacaatggaccccaaggacaactgctccaaggacgccaacgataccctgctgctccagctgaccaacaccagcgcctactacatgtacttgttgctgctgctgaagtccgtggtgtacttcgccatcatcacatgctgcctgctgcggagaaccgccttctgctgcaacggcgagaagtct

SEQ ID NO: 17332 - DNA, 459 bp, synthetic construct; identical to SEQ ID NO: 495
  source 1..459: mol_type = other DNA

SEQ ID NO: 17333 - DNA, 456 bp, synthetic construct
  source 1..456: mol_type = other DNA
cagcctcacaccaagcccagcgtgttcgtgatgaagaacggcaccaacgtggcctgcctcgtgaaagagttctaccccaaggacatcaggatcaacctggtgtccagcaagaagatcaccgagttcgaccccgccatcgtgatctcccccagcggcaagtacaacgccgtgaagctggggaagtacgaggacagcaacagcgtgacctgctccgtgcagcacgacaacaagaccgtgcacagcaccgactttgaagtgaaaaccgactccaccgaccacgtgaagcccaaagagacagagaacaccaagcagcccagcaagagctgccacaagcccaaggccatcgtgcacaccgagaaagtgaacatgatgagcctgaccgtgctgggcctgcggatgctgttcgccaaaaccgtggccgtgaacttcctgctgaccgccaagctgttcttcctc

SEQ ID NO: 17334 - DNA, 453 bp, synthetic construct
  source 1..453: mol_type = other DNA
cctcacaccaagcccagcgtgttcgtgatgaagaacggcaccaacgtggcctgcctcgtgaaagagttctaccccaaggacatcaggatcaacctggtgtccagcaagaagatcaccgagttcgaccccgccatcgtgatctcccccagcggcaagtacaacgccgtgaagctggggaagtacgaggacagcaacagcgtgacctgctccgtgcagcacgacaacaagaccgtgcacagcaccgactttgaagtgaaaaccgactccaccgaccacgtgaagcccaaagagacagagaacaccaagcagcccagcaagagctgccacaagcccaaggccatcgtgcacaccgagaaagtgaacatgatgagcctgaccgtgctgggcctgcggatgctgttcgccaaaaccgtggccgtgaacttcctgctgaccgccaagctgttcttcctc

SEQ ID NO: 17335 - DNA, 450 bp, synthetic construct
  source 1..450: mol_type = other DNA
cacaccaagcccagcgtgttcgtgatgaagaacggcaccaacgtggcctgcctcgtgaaagagttctaccccaaggacatcaggatcaacctggtgtccagcaagaagatcaccgagttcgaccccgccatcgtgatctcccccagcggcaagtacaacgccgtgaagctggggaagtacgaggacagcaacagcgtgacctgctccgtgcagcacgacaacaagaccgtgcacagcaccgactttgaagtgaaaaccgactccaccgaccacgtgaagcccaaagagacagagaacaccaagcagcccagcaagagctgccacaagcccaaggccatcgtgcacaccgagaaagtgaacatgatgagcctgaccgtgctgggcctgcggatgctgttcgccaaaaccgtggccgtgaacttcctgctgaccgccaagctgttcttcctc

SEQ ID NO: 17336 - DNA, 447 bp, synthetic construct
  source 1..447: mol_type = other DNA
accaagcccagcgtgttcgtgatgaagaacggcaccaacgtggcctgcctcgtgaaagagttctaccccaaggacatcaggatcaacctggtgtccagcaagaagatcaccgagttcgaccccgccatcgtgatctcccccagcggcaagtacaacgccgtgaagctggggaagtacgaggacagcaacagcgtgacctgctccgtgcagcacgacaacaagaccgtgcacagcaccgactttgaagtgaaaaccgactccaccgaccacgtgaagcccaaagagacagagaacaccaagcagcccagcaagagctgccacaagcccaaggccatcgtgcacaccgagaaagtgaacatgatgagcctgaccgtgctgggcctgcggatgctgttcgccaaaaccgtggccgtgaacttcctgctgaccgccaagctgttcttcctc

SEQ ID NO: 17337 - DNA, 444 bp, synthetic construct
  source 1..444: mol_type = other DNA
aagcccagcgtgttcgtgatgaagaacggcaccaacgtggcctgcctcgtgaaagagttctaccccaaggacatcaggatcaacctggtgtccagcaagaagatcaccgagttcgaccccgccatcgtgatctcccccagcggcaagtacaacgccgtgaagctggggaagtacgaggacagcaacagcgtgacctgctccgtgcagcacgacaacaagaccgtgcacagcaccgactttgaagtgaaaaccgactccaccgaccacgtgaagcccaaagagacagagaacaccaagcagcccagcaagagctgccacaagcccaaggccatcgtgcacaccgagaaagtgaacatgatgagcctgaccgtgctgggcctgcggatgctgttcgccaaaaccgtggccgtgaacttcctgctgaccgccaagctgttcttcctc

SEQ ID NO: 17338 - DNA, 438 bp, synthetic construct
  source 1..438: mol_type = other DNA
agcgtgttcgtgatgaagaacggcaccaacgtggcctgcctcgtgaaagagttctaccccaaggacatcaggatcaacctggtgtccagcaagaagatcaccgagttcgaccccgccatcgtgatctcccccagcggcaagtacaacgccgtgaagctggggaagtacgaggacagcaacagcgtgacctgctccgtgcagcacgacaacaagaccgtgcacagcaccgactttgaagtgaaaaccgactccaccgaccacgtgaagcccaaagagacagagaacaccaagcagcccagcaagagctgccacaagcccaaggccatcgtgcacaccgagaaagtgaacatgatgagcctgaccgtgctgggcctgcggatgctgttcgccaaaaccgtggccgtgaacttcctgctgaccgccaagctgttcttcctc

SEQ ID NO: 17339 - DNA, 435 bp, synthetic construct
  source 1..435: mol_type = other DNA
gtgttcgtgatgaagaacggcaccaacgtggcctgcctcgtgaaagagttctaccccaaggacatcaggatcaacctggtgtccagcaagaagatcaccgagttcgaccccgccatcgtgatctcccccagcggcaagtacaacgccgtgaagctggggaagtacgaggacagcaacagcgtgacctgctccgtgcagcacgacaacaagaccgtgcacagcaccgactttgaagtgaaaaccgactccaccgaccacgtgaagcccaaagagacagagaacaccaagcagcccagcaagagctgccacaagcccaaggccatcgtgcacaccgagaaagtgaacatgatgagcctgaccgtgctgggcctgcggatgctgttcgccaaaaccgtggccgtgaacttcctgctgaccgccaagctgttcttcctc

SEQ ID NO: 17340 - DNA, 432 bp, synthetic construct
  source 1..432: mol_type = other DNA
ttcgtgatgaagaacggcaccaacgtggcctgcctcgtgaaagagttctaccccaaggacatcaggatcaacctggtgtccagcaagaagatcaccgagttcgaccccgccatcgtgatctcccccagcggcaagtacaacgccgtgaagctggggaagtacgaggacagcaacagcgtgacctgctccgtgcagcacgacaacaagaccgtgcacagcaccgactttgaagtgaaaaccgactccaccgaccacgtgaagcccaaagagacagagaacaccaagcagcccagcaagagctgccacaagcccaaggccatcgtgcacaccgagaaagtgaacatgatgagcctgaccgtgctgggcctgcggatgctgttcgccaaaaccgtggccgtgaacttcctgctgaccgccaagctgttcttcctc

SEQ ID NO: 17341 - DNA, 429 bp, synthetic construct
  source 1..429: mol_type = other DNA
gtgatgaagaacggcaccaacgtggcctgcctcgtgaaagagttctaccccaaggacatcaggatcaacctggtgtccagcaagaagatcaccgagttcgaccccgccatcgtgatctcccccagcggcaagtacaacgccgtgaagctggggaagtacgaggacagcaacagcgtgacctgctccgtgcagcacgacaacaagaccgtgcacagcaccgactttgaagtgaaaaccgactccaccgaccacgtgaagcccaaagagacagagaacaccaagcagcccagcaagagctgccacaagcccaaggccatcgtgcacaccgagaaagtgaacatgatgagcctgaccgtgctgggcctgcggatgctgttcgccaaaaccgtggccgtgaacttcctgctgaccgccaagctgttcttcctc

SEQ ID NO: 17342 - DNA, 426 bp, synthetic construct
  source 1..426: mol_type = other DNA
atgaagaacggcaccaacgtggcctgcctcgtgaaagagttctaccccaaggacatcaggatcaacctggtgtccagcaagaagatcaccgagttcgaccccgccatcgtgatctcccccagcggcaagtacaacgccgtgaagctggggaagtacgaggacagcaacagcgtgacctgctccgtgcagcacgacaacaagaccgtgcacagcaccgactttgaagtgaaaaccgactccaccgaccacgtgaagcccaaagagacagagaacaccaagcagcccagcaagagctgccacaagcccaaggccatcgtgcacaccgagaaagtgaacatgatgagcctgaccgtgctgggcctgcggatgctgttcgccaaaaccgtggccgtgaacttcctgctgaccgccaagctgttcttcctc

SEQ ID NO: 17343 - DNA, 423 bp, synthetic construct
  source 1..423: mol_type = other DNA
aagaacggcaccaacgtggcctgcctcgtgaaagagttctaccccaaggacatcaggatcaacctggtgtccagcaagaagatcaccgagttcgaccccgccatcgtgatctcccccagcggcaagtacaacgccgtgaagctggggaagtacgaggacagcaacagcgtgacctgctccgtgcagcacgacaacaagaccgtgcacagcaccgactttgaagtgaaaaccgactccaccgaccacgtgaagcccaaagagacagagaacaccaagcagcccagcaagagctgccacaagcccaaggccatcgtgcacaccgagaaagtgaacatgatgagcctgaccgtgctgggcctgcggatgctgttcgccaaaaccgtggccgtgaacttcctgctgaccgccaagctgttcttcctc

SEQ ID NO: 17344 - DNA, 420 bp, synthetic construct
  source 1..420: mol_type = other DNA
aacggcaccaacgtggcctgcctcgtgaaagagttctaccccaaggacatcaggatcaacctggtgtccagcaagaagatcaccgagttcgaccccgccatcgtgatctcccccagcggcaagtacaacgccgtgaagctggggaagtacgaggacagcaacagcgtgacctgctccgtgcagcacgacaacaagaccgtgcacagcaccgactttgaagtgaaaaccgactccaccgaccacgtgaagcccaaagagacagagaacaccaagcagcccagcaagagctgccacaagcccaaggccatcgtgcacaccgagaaagtgaacatgatgagcctgaccgtgctgggcctgcggatgctgttcgccaaaaccgtggccgtgaacttcctgctgaccgccaagctgttcttcctc

SEQ ID NO: 17345 - DNA, 417 bp, synthetic construct
  source 1..417: mol_type = other DNA
ggcaccaacgtggcctgcctcgtgaaagagttctaccccaaggacatcaggatcaacctggtgtccagcaagaagatcaccgagttcgaccccgccatcgtgatctcccccagcggcaagtacaacgccgtgaagctggggaagtacgaggacagcaacagcgtgacctgctccgtgcagcacgacaacaagaccgtgcacagcaccgactttgaagtgaaaaccgactccaccgaccacgtgaagcccaaagagacagagaacaccaagcagcccagcaagagctgccacaagcccaaggccatcgtgcacaccgagaaagtgaacatgatgagcctgaccgtgctgggcctgcggatgctgttcgccaaaaccgtggccgtgaacttcctgctgaccgccaagctgttcttcctc

SEQ ID NO: 17346 - DNA, 414 bp, synthetic construct
  source 1..414: mol_type = other DNA
accaacgtggcctgcctcgtgaaagagttctaccccaaggacatcaggatcaacctggtgtccagcaagaagatcaccgagttcgaccccgccatcgtgatctcccccagcggcaagtacaacgccgtgaagctggggaagtacgaggacagcaacagcgtgacctgctccgtgcagcacgacaacaagaccgtgcacagcaccgactttgaagtgaaaaccgactccaccgaccacgtgaagcccaaagagacagagaacaccaagcagcccagcaagagctgccacaagcccaaggccatcgtgcacaccgagaaagtgaacatgatgagcctgaccgtgctgggcctgcggatgctgttcgccaaaaccgtggccgtgaacttcctgctgaccgccaagctgttcttcctc

SEQ ID NO: 17347 - DNA, 411 bp, synthetic construct
  source 1..411: mol_type = other DNA
aacgtggcctgcctcgtgaaagagttctaccccaaggacatcaggatcaacctggtgtccagcaagaagatcaccgagttcgaccccgccatcgtgatctcccccagcggcaagtacaacgccgtgaagctggggaagtacgaggacagcaacagcgtgacctgctccgtgcagcacgacaacaagaccgtgcacagcaccgactttgaagtgaaaaccgactccaccgaccacgtgaagcccaaagagacagagaacaccaagcagcccagcaagagctgccacaagcccaaggccatcgtgcacaccgagaaagtgaacatgatgagcctgaccgtgctgggcctgcggatgctgttcgccaaaaccgtggccgtgaacttcctgctgaccgccaagctgttcttcctc

SEQ ID NO: 17348 - DNA, 408 bp, synthetic construct
  source 1..408: mol_type = other DNA
gtggcctgcctcgtgaaagagttctaccccaaggacatcaggatcaacctggtgtccagcaagaagatcaccgagttcgaccccgccatcgtgatctcccccagcggcaagtacaacgccgtgaagctggggaagtacgaggacagcaacagcgtgacctgctccgtgcagcacgacaacaagaccgtgcacagcaccgactttgaagtgaaaaccgactccaccgaccacgtgaagcccaaagagacagagaacaccaagcagcccagcaagagctgccacaagcccaaggccatcgtgcacaccgagaaagtgaacatgatgagcctgaccgtgctgggcctgcggatgctgttcgccaaaaccgtggccgtgaacttcctgctgaccgccaagctgttcttcctc

SEQ ID NO: 17349 - DNA, 405 bp, synthetic construct
  source 1..405: mol_type = other DNA
gcctgcctcgtgaaagagttctaccccaaggacatcaggatcaacctggtgtccagcaagaagatcaccgagttcgaccccgccatcgtgatctcccccagcggcaagtacaacgccgtgaagctggggaagtacgaggacagcaacagcgtgacctgctccgtgcagcacgacaacaagaccgtgcacagcaccgactttgaagtgaaaaccgactccaccgaccacgtgaagcccaaagagacagagaacaccaagcagcccagcaagagctgccacaagcccaaggccatcgtgcacaccgagaaagtgaacatgatgagcctgaccgtgctgggcctgcggatgctgttcgccaaaaccgtggccgtgaacttcctgctgaccgccaagctgttcttcctc

SEQ ID NO: 17350 - DNA, 402 bp, synthetic construct
  source 1..402: mol_type = other DNA
tgcctcgtgaaagagttctaccccaaggacatcaggatcaacctggtgtccagcaagaagatcaccgagttcgaccccgccatcgtgatctcccccagcggcaagtacaacgccgtgaagctggggaagtacgaggacagcaacagcgtgacctgctccgtgcagcacgacaacaagaccgtgcacagcaccgactttgaagtgaaaaccgactccaccgaccacgtgaagcccaaagagacagagaacaccaagcagcccagcaagagctgccacaagcccaaggccatcgtgcacaccgagaaagtgaacatgatgagcctgaccgtgctgggcctgcggatgctgttcgccaaaaccgtggccgtgaacttcctgctgaccgccaagctgttcttcctc

SEQ ID NO: 17351 - DNA, 399 bp, synthetic construct
  source 1..399: mol_type = other DNA
ctcgtgaaagagttctaccccaaggacatcaggatcaacctggtgtccagcaagaagatcaccgagttcgaccccgccatcgtgatctcccccagcggcaagtacaacgccgtgaagctggggaagtacgaggacagcaacagcgtgacctgctccgtgcagcacgacaacaagaccgtgcacagcaccgactttgaagtgaaaaccgactccaccgaccacgtgaagcccaaagagacagagaacaccaagcagcccagcaagagctgccacaagcccaaggccatcgtgcacaccgagaaagtgaacatgatgagcctgaccgtgctgggcctgcggatgctgttcgccaaaaccgtggccgtgaacttcctgctgaccgccaagctgttcttcctc

SEQ ID NO: 17352 - DNA, 396 bp, synthetic construct
  source 1..396: mol_type = other DNA
gtgaaagagttctaccccaaggacatcaggatcaacctggtgtccagcaagaagatcaccgagttcgaccccgccatcgtgatctcccccagcggcaagtacaacgccgtgaagctggggaagtacgaggacagcaacagcgtgacctgctccgtgcagcacgacaacaagaccgtgcacagcaccgactttgaagtgaaaaccgactccaccgaccacgtgaagcccaaagagacagagaacaccaagcagcccagcaagagctgccacaagcccaaggccatcgtgcacaccgagaaagtgaacatgatgagcctgaccgtgctgggcctgcggatgctgttcgccaaaaccgtggccgtgaacttcctgctgaccgccaagctgttcttcctc

SEQ ID NO: 17353 - DNA, 393 bp, synthetic construct
  source 1..393: mol_type = other DNA
aaagagttctaccccaaggacatcaggatcaacctggtgtccagcaagaagatcaccgagttcgaccccgccatcgtgatctcccccagcggcaagtacaacgccgtgaagctggggaagtacgaggacagcaacagcgtgacctgctccgtgcagcacgacaacaagaccgtgcacagcaccgactttgaagtgaaaaccgactccaccgaccacgtgaagcccaaagagacagagaacaccaagcagcccagcaagagctgccacaagcccaaggccatcgtgcacaccgagaaagtgaacatgatgagcctgaccgtgctgggcctgcggatgctgttcgccaaaaccgtggccgtgaacttcctgctgaccgccaagctgttcttcctc

SEQ ID NO: 17354 - DNA, 390 bp, synthetic construct
  source 1..390: mol_type = other DNA
gagttctaccccaaggacatcaggatcaacctggtgtccagcaagaagatcaccgagttcgaccccgccatcgtgatctcccccagcggcaagtacaacgccgtgaagctggggaagtacgaggacagcaacagcgtgacctgctccgtgcagcacgacaacaagaccgtgcacagcaccgactttgaagtgaaaaccgactccaccgaccacgtgaagcccaaagagacagagaacaccaagcagcccagcaagagctgccacaagcccaaggccatcgtgcacaccgagaaagtgaacatgatgagcctgaccgtgctgggcctgcggatgctgttcgccaaaaccgtggccgtgaacttcctgctgaccgccaagctgttcttcctc

SEQ ID NO: 17355 - DNA, 387 bp, synthetic construct
  source 1..387: mol_type = other DNA
ttctaccccaaggacatcaggatcaacctggtgtccagcaagaagatcaccgagttcgaccccgccatcgtgatctcccccagcggcaagtacaacgccgtgaagctggggaagtacgaggacagcaacagcgtgacctgctccgtgcagcacgacaacaagaccgtgcacagcaccgactttgaagtgaaaaccgactccaccgaccacgtgaagcccaaagagacagagaacaccaagcagcccagcaagagctgccacaagcccaaggccatcgtgcacaccgagaaagtgaacatgatgagcctgaccgtgctgggcctgcggatgctgttcgccaaaaccgtggccgtgaacttcctgctgaccgccaagctgttcttcctc

SEQ ID NO: 17356 - DNA, 384 bp, synthetic construct
  source 1..384: mol_type = other DNA
taccccaaggacatcaggatcaacctggtgtccagcaagaagatcaccgagttcgaccccgccatcgtgatctcccccagcggcaagtacaacgccgtgaagctggggaagtacgaggacagcaacagcgtgacctgctccgtgcagcacgacaacaagaccgtgcacagcaccgactttgaagtgaaaaccgactccaccgaccacgtgaagcccaaagagacagagaacaccaagcagcccagcaagagctgccacaagcccaaggccatcgtgcacaccgagaaagtgaacatgatgagcctgaccgtgctgggcctgcggatgctgttcgccaaaaccgtggccgtgaacttcctgctgaccgccaagctgttcttcctc

SEQ ID NO: 17357 - DNA, 381 bp, synthetic construct
  source 1..381: mol_type = other DNA
cccaaggacatcaggatcaacctggtgtccagcaagaagatcaccgagttcgaccccgccatcgtgatctcccccagcggcaagtacaacgccgtgaagctggggaagtacgaggacagcaacagcgtgacctgctccgtgcagcacgacaacaagaccgtgcacagcaccgactttgaagtgaaaaccgactccaccgaccacgtgaagcccaaagagacagagaacaccaagcagcccagcaagagctgccacaagcccaaggccatcgtgcacaccgagaaagtgaacatgatgagcctgaccgtgctgggcctgcggatgctgttcgccaaaaccgtggccgtgaacttcctgctgaccgccaagctgttcttcctc

SEQ ID NO: 17358 - DNA, 378 bp, synthetic construct
  source 1..378: mol_type = other DNA
aaggacatcaggatcaacctggtgtccagcaagaagatcaccgagttcgaccccgccatcgtgatctcccccagcggcaagtacaacgccgtgaagctggggaagtacgaggacagcaacagcgtgacctgctccgtgcagcacgacaacaagaccgtgcacagcaccgactttgaagtgaaaaccgactccaccgaccacgtgaagcccaaagagacagagaacaccaagcagcccagcaagagctgccacaagcccaaggccatcgtgcacaccgagaaagtgaacatgatgagcctgaccgtgctgggcctgcggatgctgttcgccaaaaccgtggccgtgaacttcctgctgaccgccaagctgttcttcctc

SEQ ID NO: 17359 - DNA, 375 bp, synthetic construct
  source 1..375: mol_type = other DNA
gacatcaggatcaacctggtgtccagcaagaagatcaccgagttcgaccccgccatcgtgatctcccccagcggcaagtacaacgccgtgaagctggggaagtacgaggacagcaacagcgtgacctgctccgtgcagcacgacaacaagaccgtgcacagcaccgactttgaagtgaaaaccgactccaccgaccacgtgaagcccaaagagacagagaacaccaagcagcccagcaagagctgccacaagcccaaggccatcgtgcacaccgagaaagtgaacatgatgagcctgaccgtgctgggcctgcggatgctgttcgccaaaaccgtggccgtgaacttcctgctgaccgccaagctgttcttcctc

SEQ ID NO: 17360 - DNA, 372 bp, synthetic construct
  source 1..372: mol_type = other DNA
atcaggatcaacctggtgtccagcaagaagatcaccgagttcgaccccgccatcgtgatctcccccagcggcaagtacaacgccgtgaagctggggaagtacgaggacagcaacagcgtgacctgctccgtgcagcacgacaacaagaccgtgcacagcaccgactttgaagtgaaaaccgactccaccgaccacgtgaagcccaaagagacagagaacaccaagcagcccagcaagagctgccacaagcccaaggccatcgtgcacaccgagaaagtgaacatgatgagcctgaccgtgctgggcctgcggatgctgttcgccaaaaccgtggccgtgaacttcctgctgaccgccaagctgttcttcctc

SEQ ID NO: 17361 - DNA, 369 bp, synthetic construct
  source 1..369: mol_type = other DNA
aggatcaacctggtgtccagcaagaagatcaccgagttcgaccccgccatcgtgatctcccccagcggcaagtacaacgccgtgaagctggggaagtacgaggacagcaacagcgtgacctgctccgtgcagcacgacaacaagaccgtgcacagcaccgactttgaagtgaaaaccgactccaccgaccacgtgaagcccaaagagacagagaacaccaagcagcccagcaagagctgccacaagcccaaggccatcgtgcacaccgagaaagtgaacatgatgagcctgaccgtgctgggcctgcggatgctgttcgccaaaaccgtggccgtgaacttcctgctgaccgccaagctgttcttcctc

SEQ ID NO: 17362 - DNA, 366 bp, synthetic construct
  source 1..366: mol_type = other DNA
atcaacctggtgtccagcaagaagatcaccgagttcgaccccgccatcgtgatctcccccagcggcaagtacaacgccgtgaagctggggaagtacgaggacagcaacagcgtgacctgctccgtgcagcacgacaacaagaccgtgcacagcaccgactttgaagtgaaaaccgactccaccgaccacgtgaagcccaaagagacagagaacaccaagcagcccagcaagagctgccacaagcccaaggccatcgtgcacaccgagaaagtgaacatgatgagcctgaccgtgctgggcctgcggatgctgttcgccaaaaccgtggccgtgaacttcctgctgaccgccaagctgttcttcctc

SEQ ID NO: 17363 - DNA, 363 bp, synthetic construct
  source 1..363: mol_type = other DNA
aacctggtgtccagcaagaagatcaccgagttcgaccccgccatcgtgatctcccccagcggcaagtacaacgccgtgaagctggggaagtacgaggacagcaacagcgtgacctgctccgtgcagcacgacaacaagaccgtgcacagcaccgactttgaagtgaaaaccgactccaccgaccacgtgaagcccaaagagacagagaacaccaagcagcccagcaagagctgccacaagcccaaggccatcgtgcacaccgagaaagtgaacatgatgagcctgaccgtgctgggcctgcggatgctgttcgccaaaaccgtggccgtgaacttcctgctgaccgccaagctgttcttcctc

SEQ ID NO: 17364 - DNA, 360 bp, synthetic construct
  source 1..360: mol_type = other DNA
ctggtgtccagcaagaagatcaccgagttcgaccccgccatcgtgatctcccccagcggcaagtacaacgccgtgaagctggggaagtacgaggacagcaacagcgtgacctgctccgtgcagcacgacaacaagaccgtgcacagcaccgactttgaagtgaaaaccgactccaccgaccacgtgaagcccaaagagacagagaacaccaagcagcccagcaagagctgccacaagcccaaggccatcgtgcacaccgagaaagtgaacatgatgagcctgaccgtgctgggcctgcggatgctgttcgccaaaaccgtggccgtgaacttcctgctgaccgccaagctgttcttcctc

SEQ ID NO: 17365 - DNA, 357 bp, synthetic construct
  source 1..357: mol_type = other DNA
gtgtccagcaagaagatcaccgagttcgaccccgccatcgtgatctcccccagcggcaagtacaacgccgtgaagctggggaagtacgaggacagcaacagcgtgacctgctccgtgcagcacgacaacaagaccgtgcacagcaccgactttgaagtgaaaaccgactccaccgaccacgtgaagcccaaagagacagagaacaccaagcagcccagcaagagctgccacaagcccaaggccatcgtgcacaccgagaaagtgaacatgatgagcctgaccgtgctgggcctgcggatgctgttcgccaaaaccgtggccgtgaacttcctgctgaccgccaagctgttcttcctc

SEQ ID NO: 17366 - DNA, 354 bp, synthetic construct
  source 1..354: mol_type = other DNA
tccagcaagaagatcaccgagttcgaccccgccatcgtgatctcccccagcggcaagtacaacgccgtgaagctggggaagtacgaggacagcaacagcgtgacctgctccgtgcagcacgacaacaagaccgtgcacagcaccgactttgaagtgaaaaccgactccaccgaccacgtgaagcccaaagagacagagaacaccaagcagcccagcaagagctgccacaagcccaaggccatcgtgcacaccgagaaagtgaacatgatgagcctgaccgtgctgggcctgcggatgctgttcgccaaaaccgtggccgtgaacttcctgctgaccgccaagctgttcttcctc

SEQ ID NO: 17367 - DNA, 351 bp, synthetic construct
  source 1..351: mol_type = other DNA
agcaagaagatcaccgagttcgaccccgccatcgtgatctcccccagcggcaagtacaacgccgtgaagctggggaagtacgaggacagcaacagcgtgacctgctccgtgcagcacgacaacaagaccgtgcacagcaccgactttgaagtgaaaaccgactccaccgaccacgtgaagcccaaagagacagagaacaccaagcagcccagcaagagctgccacaagcccaaggccatcgtgcacaccgagaaagtgaacatgatgagcctgaccgtgctgggcctgcggatgctgttcgccaaaaccgtggccgtgaacttcctgctgaccgccaagctgttcttcctc

SEQ ID NO: 17368 - DNA, 348 bp, synthetic construct
  source 1..348: mol_type = other DNA
aagaagatcaccgagttcgaccccgccatcgtgatctcccccagcggcaagtacaacgccgtgaagctggggaagtacgaggacagcaacagcgtgacctgctccgtgcagcacgacaacaagaccgtgcacagcaccgactttgaagtgaaaaccgactccaccgaccacgtgaagcccaaagagacagagaacaccaagcagcccagcaagagctgccacaagcccaaggccatcgtgcacaccgagaaagtgaacatgatgagcctgaccgtgctgggcctgcggatgctgttcgccaaaaccgtggccgtgaacttcctgctgaccgccaagctgttcttcctc

SEQ ID NO: 17369 - DNA, 345 bp, synthetic construct
  source 1..345: mol_type = other DNA
aagatcaccgagttcgaccccgccatcgtgatctcccccagcggcaagtacaacgccgtgaagctggggaagtacgaggacagcaacagcgtgacctgctccgtgcagcacgacaacaagaccgtgcacagcaccgactttgaagtgaaaaccgactccaccgaccacgtgaagcccaaagagacagagaacaccaagcagcccagcaagagctgccacaagcccaaggccatcgtgcacaccgagaaagtgaacatgatgagcctgaccgtgctgggcctgcggatgctgttcgccaaaaccgtggccgtgaacttcctgctgaccgccaagctgttcttcctc

SEQ ID NO: 17370 - DNA, 342 bp, synthetic construct
  source 1..342: mol_type = other DNA
atcaccgagttcgaccccgccatcgtgatctcccccagcggcaagtacaacgccgtgaagctggggaagtacgaggacagcaacagcgtgacctgctccgtgcagcacgacaacaagaccgtgcacagcaccgactttgaagtgaaaaccgactccaccgaccacgtgaagcccaaagagacagagaacaccaagcagcccagcaagagctgccacaagcccaaggccatcgtgcacaccgagaaagtgaacatgatgagcctgaccgtgctgggcctgcggatgctgttcgccaaaaccgtggccgtgaacttcctgctgaccgccaagctgttcttcctc

SEQ ID NO: 17371 - DNA, 339 bp, synthetic construct
  source 1..339: mol_type = other DNA
accgagttcgaccccgccatcgtgatctcccccagcggcaagtacaacgccgtgaagctggggaagtacgaggacagcaacagcgtgacctgctccgtgcagcacgacaacaagaccgtgcacagcaccgactttgaagtgaaaaccgactccaccgaccacgtgaagcccaaagagacagagaacaccaagcagcccagcaagagctgccacaagcccaaggccatcgtgcacaccgagaaagtgaacatgatgagcctgaccgtgctgggcctgcggatgctgttcgccaaaaccgtggccgtgaacttcctgctgaccgccaagctgttcttcctc

SEQ ID NO: 17372 - DNA, 336 bp, synthetic construct
  source 1..336: mol_type = other DNA
gagttcgaccccgccatcgtgatctcccccagcggcaagtacaacgccgtgaagctggggaagtacgaggacagcaacagcgtgacctgctccgtgcagcacgacaacaagaccgtgcacagcaccgactttgaagtgaaaaccgactccaccgaccacgtgaagcccaaagagacagagaacaccaagcagcccagcaagagctgccacaagcccaaggccatcgtgcacaccgagaaagtgaacatgatgagcctgaccgtgctgggcctgcggatgctgttcgccaaaaccgtggccgtgaacttcctgctgaccgccaagctgttcttcctc

SEQ ID NO: 17373 - DNA, 333 bp, synthetic construct
  source 1..333: mol_type = other DNA
ttcgaccccgccatcgtgatctcccccagcggcaagtacaacgccgtgaagctggggaagtacgaggacagcaacagcgtgacctgctccgtgcagcacgacaacaagaccgtgcacagcaccgactttgaagtgaaaaccgactccaccgaccacgtgaagcccaaagagacagagaacaccaagcagcccagcaagagctgccacaagcccaaggccatcgtgcacaccgagaaagtgaacatgatgagcctgaccgtgctgggcctgcggatgctgttcgccaaaaccgtggccgtgaacttcctgctgaccgccaagctgttcttcctc

SEQ ID NO: 17374 - DNA, 330 bp, synthetic construct
  source 1..330: mol_type = other DNA
gaccccgccatcgtgatctcccccagcggcaagtacaacgccgtgaagctggggaagtacgaggacagcaacagcgtgacctgctccgtgcagcacgacaacaagaccgtgcacagcaccgactttgaagtgaaaaccgactccaccgaccacgtgaagcccaaagagacagagaacaccaagcagcccagcaagagctgccacaagcccaaggccatcgtgcacaccgagaaagtgaacatgatgagcctgaccgtgctgggcctgcggatgctgttcgccaaaaccgtggccgtgaacttcctgctgaccgccaagctgttcttcctc

SEQ ID NO: 17375 - DNA, 327 bp, synthetic construct
  source 1..327: mol_type = other DNA
cccgccatcgtgatctcccccagcggcaagtacaacgccgtgaagctggggaagtacgaggacagcaacagcgtgacctgctccgtgcagcacgacaacaagaccgtgcacagcaccgactttgaagtgaaaaccgactccaccgaccacgtgaagcccaaagagacagagaacaccaagcagcccagcaagagctgccacaagcccaaggccatcgtgcacaccgagaaagtgaacatgatgagcctgaccgtgctgggcctgcggatgctgttcgccaaaaccgtggccgtgaacttcctgctgaccgccaagctgttcttcctc

SEQ ID NO: 17376 - DNA, 324 bp, synthetic construct
  source 1..324: mol_type = other DNA
gccatcgtgatctcccccagcggcaagtacaacgccgtgaagctggggaagtacgaggacagcaacagcgtgacctgctccgtgcagcacgacaacaagaccgtgcacagcaccgactttgaagtgaaaaccgactccaccgaccacgtgaagcccaaagagacagagaacaccaagcagcccagcaagagctgccacaagcccaaggccatcgtgcacaccgagaaagtgaacatgatgagcctgaccgtgctgggcctgcggatgctgttcgccaaaaccgtggccgtgaacttcctgctgaccgccaagctgttcttcctc

SEQ ID NO: 17377 - DNA, 321 bp, synthetic construct
  source 1..321: mol_type = other DNA
atcgtgatctcccccagcggcaagtacaacgccgtgaagctggggaagtacgaggacagcaacagcgtgacctgctccgtgcagcacgacaacaagaccgtgcacagcaccgactttgaagtgaaaaccgactccaccgaccacgtgaagcccaaagagacagagaacaccaagcagcccagcaagagctgccacaagcccaaggccatcgtgcacaccgagaaagtgaacatgatgagcctgaccgtgctgggcctgcggatgctgttcgccaaaaccgtggccgtgaacttcctgctgaccgccaagctgttcttcctc

SEQ ID NO: 17378 - DNA, 318 bp, synthetic construct
  source 1..318: mol_type = other DNA
gtgatctcccccagcggcaagtacaacgccgtgaagctggggaagtacgaggacagcaacagcgtgacctgctccgtgcagcacgacaacaagaccgtgcacagcaccgactttgaagtgaaaaccgactccaccgaccacgtgaagcccaaagagacagagaacaccaagcagcccagcaagagctgccacaagcccaaggccatcgtgcacaccgagaaagtgaacatgatgagcctgaccgtgctgggcctgcggatgctgttcgccaaaaccgtggccgtgaacttcctgctgaccgccaagctgttcttcctc

SEQ ID NO: 17379 - DNA, 315 bp, synthetic construct
  source 1..315: mol_type = other DNA
atctcccccagcggcaagtacaacgccgtgaagctggggaagtacgaggacagcaacagcgtgacctgctccgtgcagcacgacaacaagaccgtgcacagcaccgactttgaagtgaaaaccgactccaccgaccacgtgaagcccaaagagacagagaacaccaagcagcccagcaagagctgccacaagcccaaggccatcgtgcacaccgagaaagtgaacatgatgagcctgaccgtgctgggcctgcggatgctgttcgccaaaaccgtggccgtgaacttcctgctgaccgccaagctgttcttcctc

SEQ ID NO: 17380 - DNA, 312 bp, synthetic construct
  source 1..312: mol_type = other DNA
tcccccagcggcaagtacaacgccgtgaagctggggaagtacgaggacagcaacagcgtgacctgctccgtgcagcacgacaacaagaccgtgcacagcaccgactttgaagtgaaaaccgactccaccgaccacgtgaagcccaaagagacagagaacaccaagcagcccagcaagagctgccacaagcccaaggccatcgtgcacaccgagaaagtgaacatgatgagcctgaccgtgctgggcctgcggatgctgttcgccaaaaccgtggccgtgaacttcctgctgaccgccaagctgttcttcctc

SEQ ID NO: 17381 - DNA, 309 bp, synthetic construct
  source 1..309: mol_type = other DNA
cccagcggcaagtacaacgccgtgaagctggggaagtacgaggacagcaacagcgtgacctgctccgtgcagcacgacaacaagaccgtgcacagcaccgactttgaagtgaaaaccgactccaccgaccacgtgaagcccaaagagacagagaacaccaagcagcccagcaagagctgccacaagcccaaggccatcgtgcacaccgagaaagtgaacatgatgagcctgaccgtgctgggcctgcggatgctgttcgccaaaaccgtggccgtgaacttcctgctgaccgccaagctgttcttcctc

SEQ ID NO: 17382 - DNA, 306 bp, synthetic construct
  source 1..306: mol_type = other DNA
agcggcaagtacaacgccgtgaagctggggaagtacgaggacagcaacagcgtgacctgctccgtgcagcacgacaacaagaccgtgcacagcaccgactttgaagtgaaaaccgactccaccgaccacgtgaagcccaaagagacagagaacaccaagcagcccagcaagagctgccacaagcccaaggccatcgtgcacaccgagaaagtgaacatgatgagcctgaccgtgctgggcctgcggatgctgttcgccaaaaccgtggccgtgaacttcctgctgaccgccaagctgttcttcctc

SEQ ID NO: 17383 - DNA, 303 bp, synthetic construct
  source 1..303: mol_type = other DNA
ggcaagtacaacgccgtgaagctggggaagtacgaggacagcaacagcgtgacctgctccgtgcagcacgacaacaagaccgtgcacagcaccgactttgaagtgaaaaccgactccaccgaccacgtgaagcccaaagagacagagaacaccaagcagcccagcaagagctgccacaagcccaaggccatcgtgcacaccgagaaagtgaacatgatgagcctgaccgtgctgggcctgcggatgctgttcgccaaaaccgtggccgtgaacttcctgctgaccgccaagctgttcttcctc

SEQ ID NO: 17384 - DNA, 300 bp, synthetic construct
  source 1..300: mol_type = other DNA
aagtacaacgccgtgaagctggggaagtacgaggacagcaacagcgtgacctgctccgtgcagcacgacaacaagaccgtgcacagcaccgactttgaagtgaaaaccgactccaccgaccacgtgaagcccaaagagacagagaacaccaagcagcccagcaagagctgccacaagcccaaggccatcgtgcacaccgagaaagtgaacatgatgagcctgaccgtgctgggcctgcggatgctgttcgccaaaaccgtggccgtgaacttcctgctgaccgccaagctgttcttcctc

SEQ ID NO: 17385 - DNA, 297 bp, synthetic construct
  source 1..297: mol_type = other DNA
tacaacgccgtgaagctggggaagtacgaggacagcaacagcgtgacctgctccgtgcagcacgacaacaagaccgtgcacagcaccgactttgaagtgaaaaccgactccaccgaccacgtgaagcccaaagagacagagaacaccaagcagcccagcaagagctgccacaagcccaaggccatcgtgcacaccgagaaagtgaacatgatgagcctgaccgtgctgggcctgcggatgctgttcgccaaaaccgtggccgtgaacttcctgctgaccgccaagctgttcttcctc

SEQ ID NO: 17386 - DNA, 294 bp, synthetic construct
  source 1..294: mol_type = other DNA
aacgccgtgaagctggggaagtacgaggacagcaacagcgtgacctgctccgtgcagcacgacaacaagaccgtgcacagcaccgactttgaagtgaaaaccgactccaccgaccacgtgaagcccaaagagacagagaacaccaagcagcccagcaagagctgccacaagcccaaggccatcgtgcacaccgagaaagtgaacatgatgagcctgaccgtgctgggcctgcggatgctgttcgccaaaaccgtggccgtgaacttcctgctgaccgccaagctgttcttcctc

SEQ ID NO: 17387 - DNA, 291 bp, synthetic construct
  source 1..291: mol_type = other DNA
gccgtgaagctggggaagtacgaggacagcaacagcgtgacctgctccgtgcagcacgacaacaagaccgtgcacagcaccgactttgaagtgaaaaccgactccaccgaccacgtgaagcccaaagagacagagaacaccaagcagcccagcaagagctgccacaagcccaaggccatcgtgcacaccgagaaagtgaacatgatgagcctgaccgtgctgggcctgcggatgctgttcgccaaaaccgtggccgtgaacttcctgctgaccgccaagctgttcttcctc

SEQ ID NO: 17388 - DNA, 288 bp, synthetic construct
  source 1..288: mol_type = other DNA
gtgaagctggggaagtacgaggacagcaacagcgtgacctgctccgtgcagcacgacaacaagaccgtgcacagcaccgactttgaagtgaaaaccgactccaccgaccacgtgaagcccaaagagacagagaacaccaagcagcccagcaagagctgccacaagcccaaggccatcgtgcacaccgagaaagtgaacatgatgagcctgaccgtgctgggcctgcggatgctgttcgccaaaaccgtggccgtgaacttcctgctgaccgccaagctgttcttcctc

SEQ ID NO: 17389 - DNA, 285 bp, synthetic construct
  source 1..285: mol_type = other DNA
aagctggggaagtacgaggacagcaacagcgtgacctgctccgtgcagcacgacaacaagaccgtgcacagcaccgactttgaagtgaaaaccgactccaccgaccacgtgaagcccaaagagacagagaacaccaagcagcccagcaagagctgccacaagcccaaggccatcgtgcacaccgagaaagtgaacatgatgagcctgaccgtgctgggcctgcggatgctgttcgccaaaaccgtggccgtgaacttcctgctgaccgccaagctgttcttcctc

SEQ ID NO: 17390 - DNA, 282 bp, synthetic construct
  source 1..282: mol_type = other DNA
ctggggaagtacgaggacagcaacagcgtgacctgctccgtgcagcacgacaacaagaccgtgcacagcaccgactttgaagtgaaaaccgactccaccgaccacgtgaagcccaaagagacagagaacaccaagcagcccagcaagagctgccacaagcccaaggccatcgtgcacaccgagaaagtgaacatgatgagcctgaccgtgctgggcctgcggatgctgttcgccaaaaccgtggccgtgaacttcctgctgaccgccaagctgttcttcctc

SEQ ID NO: 17391 - DNA, 279 bp, synthetic construct
  source 1..279: mol_type = other DNA
gggaagtacgaggacagcaacagcgtgacctgctccgtgcagcacgacaacaagaccgtgcacagcaccgactttgaagtgaaaaccgactccaccgaccacgtgaagcccaaagagacagagaacaccaagcagcccagcaagagctgccacaagcccaaggccatcgtgcacaccgagaaagtgaacatgatgagcctgaccgtgctgggcctgcggatgctgttcgccaaaaccgtggccgtgaacttcctgctgaccgccaagctgttcttcctc

SEQ ID NO: 17392 - DNA, 276 bp, synthetic construct
  source 1..276: mol_type = other DNA
aagtacgaggacagcaacagcgtgacctgctccgtgcagcacgacaacaagaccgtgcacagcaccgactttgaagtgaaaaccgactccaccgaccacgtgaagcccaaagagacagagaacaccaagcagcccagcaagagctgccacaagcccaaggccatcgtgcacaccgagaaagtgaacatgatgagcctgaccgtgctgggcctgcggatgctgttcgccaaaaccgtggccgtgaacttcctgctgaccgccaagctgttcttcctc

SEQ ID NO: 17393 - DNA, 273 bp, synthetic construct
  source 1..273: mol_type = other DNA
tacgaggacagcaacagcgtgacctgctccgtgcagcacgacaacaagaccgtgcacagcaccgactttgaagtgaaaaccgactccaccgaccacgtgaagcccaaagagacagagaacaccaagcagcccagcaagagctgccacaagcccaaggccatcgtgcacaccgagaaagtgaacatgatgagcctgaccgtgctgggcctgcggatgctgttcgccaaaaccgtggccgtgaacttcctgctgaccgccaagctgttcttcctc

SEQ ID NO: 17394 - DNA, 270 bp, synthetic construct
  source 1..270: mol_type = other DNA
gaggacagcaacagcgtgacctgctccgtgcagcacgacaacaagaccgtgcacagcaccgactttgaagtgaaaaccgactccaccgaccacgtgaagcccaaagagacagagaacaccaagcagcccagcaagagctgccacaagcccaaggccatcgtgcacaccgagaaagtgaacatgatgagcctgaccgtgctgggcctgcggatgctgttcgccaaaaccgtggccgtgaacttcctgctgaccgccaagctgttcttcctc

SEQ ID NO: 17395 - DNA, 267 bp, synthetic construct
  source 1..267: mol_type = other DNA
gacagcaacagcgtgacctgctccgtgcagcacgacaacaagaccgtgcacagcaccgactttgaagtgaaaaccgactccaccgaccacgtgaagcccaaagagacagagaacaccaagcagcccagcaagagctgccacaagcccaaggccatcgtgcacaccgagaaagtgaacatgatgagcctgaccgtgctgggcctgcggatgctgttcgccaaaaccgtggccgtgaacttcctgctgaccgccaagctgttcttcctc

SEQ ID NO: 17396 - DNA, 264 bp, synthetic construct
  source 1..264: mol_type = other DNA
agcaacagcgtgacctgctccgtgcagcacgacaacaagaccgtgcacagcaccgactttgaagtgaaaaccgactccaccgaccacgtgaagcccaaagagacagagaacaccaagcagcccagcaagagctgccacaagcccaaggccatcgtgcacaccgagaaagtgaacatgatgagcctgaccgtgctgggcctgcggatgctgttcgccaaaaccgtggccgtgaacttcctgctgaccgccaagctgttcttcctc

SEQ ID NO: 17397 - DNA, 261 bp, synthetic construct
  source 1..261: mol_type = other DNA
aacagcgtgacctgctccgtgcagcacgacaacaagaccgtgcacagcaccgactttgaagtgaaaaccgactccaccgaccacgtgaagcccaaagagacagagaacaccaagcagcccagcaagagctgccacaagcccaaggccatcgtgcacaccgagaaagtgaacatgatgagcctgaccgtgctgggcctgcggatgctgttcgccaaaaccgtggccgtgaacttcctgctgaccgccaagctgttcttcctc

SEQ ID NO: 17398 - DNA, 258 bp, synthetic construct
  source 1..258: mol_type = other DNA
agcgtgacctgctccgtgcagcacgacaacaagaccgtgcacagcaccgactttgaagtgaaaaccgactccaccgaccacgtgaagcccaaagagacagagaacaccaagcagcccagcaagagctgccacaagcccaaggccatcgtgcacaccgagaaagtgaacatgatgagcctgaccgtgctgggcctgcggatgctgttcgccaaaaccgtggccgtgaacttcctgctgaccgccaagctgttcttcctc

SEQ ID NO: 17399 - DNA, 255 bp, synthetic construct
  source 1..255: mol_type = other DNA
gtgacctgctccgtgcagcacgacaacaagaccgtgcacagcaccgactttgaagtgaaaaccgactccaccgaccacgtgaagcccaaagagacagagaacaccaagcagcccagcaagagctgccacaagcccaaggccatcgtgcacaccgagaaagtgaacatgatgagcctgaccgtgctgggcctgcggatgctgttcgccaaaaccgtggccgtgaacttcctgctgaccgccaagctgttcttcctc

SEQ ID NO: 17400 - DNA, 252 bp, synthetic construct
  source 1..252: mol_type = other DNA
acctgctccgtgcagcacgacaacaagaccgtgcacagcaccgactttgaagtgaaaaccgactccaccgaccacgtgaagcccaaagagacagagaacaccaagcagcccagcaagagctgccacaagcccaaggccatcgtgcacaccgagaaagtgaacatgatgagcctgaccgtgctgggcctgcggatgctgttcgccaaaaccgtggccgtgaacttcctgctgaccgccaagctgttcttcctc

SEQ ID NO: 17401 - DNA, 249 bp, synthetic construct
  source 1..249: mol_type = other DNA
tgctccgtgcagcacgacaacaagaccgtgcacagcaccgactttgaagtgaaaaccgactccaccgaccacgtgaagcccaaagagacagagaacaccaagcagcccagcaagagctgccacaagcccaaggccatcgtgcacaccgagaaagtgaacatgatgagcctgaccgtgctgggcctgcggatgctgttcgccaaaaccgtggccgtgaacttcctgctgaccgccaagctgttcttcctc

SEQ ID NO: 17402 - DNA, 246 bp, synthetic construct
  source 1..246: mol_type = other DNA
tccgtgcagcacgacaacaagaccgtgcacagcaccgactttgaagtgaaaaccgactccaccgaccacgtgaagcccaaagagacagagaacaccaagcagcccagcaagagctgccacaagcccaaggccatcgtgcacaccgagaaagtgaacatgatgagcctgaccgtgctgggcctgcggatgctgttcgccaaaaccgtggccgtgaacttcctgctgaccgccaagctgttcttcctc

SEQ ID NO: 17403 - DNA, 243 bp, synthetic construct
  source 1..243: mol_type = other DNA
gtgcagcacgacaacaagaccgtgcacagcaccgactttgaagtgaaaaccgactccaccgaccacgtgaagcccaaagagacagagaacaccaagcagcccagcaagagctgccacaagcccaaggccatcgtgcacaccgagaaagtgaacatgatgagcctgaccgtgctgggcctgcggatgctgttcgccaaaaccgtggccgtgaacttcctgctgaccgccaagctgttcttcctc

SEQ ID NO: 17404 - DNA, 240 bp, synthetic construct
  source 1..240: mol_type = other DNA
cagcacgacaacaagaccgtgcacagcaccgactttgaagtgaaaaccgactccaccgaccacgtgaagcccaaagagacagagaacaccaagcagcccagcaagagctgccacaagcccaaggccatcgtgcacaccgagaaagtgaacatgatgagcctgaccgtgctgggcctgcggatgctgttcgccaaaaccgtggccgtgaacttcctgctgaccgccaagctgttcttcctc

SEQ ID NO: 17405 - DNA, 237 bp, synthetic construct
  source 1..237: mol_type = other DNA
cacgacaacaagaccgtgcacagcaccgactttgaagtgaaaaccgactccaccgaccacgtgaagcccaaagagacagagaacaccaagcagcccagcaagagctgccacaagcccaaggccatcgtgcacaccgagaaagtgaacatgatgagcctgaccgtgctgggcctgcggatgctgttcgccaaaaccgtggccgtgaacttcctgctgaccgccaagctgttcttcctc

SEQ ID NO: 17406 - DNA, 234 bp, synthetic construct
  source 1..234: mol_type = other DNA
gacaacaagaccgtgcacagcaccgactttgaagtgaaaaccgactccaccgaccacgtgaagcccaaagagacagagaacaccaagcagcccagcaagagctgccacaagcccaaggccatcgtgcacaccgagaaagtgaacatgatgagcctgaccgtgctgggcctgcggatgctgttcgccaaaaccgtggccgtgaacttcctgctgaccgccaagctgttcttcctc

SEQ ID NO: 17407 - DNA, 231 bp, synthetic construct
  source 1..231: mol_type = other DNA
aacaagaccgtgcacagcaccgactttgaagtgaaaaccgactccaccgaccacgtgaagcccaaagagacagagaacaccaagcagcccagcaagagctgccacaagcccaaggccatcgtgcacaccgagaaagtgaacatgatgagcctgaccgtgctgggcctgcggatgctgttcgccaaaaccgtggccgtgaacttcctgctgaccgccaagctgttcttcctc

SEQ ID NO: 17408 - DNA, 228 bp, synthetic construct
  source 1..228: mol_type = other DNA
aagaccgtgcacagcaccgactttgaagtgaaaaccgactccaccgaccacgtgaagcccaaagagacagagaacaccaagcagcccagcaagagctgccacaagcccaaggccatcgtgcacaccgagaaagtgaacatgatgagcctgaccgtgctgggcctgcggatgctgttcgccaaaaccgtggccgtgaacttcctgctgaccgccaagctgttcttcctc

SEQ ID NO: 17409 - DNA, 225 bp, synthetic construct
  source 1..225: mol_type = other DNA
accgtgcacagcaccgactttgaagtgaaaaccgactccaccgaccacgtgaagcccaaagagacagagaacaccaagcagcccagcaagagctgccacaagcccaaggccatcgtgcacaccgagaaagtgaacatgatgagcctgaccgtgctgggcctgcggatgctgttcgccaaaaccgtggccgtgaacttcctgctgaccgccaagctgttcttcctc

SEQ ID NO: 17410 - DNA, 222 bp, synthetic construct
  source 1..222: mol_type = other DNA
gtgcacagcaccgactttgaagtgaaaaccgactccaccgaccacgtgaagcccaaagagacagagaacaccaagcagcccagcaagagctgccacaagcccaaggccatcgtgcacaccgagaaagtgaacatgatgagcctgaccgtgctgggcctgcggatgctgttcgccaaaaccgtggccgtgaacttcctgctgaccgccaagctgttcttcctc

SEQ ID NO: 17411 - DNA, 219 bp, synthetic construct
  source 1..219: mol_type = other DNA
cacagcaccgactttgaagtgaaaaccgactccaccgaccacgtgaagcccaaagagacagagaacaccaagcagcccagcaagagctgccacaagcccaaggccatcgtgcacaccgagaaagtgaacatgatgagcctgaccgtgctgggcctgcggatgctgttcgccaaaaccgtggccgtgaacttcctgctgaccgccaagctgttcttcctc

SEQ ID NO: 17412 - DNA, 216 bp, synthetic construct
  source 1..216: mol_type = other DNA
agcaccgactttgaagtgaaaaccgactccaccgaccacgtgaagcccaaagagacagagaacaccaagcagcccagcaagagctgccacaagcccaaggccatcgtgcacaccgagaaagtgaacatgatgagcctgaccgtgctgggcctgcggatgctgttcgccaaaaccgtggccgtgaacttcctgctgaccgccaagctgttcttcctc

SEQ ID NO: 17413 - DNA, 213 bp, synthetic construct
  source 1..213: mol_type = other DNA
accgactttgaagtgaaaaccgactccaccgaccacgtgaagcccaaagagacagagaacaccaagcagcccagcaagagctgccacaagcccaaggccatcgtgcacaccgagaaagtgaacatgatgagcctgaccgtgctgggcctgcggatgctgttcgccaaaaccgtggccgtgaacttcctgctgaccgccaagctgttcttcctc

SEQ ID NO: 17414 - DNA, 210 bp, synthetic construct
  source 1..210: mol_type = other DNA
gactttgaagtgaaaaccgactccaccgaccacgtgaagcccaaagagacagagaacaccaagcagcccagcaagagctgccacaagcccaaggccatcgtgcacaccgagaaagtgaacatgatgagcctgaccgtgctgggcctgcggatgctgttcgccaaaaccgtggccgtgaacttcctgctgaccgccaagctgttcttcctc

SEQ ID NO: 17415 - DNA, 207 bp, synthetic construct
  source 1..207: mol_type = other DNA
tttgaagtgaaaaccgactccaccgaccacgtgaagcccaaagagacagagaacaccaagcagcccagcaagagctgccacaagcccaaggccatcgtgcacaccgagaaagtgaacatgatgagcctgaccgtgctgggcctgcggatgctgttcgccaaaaccgtggccgtgaacttcctgctgaccgccaagctgttcttcctc

SEQ ID NO: 17416 - DNA, 204 bp, synthetic construct; identical to SEQ ID NO: 527
  source 1..204: mol_type = other DNA

SEQ ID NO: 17417 - DNA, 201 bp, synthetic construct
  source 1..201: mol_type = other DNA
gtgaaaaccgactccaccgaccacgtgaagcccaaagagacagagaacaccaagcagcccagcaagagctgccacaagcccaaggccatcgtgcacaccgagaaagtgaacatgatgagcctgaccgtgctgggcctgcggatgctgttcgccaaaaccgtggccgtgaacttcctgctgaccgccaagctgttcttcctc

SEQ ID NO: 17418 - DNA, 198 bp, synthetic construct
  source 1..198: mol_type = other DNA
aaaaccgactccaccgaccacgtgaagcccaaagagacagagaacaccaagcagcccagcaagagctgccacaagcccaaggccatcgtgcacaccgagaaagtgaacatgatgagcctgaccgtgctgggcctgcggatgctgttcgccaaaaccgtggccgtgaacttcctgctgaccgccaagctgttcttcctc

SEQ ID NO: 17419 - DNA, 195 bp, synthetic construct
  source 1..195: mol_type = other DNA
accgactccaccgaccacgtgaagcccaaagagacagagaacaccaagcagcccagcaagagctgccacaagcccaaggccatcgtgcacaccgagaaagtgaacatgatgagcctgaccgtgctgggcctgcggatgctgttcgccaaaaccgtggccgtgaacttcctgctgaccgccaagctgttcttcctc

SEQ ID NO: 17420 - DNA, 192 bp, synthetic construct
  source 1..192: mol_type = other DNA
gactccaccgaccacgtgaagcccaaagagacagagaacaccaagcagcccagcaagagctgccacaagcccaaggccatcgtgcacaccgagaaagtgaacatgatgagcctgaccgtgctgggcctgcggatgctgttcgccaaaaccgtggccgtgaacttcctgctgaccgccaagctgttcttcctc

SEQ ID NO: 17421 - DNA, 189 bp, synthetic construct
  source 1..189: mol_type = other DNA
tccaccgaccacgtgaagcccaaagagacagagaacaccaagcagcccagcaagagctgccacaagcccaaggccatcgtgcacaccgagaaagtgaacatgatgagcctgaccgtgctgggcctgcggatgctgttcgccaaaaccgtggccgtgaacttcctgctgaccgccaagctgttcttcctc

SEQ ID NO: 17422 - DNA, 186 bp, synthetic construct
  source 1..186: mol_type = other DNA
accgaccacgtgaagcccaaagagacagagaacaccaagcagcccagcaagagctgccacaagcccaaggccatcgtgcacaccgagaaagtgaacatgatgagcctgaccgtgctgggcctgcggatgctgttcgccaaaaccgtggccgtgaacttcctgctgaccgccaagctgttcttcctc

SEQ ID NO: 17423 - DNA, 183 bp, synthetic construct; identical to SEQ ID NO: 528
  source 1..183: mol_type = other DNA

SEQ ID NO: 17424 - DNA, 180 bp, synthetic construct
  source 1..180: mol_type = other DNA
cacgtgaagcccaaagagacagagaacaccaagcagcccagcaagagctgccacaagcccaaggccatcgtgcacaccgagaaagtgaacatgatgagcctgaccgtgctgggcctgcggatgctgttcgccaaaaccgtggccgtgaacttcctgctgaccgccaagctgttcttcctc

SEQ ID NO: 17425 - DNA, 177 bp, synthetic construct
  source 1..177: mol_type = other DNA
gtgaagcccaaagagacagagaacaccaagcagcccagcaagagctgccacaagcccaaggccatcgtgcacaccgagaaagtgaacatgatgagcctgaccgtgctgggcctgcggatgctgttcgccaaaaccgtggccgtgaacttcctgctgaccgccaagctgttcttcctc

SEQ ID NO: 17426 - DNA, 174 bp, synthetic construct
  source 1..174: mol_type = other DNA
aagcccaaagagacagagaacaccaagcagcccagcaagagctgccacaagcccaaggccatcgtgcacaccgagaaagtgaacatgatgagcctgaccgtgctgggcctgcggatgctgttcgccaaaaccgtggccgtgaacttcctgctgaccgccaagctgttcttcctc

SEQ ID NO: 17427 - DNA, 171 bp, synthetic construct
  source 1..171: mol_type = other DNA
cccaaagagacagagaacaccaagcagcccagcaagagctgccacaagcccaaggccatcgtgcacaccgagaaagtgaacatgatgagcctgaccgtgctgggcctgcggatgctgttcgccaaaaccgtggccgtgaacttcctgctgaccgccaagctgttcttcctc

SEQ ID NO: 17428 - DNA, 168 bp, synthetic construct
  source 1..168: mol_type = other DNA
aaagagacagagaacaccaagcagcccagcaagagctgccacaagcccaaggccatcgtgcacaccgagaaagtgaacatgatgagcctgaccgtgctgggcctgcggatgctgttcgccaaaaccgtggccgtgaacttcctgctgaccgccaagctgttcttcctc

SEQ ID NO: 17429 - DNA, 165 bp, synthetic construct
  source 1..165: mol_type = other DNA
gagacagagaacaccaagcagcccagcaagagctgccacaagcccaaggccatcgtgcacaccgagaaagtgaacatgatgagcctgaccgtgctgggcctgcggatgctgttcgccaaaaccgtggccgtgaacttcctgctgaccgccaagctgttcttcctc

SEQ ID NO: 17430 - DNA, 162 bp, synthetic construct
  source 1..162: mol_type = other DNA
acagagaacaccaagcagcccagcaagagctgccacaagcccaaggccatcgtgcacaccgagaaagtgaacatgatgagcctgaccgtgctgggcctgcggatgctgttcgccaaaaccgtggccgtgaacttcctgctgaccgccaagctgttcttcctc

SEQ ID NO: 17431 - DNA, 159 bp, synthetic construct
  source 1..159: mol_type = other DNA
gagaacaccaagcagcccagcaagagctgccacaagcccaaggccatcgtgcacaccgagaaagtgaacatgatgagcctgaccgtgctgggcctgcggatgctgttcgccaaaaccgtggccgtgaacttcctgctgaccgccaagctgttcttcctc

SEQ ID NO: 17432 - DNA, 156 bp, synthetic construct
  source 1..156: mol_type = other DNA
aacaccaagcagcccagcaagagctgccacaagcccaaggccatcgtgcacaccgagaaagtgaacatgatgagcctgaccgtgctgggcctgcggatgctgttcgccaaaaccgtggccgtgaacttcctgctgaccgccaagctgttcttcctc

SEQ ID NO: 17433 - DNA, 2610 bp, synthetic construct
  source 1..2610: mol_type = other DNA
atggccttaccagtgaccgccttgctcctgccgctggccttgctgctccacgccgccaggccgctcgaggaggacctgaagaacgtgttcccacctgaggtggccgtgttcgagcctagcaaggccgagatcgcccacacccagaaagccaccctcgtgtgcctggctaccggcttctaccccgaccatgtggaactgtcttggtgggtcaacggcaaagaggtgcacagcggcgtgtgtaccgacccccagccactgaaagaacagcccgccctgaacgacagccggtactgcctgagcagcagactgagagtgtccgccaccttctggcagaacccccggaaccacttcagatgccaggtgcagttctacggcctgagcgagaacgacgagtggacccaggacagagccaagcccgtgacccagatcgtgtctgccgaagcctggggcagagccgattgcggcatcaccagcgccagctaccaccagggcgtgctgagcgccaccatcctgtacgagatcctgctgggcaaggccaccctgtacgccgtgctggtgtctgccctggtgctgatggctatggtcaagcggaaggacagccggggaagggccaagcgatctggatctggagcaacaaacttctcactactcaaacaagcaggtgacgtggaggagaatcccgggcctactagcatggccttaccagtgaccgccttgctcctgccgctggccttgctgctccacgccgccaggccggacatccagatgacacagactacatcctccctgtctgcctctctgggagacagagtcaccatcagttgcagggcaagtcaggacattagtaaatatttaaattggtatcagcagaaaccagatggaactgttaaactcctgatctaccatacatcaagattacactcaggagtcccatcaaggttcagtggcagtgggtctggaacagattattctctcaccattagcaacctggagcaagaagatattgccacttacttttgccaacagggtaatacgcttccgtacacgttcggaggggggaccaagctggagatcacaggtggcggtggctcgggcggtggtgggtcgggtggcggcggatctgaggtgaaactgcaggagtcaggacctggcctggtggcgccctcacagagcctgtccgtcacatgcactgtctcaggggtctcattacccgactatggtgtaagctggattcgccagcctccacgaaagggtctggagtggctgggagtaatatggggtagtgaaaccacatactataattcagctctcaaatccagactgaccatcatcaaggacaactccaagagccaagttttcttaaaaatgaacagtctgcaaactgatgacacagccatttactactgtgccaaacattattactacggtggtagctatgctatggactactggggtcaaggaacctcagtcaccgtctcctcaacgcgtatccagaaccctgatcctgccgtgtaccagctgcgggatagcaagagcagcgacaagagcgtgtgtctgttcaccgacttcgacagccagaccaacgtgtcccagagcaaggactccgacgtgtacatcaccgataagtgcgtgctggacatgcggagcatggacttcaagagcaactccgccgtggcctggtccaacaagtccgatttcgcctgcgccaacgccttcaacaacagcattatccccgaggacacattcttcccaagcagcgacgtgccctgcgacgtgaagctggtggaaaagagcttcgagacagacaccaacctgaacttccagaacctgagcgtgatcggcttcagaatcctgctgctgaaagtggccggctttaacctgctgatgaccctgcggctgtggtccagccgcgccaagagaagcggatctggcgtgaagcagaccctgaatttcgacctgctgaagctggctggcgacgtggaatccaacccaggcccttctagaggccatatgaccgagtacaagcccacggtgcgcctcgccacccgcgacgacgtccccagggccgtacgcaccctcgccgccgcgttcgccgactaccccgccacgcgccacaccgtcgatccggaccgccacatcgagcgggtcaccgagctgcaagaactcttcctcacgcgcgtcgggctcgacatcggcaaggtgtgggtcgcggacgacggcgccgcggtggcggtctggaccacgccggagagcgtcgaagcgggggcggtgttcgccgagatcggcccgcgcatggccgagttgagcggttcccggctggccgcgcagcaacagatggaaggcctcctggcgccgcaccggcccaaggagcccgcgtggttcctggccaccgtcggcgtctcgcccgaccaccagggcaagggtctgggcagcgccgtcgtgctccccggagtggaggcggccgagcgcgccggggtgcccgccttcctggagacctccgcgccccgcaacctccccttctacgagcggctcggcttcaccgtcaccgccgacgtcgaggtgcccgaaggaccgcgcacctggtgcatgacccgcaagcccggtgcctga

SEQ ID NO: 17434 - DNA, 2613 bp, synthetic construct
  source 1..2613: mol_type = other DNA
atggccttaccagtgaccgccttgctcctgccgctggccttgctgctccacgccgccaggccgctcgaggaggacctgaagaacgtgttcccacctgaggtggccgtgttcgagcctagcaaggccgagatcgcccacacccagaaagccaccctcgtgtgcctggctaccggcttctaccccgaccatgtggaactgtcttggtgggtcaacggcaaagaggtgcacagcggcgtgtgtaccgacccccagccactgaaagaacagcccgccctgaacgacagccggtactgcctgagcagcagactgagagtgtccgccaccttctggcagaacccccggaaccacttcagatgccaggtgcagttctacggcctgagcgagaacgacgagtggacccaggacagagccaagcccgtgacccagatcgtgtctgccgaagcctggggcagagccgattgcggcatcaccagcgccagctaccaccagggcgtgctgagcgccaccatcctgtacgagatcctgctgggcaaggccaccctgtacgccgtgctggtgtctgccctggtgctgatggctatggtcaagcggaaggacagccggggaagggccaagcgatctggatctggagcaacaaacttctcactactcaaacaagcaggtgacgtggaggagaatcccgggcctactagcaccatggccttaccagtgaccgccttgctcctgccgctggccttgctgctccacgccgccaggccggagatcgtgatgacccagagccctgccaccctgtctctgagccctggcgaaagagccaccctgagctgtagagccagccaggacatcagcaagtacctgaactggtatcagcagaagcccggccaggcccccagactgctgatctaccacaccagcagactgcacagcggcatccccgccagattttctggctctggcagcggcaccgactacaccctgacaatcagcagcctccagcccgaggacttcgccgtgtacttctgtcagcaaggcaacaccctgccctacaccttcggccagggcaccaagctggaaatcaagggcggaggcggaagtggaggcggaggatctggcggcggaggctctcaggtgcaactccaggaatctggccctggcctcgtgaagcccagcgagacactgagcctgacctgtaccgtgtccggcgtgtccctgcctgactatggcgtgtcctggatcagacagccccctggcaagggcctggaatggatcggagtgatttggggcagcgaaaccacctactacaacagctccctgaagtccagagtgaccatctccaaggacaactccaagaaccaggtgtccctgaagctgagcagcgtgacagccgccgacaccgccgtgtattactgcgccaagcactactactacggcggcagctacgctatggactactggggccagggaaccctcgtgaccgtgtctagtacgcgtatccagaaccctgatcctgccgtgtaccagctgcgggatagcaagagcagcgacaagagcgtgtgtctgttcaccgacttcgacagccagaccaacgtgtcccagagcaaggactccgacgtgtacatcaccgataagtgcgtgctggacatgcggagcatggacttcaagagcaactccgccgtggcctggtccaacaagtccgatttcgcctgcgccaacgccttcaacaacagcattatccccgaggacacattcttcccaagcagcgacgtgccctgcgacgtgaagctggtggaaaagagcttcgagacagacaccaacctgaacttccagaacctgagcgtgatcggcttcagaatcctgctgctgaaagtggccggctttaacctgctgatgaccctgcggctgtggtccagccgcgccaagagaagcggatctggcgtgaagcagaccctgaatttcgacctgctgaagctggctggcgacgtggaatccaacccaggcccttctagaggccatatgaccgagtacaagcccacggtgcgcctcgccacccgcgacgacgtccccagggccgtacgcaccctcgccgccgcgttcgccgactaccccgccacgcgccacaccgtcgatccggaccgccacatcgagcgggtcaccgagctgcaagaactcttcctcacgcgcgtcgggctcgacatcggcaaggtgtgggtcgcggacgacggcgccgcggtggcggtctggaccacgccggagagcgtcgaagcgggggcggtgttcgccgagatcggcccgcgcatggccgagttgagcggttcccggctggccgcgcagcaacagatggaaggcctcctggcgccgcaccggcccaaggagcccgcgtggttcctggccaccgtcggcgtctcgcccgaccaccagggcaagggtctgggcagcgccgtcgtgctccccggagtggaggcggccgagcgcgccggggtgcccgccttcctggagacctccgcgccccgcaacctccccttctacgagcggctcggcttcaccgtcaccgccgacgtcgaggtgcccgaaggaccgcgcacctggtgcatgacccgcaagcccggtgcctga

SEQ ID NO: 17435 - DNA, 2616 bp, synthetic construct
  source 1..2616: mol_type = other DNA
atggccttaccagtgaccgccttgctcctgccgctggccttgctgctccacgccgccaggccgctcgaggaggacctgaagaacgtgttcccacctgaggtggccgtgttcgagcctagcaaggccgagatcgcccacacccagaaagccaccctcgtgtgcctggctaccggcttctaccccgaccatgtggaactgtcttggtgggtcaacggcaaagaggtgcacagcggcgtgtgtaccgacccccagccactgaaagaacagcccgccctgaacgacagccggtactgcctgagcagcagactgagagtgtccgccaccttctggcagaacccccggaaccacttcagatgccaggtgcagttctacggcctgagcgagaacgacgagtggacccaggacagagccaagcccgtgacccagatcgtgtctgccgaagcctggggcagagccgattgcggcatcaccagcgccagctaccaccagggcgtgctgagcgccaccatcctgtacgagatcctgctgggcaaggccaccctgtacgccgtgctggtgtctgccctggtgctgatggctatggtcaagcggaaggacagccggggaagggccaagcgatctggatctggagcaacaaacttctcactactcaaacaagcaggtgacgtggaggagaatcccgggcctactagcaccatggccttaccagtgaccgccttgctcctgccgctggccttgctgctccacgccgccaggccggacgagatcgtgctgacacagagccccgccaccctgtcactgtctccaggcgaaagagccaccctgagctgtagcgccagcagcagcgtgtcctacatgcactggtatcagcagaagcccggccaggcccccagactgctgatctacgataccagcaagctggcctccggcatccccgccagattttctggcagcggctccggcaccgacttcaccctgacaatcagcagcctggaacccgaggacgtggccgtgtactactgttttcaaggcagcgtgtaccccttcaccttcggccagggcaccaagctggaaatcaagagaggtggcggtggctcgggcggtggtgggtcgggtggcggcggatctcaggtgcagctccaggaatctggccctggcctcgtgaagcctagccagaccctgagcctgacctgtaccgtgtctggcggcagcatcagcacaagcggcatgggcgtgggctggatcagacagcaccctggcaagggcctggaatggatcggccacatttggtgggacgacgacaagcggtacaaccccgccctgaagtccagagtgaccatcagcgtggacaccagcaagaaccagttcagcctgaagctgagcagcgtgacagccgccgataccgccgtgtattattgcgcccggatggaactgtggtcctactacttcgactactggggccagggaaccctcgtgaccgtgtctagtacgcgtatccagaaccctgatcctgccgtgtaccagctgcgggatagcaagagcagcgacaagagcgtgtgtctgttcaccgacttcgacagccagaccaacgtgtcccagagcaaggactccgacgtgtacatcaccgataagtgcgtgctggacatgcggagcatggacttcaagagcaactccgccgtggcctggtccaacaagtccgatttcgcctgcgccaacgccttcaacaacagcattatccccgaggacacattcttcccaagcagcgacgtgccctgcgacgtgaagctggtggaaaagagcttcgagacagacaccaacctgaacttccagaacctgagcgtgatcggcttcagaatcctgctgctgaaagtggccggctttaacctgctgatgaccctgcggctgtggtccagccgcgccaagagaagcggatctggcgtgaagcagaccctgaatttcgacctgctgaagctggctggcgacgtggaatccaacccaggcccttctagaggccatatgaccgagtacaagcccacggtgcgcctcgccacccgcgacgacgtccccagggccgtacgcaccctcgccgccgcgttcgccgactaccccgccacgcgccacaccgtcgatccggaccgccacatcgagcgggtcaccgagctgcaagaactcttcctcacgcgcgtcgggctcgacatcggcaaggtgtgggtcgcggacgacggcgccgcggtggcggtctggaccacgccggagagcgtcgaagcgggggcggtgttcgccgagatcggcccgcgcatggccgagttgagcggttcccggctggccgcgcagcaacagatggaaggcctcctggcgccgcaccggcccaaggagcccgcgtggttcctggccaccgtcggcgtctcgcccgaccaccagggcaagggtctgggcagcgccgtcgtgctccccggagtggaggcggccgagcgcgccggggtgcccgccttcctggagacctccgcgccccgcaacctccccttctacgagcggctcggcttcaccgtcaccgccgacgtcgaggtgcccgaaggaccgcgcacctggtgcatgacccgcaagcccggtgcctga

SEQ ID NO: 17436 - DNA, 2604 bp, synthetic construct
  source 1..2604: mol_type = other DNA
atggccttaccagtgaccgccttgctcctgccgctggccttgctgctccacgccgccaggccgctcgaggaggacctgaagaacgtgttcccacctgaggtggccgtgttcgagcctagcaaggccgagatcgcccacacccagaaagccaccctcgtgtgcctggctaccggcttctaccccgaccatgtggaactgtcttggtgggtcaacggcaaagaggtgcacagcggcgtgtgtaccgacccccagccactgaaagaacagcccgccctgaacgacagccggtactgcctgagcagcagactgagagtgtccgccaccttctggcagaacccccggaaccacttcagatgccaggtgcagttctacggcctgagcgagaacgacgagtggacccaggacagagccaagcccgtgacccagatcgtgtctgccgaagcctggggcagagccgattgcggcatcaccagcgccagctaccaccagggcgtgctgagcgccaccatcctgtacgagatcctgctgggcaaggccaccctgtacgccgtgctggtgtctgccctggtgctgatggctatggtcaagcggaaggacagccggggaagggccaagcgatctggatctggagcaacaaacttctcactactcaaacaagcaggtgacgtggaggagaatcccgggcctactagcatggccttaccagtgaccgccttgctcctgccgctggccttgctgctccacgccgccaggccggacatccagatgacacagagccctagcagcctgtctgccagcgtgggagacagagtgaccatcacctgtagagccagccaggacatcagcaactacctgaactggtatcagcagaagcccggcaaggcccctaagctgctgatctactacaccagcagactgcacagcggcgtgcccagcagattttctggctctggcagcggcaccgacttcaccctgacaatatctagcctccagcctgaggacttcgccacctactattgccagcagggcaacaccctgccttacacatttggacagggcaccaaggtggaaatcaagagaggcggaggcggaagtggaggcggaggatctggcggcggaggctctgaagtgcagctggttgaatcaggtggcggcctggttcaacctggcggatctctgagactgagctgtgccgccagcggcttcaccttcagcgactactttatgagctgggtccgacaggcccctggcaaaggacttgaatgggtcgccaccatcagcaatggcggcacctacacttactaccccgacagcgtgaagggcagattcaccatctccagagacaacagcaagaacaccctgtacctccagatgaactccctgagagccgaggacaccgccgtgtactactgcgccagattcgacggctacatcttcgactattggggccagggcaccctggtcacagtctcttctacgcgtatccagaaccctgatcctgccgtgtaccagctgcgggatagcaagagcagcgacaagagcgtgtgtctgttcaccgacttcgacagccagaccaacgtgtcccagagcaaggactccgacgtgtacatcaccgataagtgcgtgctggacatgcggagcatggacttcaagagcaactccgccgtggcctggtccaacaagtccgatttcgcctgcgccaacgccttcaacaacagcattatccccgaggacacattcttcccaagcagcgacgtgccctgcgacgtgaagctggtggaaaagagcttcgagacagacaccaacctgaacttccagaacctgagcgtgatcggcttcagaatcctgctgctgaaagtggccggctttaacctgctgatgaccctgcggctgtggtccagccgcgccaagagaagcggatctggcgtgaagcagaccctgaatttcgacctgctgaagctggctggcgacgtggaatccaacccaggcccttctagaggccatatgaccgagtacaagcccacggtgcgcctcgccacccgcgacgacgtccccagggccgtacgcaccctcgccgccgcgttcgccgactaccccgccacgcgccacaccgtcgatccggaccgccacatcgagcgggtcaccgagctgcaagaactcttcctcacgcgcgtcgggctcgacatcggcaaggtgtgggtcgcggacgacggcgccgcggtggcggtctggaccacgccggagagcgtcgaagcgggggcggtgttcgccgagatcggcccgcgcatggccgagttgagcggttcccggctggccgcgcagcaacagatggaaggcctcctggcgccgcaccggcccaaggagcccgcgtggttcctggccaccgtcggcgtctcgcccgaccaccagggcaagggtctgggcagcgccgtcgtgctccccggagtggaggcggccgagcgcgccggggtgcccgccttcctggagacctccgcgccccgcaacctccccttctacgagcggctcggcttcaccgtcaccgccgacgtcgaggtgcccgaaggaccgcgcacctggtgcatgacccgcaagcccggtgcctga

SEQ ID NO: 17437 - DNA, 2616 bp, synthetic construct
  source 1..2616: mol_type = other DNA
atggccttaccagtgaccgccttgctcctgccgctggccttgctgctccacgccgccaggccgctcgaggaggacctgaagaacgtgttcccacctgaggtggccgtgttcgagcctagcaaggccgagatcgcccacacccagaaagccaccctcgtgtgcctggctaccggcttctaccccgaccatgtggaactgtcttggtgggtcaacggcaaagaggtgcacagcggcgtgtgtaccgacccccagccactgaaagaacagcccgccctgaacgacagccggtactgcctgagcagcagactgagagtgtccgccaccttctggcagaacccccggaaccacttcagatgccaggtgcagttctacggcctgagcgagaacgacgagtggacccaggacagagccaagcccgtgacccagatcgtgtctgccgaagcctggggcagagccgattgcggcatcaccagcgccagctaccaccagggcgtgctgagcgccaccatcctgtacgagatcctgctgggcaaggccaccctgtacgccgtgctggtgtctgccctggtgctgatggctatggtcaagcggaaggacagccggggaagggccaagcgatctggatctggagcaacaaacttctcactactcaaacaagcaggtgacgtggaggagaatcccgggcctactagcatggccttaccagtgaccgccttgctcctgccgctggccttgctgctccacgccgccaggccggacatccagatgacacagagccctagcagcctgtctgccagcgtgggagacagagtgaccatcacatgcaaggccagcgaccacatcaacaactggctggcctggtatcagcagaagcctggacaggcccctaagctgctgatctacggcgctaccacactggaaacaggcgtgcccagcagattttctggcagcggctctggcaccgactacaccctgacaatatccagcctccagcctgaggacttcgccacctactactgtcagcagagctggaacaccccttggacattcggccagggcaccaagctggaaatcaagagaggcggaggcggaagtggaggcggaggatctggcggcggaggctctcaagttcagcttcaacagcctggcgctgagctggtcaaacctggcgcttctgtgaagatgagctgcaaagccagcggctacgccttcagcagctactggatcaactggatgaagcagaaacccggccagggactcgaatggatcggccaaatctatcccggcgacggcgacaccaactacaacggcaagttcaagggcagagccacactgaccgccgatacctctagcagcacagcctacatgcagctgagcagcctgaccagcgaagatagcgccgtgtacttctgtgcccggtccatcacaacagtcgtgggctgcgctatggactattggggccagggaacaagcgtgaccgtgtctagtacgcgtatccagaaccctgatcctgccgtgtaccagctgcgggatagcaagagcagcgacaagagcgtgtgtctgttcaccgacttcgacagccagaccaacgtgtcccagagcaaggactccgacgtgtacatcaccgataagtgcgtgctggacatgcggagcatggacttcaagagcaactccgccgtggcctggtccaacaagtccgatttcgcctgcgccaacgccttcaacaacagcattatccccgaggacacattcttcccaagcagcgacgtgccctgcgacgtgaagctggtggaaaagagcttcgagacagacaccaacctgaacttccagaacctgagcgtgatcggcttcagaatcctgctgctgaaagtggccggctttaacctgctgatgaccctgcggctgtggtccagccgcgccaagagaagcggatctggcgtgaagcagaccctgaatttcgacctgctgaagctggctggcgacgtggaatccaacccaggcccttctagaggccatatgaccgagtacaagcccacggtgcgcctcgccacccgcgacgacgtccccagggccgtacgcaccctcgccgccgcgttcgccgactaccccgccacgcgccacaccgtcgatccggaccgccacatcgagcgggtcaccgagctgcaagaactcttcctcacgcgcgtcgggctcgacatcggcaaggtgtgggtcgcggacgacggcgccgcggtggcggtctggaccacgccggagagcgtcgaagcgggggcggtgttcgccgagatcggcccgcgcatggccgagttgagcggttcccggctggccgcgcagcaacagatggaaggcctcctggcgccgcaccggcccaaggagcccgcgtggttcctggccaccgtcggcgtctcgcccgaccaccagggcaagggtctgggcagcgccgtcgtgctccccggagtggaggcggccgagcgcgccggggtgcccgccttcctggagacctccgcgccccgcaacctccccttctacgagcggctcggcttcaccgtcaccgccgacgtcgaggtgcccgaaggaccgcgcacctggtgcatgacccgcaagcccggtgcctga

SEQ ID NO: 17438 - DNA, 2622 bp, synthetic construct
  source 1..2622: mol_type = other DNA
atggccttaccagtgaccgccttgctcctgccgctggccttgctgctccacgccgccaggccgctcgaggaggacctgaagaacgtgttcccacctgaggtggccgtgttcgagcctagcaaggccgagatcgcccacacccagaaagccaccctcgtgtgcctggctaccggcttctaccccgaccatgtggaactgtcttggtgggtcaacggcaaagaggtgcacagcggcgtgtgtaccgacccccagccactgaaagaacagcccgccctgaacgacagccggtactgcctgagcagcagactgagagtgtccgccaccttctggcagaacccccggaaccacttcagatgccaggtgcagttctacggcctgagcgagaacgacgagtggacccaggacagagccaagcccgtgacccagatcgtgtctgccgaagcctggggcagagccgattgcggcatcaccagcgccagctaccaccagggcgtgctgagcgccaccatcctgtacgagatcctgctgggcaaggccaccctgtacgccgtgctggtgtctgccctggtgctgatggctatggtcaagcggaaggacagccggggaagggccaagcgatctggatctggagcaacaaacttctcactactcaaacaagcaggtgacgtggaggagaatcccgggcctactagcatggccttaccagtgaccgccttgctcctgccgctggccttgctgctccacgccgccaggccgcagatcgtgctgtctcagtctcctgccatcctgagcgcttccccaggcgagaaagtgaccatgacctgtagagccagcagcagcgtgtcctacatgcactggtatcagcagaagcccggcagcagccctaagccttggatctacgccaccagcaatctggcctctggcgtgccagccagattttctggctctggcagcggcaccagctacagcttcacaatcagcagagtggaagccgaggacgccgccacctactattgtcagcagtggaccttcaatcctcctaccttcggcggaggcacccggctggaaatcaaaagaacagtggctgctggcggaggcggaagtggaggcggaggatctggcggcggaggctctcaggcttatctgcaacagagcggagccgaactcgtcagacctggcgcttctgtgaagatgagctgcaaggccagcggctacaccttcaccagctataatatgcactgggtcaagcagacccctcggcagggactcgaatggatcggcggaatctatcccggcaacggcgacacctcctacaaccagaagttcaagggcaaagccacactgaccgtgggcaagagcagcagcaccgcctatatgcagctcagcagcctgaccagcgaggacagcgccgtgtacttctgcgccagatacgactacaactacgctatggactactggggccagggcaccagcgtgacagttagctctgccagcacgcgtatccagaaccctgatcctgccgtgtaccagctgcgggatagcaagagcagcgacaagagcgtgtgtctgttcaccgacttcgacagccagaccaacgtgtcccagagcaaggactccgacgtgtacatcaccgataagtgcgtgctggacatgcggagcatggacttcaagagcaactccgccgtggcctggtccaacaagtccgatttcgcctgcgccaacgccttcaacaacagcattatccccgaggacacattcttcccaagcagcgacgtgccctgcgacgtgaagctggtggaaaagagcttcgagacagacaccaacctgaacttccagaacctgagcgtgatcggcttcagaatcctgctgctgaaagtggccggctttaacctgctgatgaccctgcggctgtggtccagccgcgccaagagaagcggatctggcgtgaagcagaccctgaatttcgacctgctgaagctggctggcgacgtggaatccaacccaggcccttctagaggccatatgaccgagtacaagcccacggtgcgcctcgccacccgcgacgacgtccccagggccgtacgcaccctcgccgccgcgttcgccgactaccccgccacgcgccacaccgtcgatccggaccgccacatcgagcgggtcaccgagctgcaagaactcttcctcacgcgcgtcgggctcgacatcggcaaggtgtgggtcgcggacgacggcgccgcggtggcggtctggaccacgccggagagcgtcgaagcgggggcggtgttcgccgagatcggcccgcgcatggccgagttgagcggttcccggctggccgcgcagcaacagatggaaggcctcctggcgccgcaccggcccaaggagcccgcgtggttcctggccaccgtcggcgtctcgcccgaccaccagggcaagggtctgggcagcgccgtcgtgctccccggagtggaggcggccgagcgcgccggggtgcccgccttcctggagacctccgcgccccgcaacctccccttctacgagcggctcggcttcaccgtcaccgccgacgtcgaggtgcccgaaggaccgcgcacctggtgcatgacccgcaagcccggtgcctga

SEQ ID NO: 17439 - DNA, 2616 bp, synthetic construct
  source 1..2616: mol_type = other DNA
atggccttaccagtgaccgccttgctcctgccgctggccttgctgctccacgccgccaggccgctcgaggaggacctgaagaacgtgttcccacctgaggtggccgtgttcgagcctagcaaggccgagatcgcccacacccagaaagccaccctcgtgtgcctggctaccggcttctaccccgaccatgtggaactgtcttggtgggtcaacggcaaagaggtgcacagcggcgtgtgtaccgacccccagccactgaaagaacagcccgccctgaacgacagccggtactgcctgagcagcagactgagagtgtccgccaccttctggcagaacccccggaaccacttcagatgccaggtgcagttctacggcctgagcgagaacgacgagtggacccaggacagagccaagcccgtgacccagatcgtgtctgccgaagcctggggcagagccgattgcggcatcaccagcgccagctaccaccagggcgtgctgagcgccaccatcctgtacgagatcctgctgggcaaggccaccctgtacgccgtgctggtgtctgccctggtgctgatggctatggtcaagcggaaggacagccggggaagggccaagcgatctggatctggagcaacaaacttctcactactcaaacaagcaggtgacgtggaggagaatcccgggcctactagcatggccttaccagtgaccgccttgctcctgccgctggccttgctgctccacgccgccaggccggagatcgtgctgacacagagccctgccaccctgtctctgagccctggcgaaagagccaccctgagctgtagagccagccagagcgtgtccagctacctggcctggtatcagcagaagcccggccaggctccccggctgctgatctacgatgccagcaatagagccaccggcatccccgccagattttccggctctggcagcggcaccgacttcaccctgaccatcagctccctggaacccgaggacttcgccgtgtactactgccagcagcggagcaactggcccatcacattcggccagggcacccggctggaaatcaaaggcggaggcggaagtggaggcggaggatctggcggcggaggctctgaggtgcagcttgttgagtctggcggaggactggtgcagcccgatagaagcctgagactgtcttgtgccgccagcggcttcaccttccacgattatgccatgcactgggtccgacaggcccctggcaaaggacttgaatgggtgtccaccatctcttggaacagcggcacaatcggctacgccgactctgtgaagggcagattcaccatcagccgggacaacgccaagaacagcctgtacctccagatgaactccctgagagccgaggacacagccctgtactactgcgccaaggacatccagtacggcaactactactacggcatggacgtgtggggccagggcacaacagtgacagtctcttctacgcgtatccagaaccctgatcctgccgtgtaccagctgcgggatagcaagagcagcgacaagagcgtgtgtctgttcaccgacttcgacagccagaccaacgtgtcccagagcaaggactccgacgtgtacatcaccgataagtgcgtgctggacatgcggagcatggacttcaagagcaactccgccgtggcctggtccaacaagtccgatttcgcctgcgccaacgccttcaacaacagcattatccccgaggacacattcttcccaagcagcgacgtgccctgcgacgtgaagctggtggaaaagagcttcgagacagacaccaacctgaacttccagaacctgagcgtgatcggcttcagaatcctgctgctgaaagtggccggctttaacctgctgatgaccctgcggctgtggtccagccgcgccaagagaagcggatctggcgtgaagcagaccctgaatttcgacctgctgaagctggctggcgacgtggaatccaacccaggcccttctagaggccatatgaccgagtacaagcccacggtgcgcctcgccacccgcgacgacgtccccagggccgtacgcaccctcgccgccgcgttcgccgactaccccgccacgcgccacaccgtcgatccggaccgccacatcgagcgggtcaccgagctgcaagaactcttcctcacgcgcgtcgggctcgacatcggcaaggtgtgggtcgcggacgacggcgccgcggtggcggtctggaccacgccggagagcgtcgaagcgggggcggtgttcgccgagatcggcccgcgcatggccgagttgagcggttcccggctggccgcgcagcaacagatggaaggcctcctggcgccgcaccggcccaaggagcccgcgtggttcctggccaccgtcggcgtctcgcccgaccaccagggcaagggtctgggcagcgccgtcgtgctccccggagtggaggcggccgagcgcgccggggtgcccgccttcctggagacctccgcgccccgcaacctccccttctacgagcggctcggcttcaccgtcaccgccgacgtcgaggtgcccgaaggaccgcgcacctggtgcatgacccgcaagcccggtgcctga

SEQ ID NO: 17440 - DNA, 2610 bp, synthetic construct
  source 1..2610: mol_type = other DNA
atggccttaccagtgaccgccttgctcctgccgctggccttgctgctccacgccgccaggccgctcgaggaggacctgaagaacgtgttcccacctgaggtggccgtgttcgagcctagcaaggccgagatcgcccacacccagaaagccaccctcgtgtgcctggctaccggcttctaccccgaccatgtggaactgtcttggtgggtcaacggcaaagaggtgcacagcggcgtgtgtaccgacccccagccactgaaagaacagcccgccctgaacgacagccggtactgcctgagcagcagactgagagtgtccgccaccttctggcagaacccccggaaccacttcagatgccaggtgcagttctacggcctgagcgagaacgacgagtggacccaggacagagccaagcccgtgacccagatcgtgtctgccgaagcctggggcagagccgattgcggcatcaccagcgccagctaccaccagggcgtgctgagcgccaccatcctgtacgagatcctgctgggcaaggccaccctgtacgccgtgctggtgtctgccctggtgctgatggctatggtcaagcggaaggacagccggggaagggccaagcgatctggatctggagcaacaaacttctcactactcaaacaagcaggtgacgtggaggagaatcccgggcctactagcatggccttaccagtgaccgccttgctcctgccgctggccttgctgctccacgccgccaggccggacatccagatgacccagagccccagcagcctgtctgccagcgtgggcgacagagtgaccatcacctgtagagccagccaggacgtgaacaccgccgtggcctggtatcagcagaagcctggcaaggcccccaagctgctgatctacagcgccagcttcctggaaagcggcgtgcccagcagattcagcggaagcagaagcggcaccgacttcaccctgaccatcagctccctccagcccgaggacttcgccacctactactgccagcagcactacaccacccctcccaccttcggccagaccaaggtggaaatcaagagaggcggaggcggaagtggaggcggaggatctggcggcggaggctctgaagtgcaactggtggaatctggcggcggactggtgcagcctggcggatctctgagactgagctgtgccgccagcggcttcaacatcaaggacacctacatccactgggtgcgccaggcccctggaaagggactggaatgggtggcccggatctaccccaccaacggctacaccagatacgccgacagcgtgaagggccggttcaccatcagcgccgacaccagcaagaataccgcctacctccagatgaacagcctgcgggccgaggataccgccgtgtactactgctcaagatggggaggcgacggcttctacgctatggacgtgtggggccagggcacccttgtgaccgtgtcatctacgcgtatccagaaccctgatcctgccgtgtaccagctgcgggatagcaagagcagcgacaagagcgtgtgtctgttcaccgacttcgacagccagaccaacgtgtcccagagcaaggactccgacgtgtacatcaccgataagtgcgtgctggacatgcggagcatggacttcaagagcaactccgccgtggcctggtccaacaagtccgatttcgcctgcgccaacgccttcaacaacagcattatccccgaggacacattcttcccaagcagcgacgtgccctgcgacgtgaagctggtggaaaagagcttcgagacagacaccaacctgaacttccagaacctgagcgtgatcggcttcagaatcctgctgctgaaagtggccggctttaacctgctgatgaccctgcggctgtggtccagccgcgccaagagaagcggatctggcgtgaagcagaccctgaatttcgacctgctgaagctggctggcgacgtggaatccaacccaggcccttctagaggccatatgaccgagtacaagcccacggtgcgcctcgccacccgcgacgacgtccccagggccgtacgcaccctcgccgccgcgttcgccgactaccccgccacgcgccacaccgtcgatccggaccgccacatcgagcgggtcaccgagctgcaagaactcttcctcacgcgcgtcgggctcgacatcggcaaggtgtgggtcgcggacgacggcgccgcggtggcggtctggaccacgccggagagcgtcgaagcgggggcggtgttcgccgagatcggcccgcgcatggccgagttgagcggttcccggctggccgcgcagcaacagatggaaggcctcctggcgccgcaccggcccaaggagcccgcgtggttcctggccaccgtcggcgtctcgcccgaccaccagggcaagggtctgggcagcgccgtcgtgctccccggagtggaggcggccgagcgcgccggggtgcccgccttcctggagacctccgcgccccgcaacctccccttctacgagcggctcggcttcaccgtcaccgccgacgtcgaggtgcccgaaggaccgcgcacctggtgcatgacccgcaagcccggtgcctga

SEQ ID NO: 17441 - DNA, 2247 bp, synthetic construct
  source 1..2247: mol_type = other DNA
atggccttaccagtgaccgccttgctcctgccgctggccttgctgctccacgccgccaggccgctcgaggaggacctgaagaacgtgttcccacctgaggtggccgtgttcgagcctagcaaggccgagatcgcccacacccagaaagccaccctcgtgtgcctggctaccggcttctaccccgaccatgtggaactgtcttggtgggtcaacggcaaagaggtgcacagcggcgtgtgtaccgacccccagccactgaaagaacagcccgccctgaacgacagccggtactgcctgagcagcagactgagagtgtccgccaccttctggcagaacccccggaaccacttcagatgccaggtgcagttctacggcctgagcgagaacgacgagtggacccaggacagagccaagcccgtgacccagatcgtgtctgccgaagcctggggcagagccgattgcggcatcaccagcgccagctaccaccagggcgtgctgagcgccaccatcctgtacgagatcctgctgggcaaggccaccctgtacgccgtgctggtgtctgccctggtgctgatggctatggtcaagcggaaggacagccggggaagggccaagcgatctggatctggagcaacaaacttctcactactcaaacaagcaggtgacgtggaggagaatcccgggcctactagcatggccctgcccgtgacagccctgctgctgcctctggctctgctgctgcacgccgccagacccgatgaattcgaggtgcaactggtggaaagcggcggaggcctggtgcaggctggcggatctctgagactgagctgtgccgccagcggcatcaccttcagcatcaacacaatgggctggtacagacaggcccctggcaagcagagggaactggtggccctgatctccagcatcggcgacacctactacgccgacagcgtgaagggccggttcaccatcagccgggacaacgccaagaacaccgtgtacctccagatgaacagcctgaagcccgaggacaccgccgtgtactactgcaagcggttcagaacagccgcccagggcaccgattattggggccagggaacacaagtgaccgtgtcctctacgcgtatccagaaccctgatcctgccgtgtaccagctgcgggatagcaagagcagcgacaagagcgtgtgtctgttcaccgacttcgacagccagaccaacgtgtcccagagcaaggactccgacgtgtacatcaccgataagtgcgtgctggacatgcggagcatggacttcaagagcaactccgccgtggcctggtccaacaagtccgatttcgcctgcgccaacgccttcaacaacagcattatccccgaggacacattcttcccaagcagcgacgtgccctgcgacgtgaagctggtggaaaagagcttcgagacagacaccaacctgaacttccagaacctgagcgtgatcggcttcagaatcctgctgctgaaagtggccggctttaacctgctgatgaccctgcggctgtggtccagccgcgccaagagaagcggatctggcgtgaagcagaccctgaatttcgacctgctgaagctggctggcgacgtggaatccaacccaggcccttctagaggccatatgaccgagtacaagcccacggtgcgcctcgccacccgcgacgacgtccccagggccgtacgcaccctcgccgccgcgttcgccgactaccccgccacgcgccacaccgtcgatccggaccgccacatcgagcgggtcaccgagctgcaagaactcttcctcacgcgcgtcgggctcgacatcggcaaggtgtgggtcgcggacgacggcgccgcggtggcggtctggaccacgccggagagcgtcgaagcgggggcggtgttcgccgagatcggcccgcgcatggccgagttgagcggttcccggctggccgcgcagcaacagatggaaggcctcctggcgccgcaccggcccaaggagcccgcgtggttcctggccaccgtcggcgtctcgcccgaccaccagggcaagggtctgggcagcgccgtcgtgctccccggagtggaggcggccgagcgcgccggggtgcccgccttcctggagacctccgcgccccgcaacctccccttctacgagcggctcggcttcaccgtcaccgccgacgtcgaggtgcccgaaggaccgcgcacctggtgcatgacccgcaagcccggtgcctga

SEQ ID NO: 17442 - DNA, 2247 bp, synthetic construct; identical to SEQ ID NO: 17441
  source 1..2247: mol_type = other DNA

SEQ ID NO: 17443 - DNA, 3042 bp, synthetic construct
  source 1..3042: mol_type = other DNA
atggccttaccagtgaccgccttgctcctgccgctggccttgctgctccacgccgccaggccgctcgaggaggacctgaagaacgtgttcccacctgaggtggccgtgttcgagcctagcaaggccgagatcgcccacacccagaaagccaccctcgtgtgcctggctaccggcttctaccccgaccatgtggaactgtcttggtgggtcaacggcaaagaggtgcacagcggcgtgtgtaccgacccccagccactgaaagaacagcccgccctgaacgacagccggtactgcctgagcagcagactgagagtgtccgccaccttctggcagaacccccggaaccacttcagatgccaggtgcagttctacggcctgagcgagaacgacgagtggacccaggacagagccaagcccgtgacccagatcgtgtctgccgaagcctggggcagagccgattgcggcatcaccagcgccagctaccaccagggcgtgctgagcgccaccatcctgtacgagatcctgctgggcaaggccaccctgtacgccgtgctggtgtctgccctggtgctgatggctatggtcaagcggaaggacagccggggaagggccaagcgatctggatctggagcaacaaacttctcactactcaaacaagcaggtgacgtggaggagaatcccgggcctactagcatggccttaccagtgaccgccttgctcctgccgctggccttgctgctccacgccgccaggccgcaggtccagctcgtcgagtccggcggcggcctcgtccaggccggcgactccgtcaccctctcctgcaccgcctccggccgcaccttctcctcctacgccctcgcctggttccgccagcgccccggcaaggagcgcgagttcgtcgccggcctccgctggggcggccccaccaactacgccgactccgtcaaggaccgcttcaccatctccggcgactccgccaagcacaccatgtacctccagatgaactccctcaagcccgaggacaccgccgtctactactgcggctacaaccccggcggctgggccgtcccctcccagtacgagtacgactcctggggccagggcacccaggtcaccgtctcctccggtaccggcggaggcggatctggcggcggaggtagcggtggcggaggatctgaattcgacatccagatgacacagagccctagcagcctgtctgccagcgtgggagacagagtgaccatcacatgcaaggccagcgaccacatcaacaactggctggcctggtatcagcagaagcctggacaggcccctaagctgctgatctacggcgctaccacactggaaacaggcgtgcccagcagattttctggcagcggctctggcaccgactacaccctgacaatatccagcctccagcctgaggacttcgccacctactactgtcagcagagctggaacaccccttggacattcggccagggcaccaagctggaaatcaagagaggcggaggcggaagtggaggcggaggatctggcggcggaggctctcaagttcagcttcaacagcctggcgctgagctggtcaaacctggcgcttctgtgaagatgagctgcaaagccagcggctacgccttcagcagctactggatcaactggatgaagcagaaacccggccagggactcgaatggatcggccaaatctatcccggcgacggcgacaccaactacaacggcaagttcaagggcagagccacactgaccgccgatacctctagcagcacagcctacatgcagctgagcagcctgaccagcgaagatagcgccgtgtacttctgtgcccggtccatcacaacagtcgtgggctgcgctatggactattggggccagggaacaagcgtgaccgtgtctagtacgcgtatccagaaccctgatcctgccgtgtaccagctgcgggatagcaagagcagcgacaagagcgtgtgtctgttcaccgacttcgacagccagaccaacgtgtcccagagcaaggactccgacgtgtacatcaccgataagtgcgtgctggacatgcggagcatggacttcaagagcaactccgccgtggcctggtccaacaagtccgatttcgcctgcgccaacgccttcaacaacagcattatccccgaggacacattcttcccaagcagcgacgtgccctgcgacgtgaagctggtggaaaagagcttcgagacagacaccaacctgaacttccagaacctgagcgtgatcggcttcagaatcctgctgctgaaagtggccggctttaacctgctgatgaccctgcggctgtggtccagccgcgccaagagaagcggatctggcgtgaagcagaccctgaatttcgacctgctgaagctggctggcgacgtggaatccaacccaggcccttctagaggccatatgaccgagtacaagcccacggtgcgcctcgccacccgcgacgacgtccccagggccgtacgcaccctcgccgccgcgttcgccgactaccccgccacgcgccacaccgtcgatccggaccgccacatcgagcgggtcaccgagctgcaagaactcttcctcacgcgcgtcgggctcgacatcggcaaggtgtgggtcgcggacgacggcgccgcggtggcggtctggaccacgccggagagcgtcgaagcgggggcggtgttcgccgagatcggcccgcgcatggccgagttgagcggttcccggctggccgcgcagcaacagatggaaggcctcctggcgccgcaccggcccaaggagcccgcgtggttcctggccaccgtcggcgtctcgcccgaccaccagggcaagggtctgggcagcgccgtcgtgctccccggagtggaggcggccgagcgcgccggggtgcccgccttcctggagacctccgcgccccgcaacctccccttctacgagcggctcggcttcaccgtcaccgccgacgtcgaggtgcccgaaggaccgcgcacctggtgcatgacccgcaagcccggtgcctga

SEQ ID NO: 17444 - DNA, 3429 bp, synthetic construct
  source 1..3429: mol_type = other DNA
atggccttaccagtgaccgccttgctcctgccgctggccttgctgctccacgccgccaggccgctcgaggaggacctgaagaacgtgttcccacctgaggtggccgtgttcgagcctagcaaggccgagatcgcccacacccagaaagccaccctcgtgtgcctggctaccggcttctaccccgaccatgtggaactgtcttggtgggtcaacggcaaagaggtgcacagcggcgtgtgtaccgacccccagccactgaaagaacagcccgccctgaacgacagccggtactgcctgagcagcagactgagagtgtccgccaccttctggcagaacccccggaaccacttcagatgccaggtgcagttctacggcctgagcgagaacgacgagtggacccaggacagagccaagcccgtgacccagatcgtgtctgccgaagcctggggcagagccgattgcggcatcaccagcgccagctaccaccagggcgtgctgagcgccaccatcctgtacgagatcctgctgggcaaggccaccctgtacgccgtgctggtgtctgccctggtgctgatggctatggtcaagcggaaggacagccggggaagggccaagcgatctggatctggagcaacaaacttctcactactcaaacaagcaggtgacgtggaggagaatcccgggcctactagcatggccttaccagtgaccgccttgctcctgccgctggccttgctgctccacgccgccaggccggaggttcagctgcttgagtctggcggaggactggttcaacctggcggaagcctgagactgtcttgtgccgccagcggcttcacctttagcagctacgccatgagctgggtccgacaggctcctggcaaaggactggaatgggtgtccagcatcagcggcagcggcgactacatctactacgccgatagcgtgaagggcagattcaccatcagccgggacatcagcaagaacaccctgtacctccagatgaacagcctgagagccgaggacaccgccgtgtactactgtgccaaagaaggcaccggcgctaacagcagcctggccgattatagaggccagggcacactggtcaccgtgtctagtggcggaggaagcggcggaggatctcaggtccagctcgtcgagtccggcggcggcctcgtccaggccggcgactccgtcaccctctcctgcaccgcctccggccgcaccttctcctcctacgccctcgcctggttccgccagcgccccggcaaggagcgcgagttcgtcgccggcctccgctggggcggccccaccaactacgccgactccgtcaaggaccgcttcaccatctccggcgactccgccaagcacaccatgtacctccagatgaactccctcaagcccgaggacaccgccgtctactactgcggctacaaccccggcggctgggccgtcccctcccagtacgagtacgactcctggggccagggcacccaggtcaccgtctcctccggtaccggcggaggcggatctggcggcggaggtagcggtggcggaggatctgaattcgacatccagatgacacagagccctagcagcctgtctgccagcgtgggagacagagtgaccatcacatgcaaggccagcgaccacatcaacaactggctggcctggtatcagcagaagcctggacaggcccctaagctgctgatctacggcgctaccacactggaaacaggcgtgcccagcagattttctggcagcggctctggcaccgactacaccctgacaatatccagcctccagcctgaggacttcgccacctactactgtcagcagagctggaacaccccttggacattcggccagggcaccaagctggaaatcaagagaggcggaggcggaagtggaggcggaggatctggcggcggaggctctcaagttcagcttcaacagcctggcgctgagctggtcaaacctggcgcttctgtgaagatgagctgcaaagccagcggctacgccttcagcagctactggatcaactggatgaagcagaaacccggccagggactcgaatggatcggccaaatctatcccggcgacggcgacaccaactacaacggcaagttcaagggcagagccacactgaccgccgatacctctagcagcacagcctacatgcagctgagcagcctgaccagcgaagatagcgccgtgtacttctgtgcccggtccatcacaacagtcgtgggctgcgctatggactattggggccagggaacaagcgtgaccgtgtctagtacgcgtatccagaaccctgatcctgccgtgtaccagctgcgggatagcaagagcagcgacaagagcgtgtgtctgttcaccgacttcgacagccagaccaacgtgtcccagagcaaggactccgacgtgtacatcaccgataagtgcgtgctggacatgcggagcatggacttcaagagcaactccgccgtggcctggtccaacaagtccgatttcgcctgcgccaacgccttcaacaacagcattatccccgaggacacattcttcccaagcagcgacgtgccctgcgacgtgaagctggtggaaaagagcttcgagacagacaccaacctgaacttccagaacctgagcgtgatcggcttcagaatcctgctgctgaaagtggccggctttaacctgctgatgaccctgcggctgtggtccagccgcgccaagagaagcggatctggcgtgaagcagaccctgaatttcgacctgctgaagctggctggcgacgtggaatccaacccaggcccttctagaggccatatgaccgagtacaagcccacggtgcgcctcgccacccgcgacgacgtccccagggccgtacgcaccctcgccgccgcgttcgccgactaccccgccacgcgccacaccgtcgatccggaccgccacatcgagcgggtcaccgagctgcaagaactcttcctcacgcgcgtcgggctcgacatcggcaaggtgtgggtcgcggacgacggcgccgcggtggcggtctggaccacgccggagagcgtcgaagcgggggcggtgttcgccgagatcggcccgcgcatggccgagttgagcggttcccggctggccgcgcagcaacagatggaaggcctcctggcgccgcaccggcccaaggagcccgcgtggttcctggccaccgtcggcgtctcgcccgaccaccagggcaagggtctgggcagcgccgtcgtgctccccggagtggaggcggccgagcgcgccggggtgcccgccttcctggagacctccgcgccccgcaacctccccttctacgagcggctcggcttcaccgtcaccgccgacgtcgaggtgcccgaaggaccgcgcacctggtgcatgacccgcaagcccggtgcctga

SEQ ID NO: 17445 - DNA, 3423 bp, synthetic construct
  source 1..3423: mol_type = other DNA
atggccttaccagtgaccgccttgctcctgccgctggccttgctgctccacgccgccaggccgctcgaggaggacctgaagaacgtgttcccacctgaggtggccgtgttcgagcctagcaaggccgagatcgcccacacccagaaagccaccctcgtgtgcctggctaccggcttctaccccgaccatgtggaactgtcttggtgggtcaacggcaaagaggtgcacagcggcgtgtgtaccgacccccagccactgaaagaacagcccgccctgaacgacagccggtactgcctgagcagcagactgagagtgtccgccaccttctggcagaacccccggaaccacttcagatgccaggtgcagttctacggcctgagcgagaacgacgagtggacccaggacagagccaagcccgtgacccagatcgtgtctgccgaagcctggggcagagccgattgcggcatcaccagcgccagctaccaccagggcgtgctgagcgccaccatcctgtacgagatcctgctgggcaaggccaccctgtacgccgtgctggtgtctgccctggtgctgatggctatggtcaagcggaaggacagccggggaagggccaagcgatctggatctggagcaacaaacttctcactactcaaacaagcaggtgacgtggaggagaatcccgggcctactagcatggccttaccagtgaccgccttgctcctgccgctggccttgctgctccacgccgccaggccgggcgtgacacagagccccacacacctgattaagaccagaggccagcaggccacactgagatgcagccctatcagcggccacaccagcgtgtactggtatcagcaggctctcggactgggcctccagttcctgctttggtacgacgagggcgaagagagaaaccggggcaacttccctcctcggttttccggcagacagttccccaactacagcagcgagctgaacgtgaacgccctggaactggaagatagcgccctgtacctgtgtgcctcttctcttggtggacctcgcggactggctggactgagaggggatgagcagtttttcggccctggcaccagactgaccgtgctggaaggcggaggaagcggcggaggatctcaggtccagctcgtcgagtccggcggcggcctcgtccaggccggcgactccgtcaccctctcctgcaccgcctccggccgcaccttctcctcctacgccctcgcctggttccgccagcgccccggcaaggagcgcgagttcgtcgccggcctccgctggggcggccccaccaactacgccgactccgtcaaggaccgcttcaccatctccggcgactccgccaagcacaccatgtacctccagatgaactccctcaagcccgaggacaccgccgtctactactgcggctacaaccccggcggctgggccgtcccctcccagtacgagtacgactcctggggccagggcacccaggtcaccgtctcctccggtaccggcggaggcggatctggcggcggaggtagcggtggcggaggatctgaattcgacatccagatgacacagagccctagcagcctgtctgccagcgtgggagacagagtgaccatcacatgcaaggccagcgaccacatcaacaactggctggcctggtatcagcagaagcctggacaggcccctaagctgctgatctacggcgctaccacactggaaacaggcgtgcccagcagattttctggcagcggctctggcaccgactacaccctgacaatatccagcctccagcctgaggacttcgccacctactactgtcagcagagctggaacaccccttggacattcggccagggcaccaagctggaaatcaagagaggcggaggcggaagtggaggcggaggatctggcggcggaggctctcaagttcagcttcaacagcctggcgctgagctggtcaaacctggcgcttctgtgaagatgagctgcaaagccagcggctacgccttcagcagctactggatcaactggatgaagcagaaacccggccagggactcgaatggatcggccaaatctatcccggcgacggcgacaccaactacaacggcaagttcaagggcagagccacactgaccgccgatacctctagcagcacagcctacatgcagctgagcagcctgaccagcgaagatagcgccgtgtacttctgtgcccggtccatcacaacagtcgtgggctgcgctatggactattggggccagggaacaagcgtgaccgtgtctagtacgcgtatccagaaccctgatcctgccgtgtaccagctgcgggatagcaagagcagcgacaagagcgtgtgtctgttcaccgacttcgacagccagaccaacgtgtcccagagcaaggactccgacgtgtacatcaccgataagtgcgtgctggacatgcggagcatggacttcaagagcaactccgccgtggcctggtccaacaagtccgatttcgcctgcgccaacgccttcaacaacagcattatccccgaggacacattcttcccaagcagcgacgtgccctgcgacgtgaagctggtggaaaagagcttcgagacagacaccaacctgaacttccagaacctgagcgtgatcggcttcagaatcctgctgctgaaagtggccggctttaacctgctgatgaccctgcggctgtggtccagccgcgccaagagaagcggatctggcgtgaagcagaccctgaatttcgacctgctgaagctggctggcgacgtggaatccaacccaggcccttctagaggccatatgaccgagtacaagcccacggtgcgcctcgccacccgcgacgacgtccccagggccgtacgcaccctcgccgccgcgttcgccgactaccccgccacgcgccacaccgtcgatccggaccgccacatcgagcgggtcaccgagctgcaagaactcttcctcacgcgcgtcgggctcgacatcggcaaggtgtgggtcgcggacgacggcgccgcggtggcggtctggaccacgccggagagcgtcgaagcgggggcggtgttcgccgagatcggcccgcgcatggccgagttgagcggttcccggctggccgcgcagcaacagatggaaggcctcctggcgccgcaccggcccaaggagcccgcgtggttcctggccaccgtcggcgtctcgcccgaccaccagggcaagggtctgggcagcgccgtcgtgctccccggagtggaggcggccgagcgcgccggggtgcccgccttcctggagacctccgcgccccgcaacctccccttctacgagcggctcggcttcaccgtcaccgccgacgtcgaggtgcccgaaggaccgcgcacctggtgcatgacccgcaagcccggtgcctga

SEQ ID NO: 17446 - DNA, 3405 bp, synthetic construct
  source 1..3405: mol_type = other DNA
atggccttaccagtgaccgccttgctcctgccgctggccttgctgctccacgccgccaggccgctcgaggaggacctgaagaacgtgttcccacctgaggtggccgtgttcgagcctagcaaggccgagatcgcccacacccagaaagccaccctcgtgtgcctggctaccggcttctaccccgaccatgtggaactgtcttggtgggtcaacggcaaagaggtgcacagcggcgtgtgtaccgacccccagccactgaaagaacagcccgccctgaacgacagccggtactgcctgagcagcagactgagagtgtccgccaccttctggcagaacccccggaaccacttcagatgccaggtgcagttctacggcctgagcgagaacgacgagtggacccaggacagagccaagcccgtgacccagatcgtgtctgccgaagcctggggcagagccgattgcggcatcaccagcgccagctaccaccagggcgtgctgagcgccaccatcctgtacgagatcctgctgggcaaggccaccctgtacgccgtgctggtgtctgccctggtgctgatggctatggtcaagcggaaggacagccggggaagggccaagcgatctggatctggagcaacaaacttctcactactcaaacaagcaggtgacgtggaggagaatcccgggcctactagcatggccttaccagtgaccgccttgctcctgccgctggccttgctgctccacgccgccaggccgggcgtgacacagagccccacacacctgattaagaccagaggccagcaggccacactgagatgcagccctatcagcggccacaccagcgtgtactggtatcagcaggctctcggactgggcctccagttcctgctttggtacgacgagggcgaagagagaaaccggggcaacttccctcctcggttttccggcagacagttccccaactacagcagcgagctgaacgtgaacgccctggaactggaagatagcgccctgtacctgtgtgcctcttctcttggtggacctcgcggactggctggactgagaggggatgagcagtttttcggccctggcaccagactgaccgtgctggaaggcggaggaagcggcggaggatctggcgtgacacagagccccacacacctgattaagaccagaggccagcaggccacactgagatgcagccctatcagcggccacaccagcgtgtactggtatcagcaggctctcggactgggcctccagttcctgctttggtacgacgagggcgaagagagaaaccggggcaacttccctcctcggttttccggcagacagttccccaactacagcagcgagctgaacgtgaacgccctggaactggaagatagcgccctgtacctgtgtgccagctctctcggcggagatgaactgggagccgatggcaacgagcagttctttggccctggcaccagactgaccgtgctggaaggtaccggcggaggcggatctggcggcggaggtagcggtggcggaggatctgaattcgacatccagatgacacagagccctagcagcctgtctgccagcgtgggagacagagtgaccatcacatgcaaggccagcgaccacatcaacaactggctggcctggtatcagcagaagcctggacaggcccctaagctgctgatctacggcgctaccacactggaaacaggcgtgcccagcagattttctggcagcggctctggcaccgactacaccctgacaatatccagcctccagcctgaggacttcgccacctactactgtcagcagagctggaacaccccttggacattcggccagggcaccaagctggaaatcaagagaggcggaggcggaagtggaggcggaggatctggcggcggaggctctcaagttcagcttcaacagcctggcgctgagctggtcaaacctggcgcttctgtgaagatgagctgcaaagccagcggctacgccttcagcagctactggatcaactggatgaagcagaaacccggccagggactcgaatggatcggccaaatctatcccggcgacggcgacaccaactacaacggcaagttcaagggcagagccacactgaccgccgatacctctagcagcacagcctacatgcagctgagcagcctgaccagcgaagatagcgccgtgtacttctgtgcccggtccatcacaacagtcgtgggctgcgctatggactattggggccagggaacaagcgtgaccgtgtctagtacgcgtatccagaaccctgatcctgccgtgtaccagctgcgggatagcaagagcagcgacaagagcgtgtgtctgttcaccgacttcgacagccagaccaacgtgtcccagagcaaggactccgacgtgtacatcaccgataagtgcgtgctggacatgcggagcatggacttcaagagcaactccgccgtggcctggtccaacaagtccgatttcgcctgcgccaacgccttcaacaacagcattatccccgaggacacattcttcccaagcagcgacgtgccctgcgacgtgaagctggtggaaaagagcttcgagacagacaccaacctgaacttccagaacctgagcgtgatcggcttcagaatcctgctgctgaaagtggccggctttaacctgctgatgaccctgcggctgtggtccagccgcgccaagagaagcggatctggcgtgaagcagaccctgaatttcgacctgctgaagctggctggcgacgtggaatccaacccaggcccttctagaggccatatgaccgagtacaagcccacggtgcgcctcgccacccgcgacgacgtccccagggccgtacgcaccctcgccgccgcgttcgccgactaccccgccacgcgccacaccgtcgatccggaccgccacatcgagcgggtcaccgagctgcaagaactcttcctcacgcgcgtcgggctcgacatcggcaaggtgtgggtcgcggacgacggcgccgcggtggcggtctggaccacgccggagagcgtcgaagcgggggcggtgttcgccgagatcggcccgcgcatggccgagttgagcggttcccggctggccgcgcagcaacagatggaaggcctcctggcgccgcaccggcccaaggagcccgcgtggttcctggccaccgtcggcgtctcgcccgaccaccagggcaagggtctgggcagcgccgtcgtgctccccggagtggaggcggccgagcgcgccggggtgcccgccttcctggagacctccgcgccccgcaacctccccttctacgagcggctcggcttcaccgtcaccgccgacgtcgaggtgcccgaaggaccgcgcacctggtgcatgacccgcaagcccggtgcctga

SEQ ID NO: 17447 - DNA, 2265 bp, synthetic construct
  source 1..2265: mol_type = other DNA
atggccttaccagtgaccgccttgctcctgccgctggccttgctgctccacgccgccaggccgctcgaggaggacctgaagaacgtgttcccacctgaggtggccgtgttcgagcctagcaaggccgagatcgcccacacccagaaagccaccctcgtgtgcctggctaccggcttctaccccgaccatgtggaactgtcttggtgggtcaacggcaaagaggtgcacagcggcgtgtgtaccgacccccagccactgaaagaacagcccgccctgaacgacagccggtactgcctgagcagcagactgagagtgtccgccaccttctggcagaacccccggaaccacttcagatgccaggtgcagttctacggcctgagcgagaacgacgagtggacccaggacagagccaagcccgtgacccagatcgtgtctgccgaagcctggggcagagccgattgcggcatcaccagcgccagctaccaccagggcgtgctgagcgccaccatcctgtacgagatcctgctgggcaaggccaccctgtacgccgtgctggtgtctgccctggtgctgatggctatggtcaagcggaaggacagccggggaagggccaagcgatctggatctggagcaacaaacttctcactactcaaacaagcaggtgacgtggaggagaatcccgggcctactagcatggccctgcccgtgacagccctgctgctgcctctggctctgctgctgcacgccgccagacccgatgaattcggctctgacctgggcatcaagctgctgttcgccgctgccaagggccaggacgacgaagtgcggattctgctggctgctggggccgacgtgaacgccaaggatttcgagggctacacccccctgcacgtggccgcctatgatggacacctggaaatcgtggaagtgctgctgaaggctggcgctgatgtgaatgccaaagacagccagggccggacccctctgcatgaagccgcctacagcggccatctggaaattgtggaagtgctgctgaaagccggggcagacgtgaacgctcaggacgacgctggcgagacaccagccgatctggctgcagcttggggccacgaagatatcgccgaggtgctgcagaagacgcgtatccagaaccctgatcctgccgtgtaccagctgcgggatagcaagagcagcgacaagagcgtgtgtctgttcaccgacttcgacagccagaccaacgtgtcccagagcaaggactccgacgtgtacatcaccgataagtgcgtgctggacatgcggagcatggacttcaagagcaactccgccgtggcctggtccaacaagtccgatttcgcctgcgccaacgccttcaacaacagcattatccccgaggacacattcttcccaagcagcgacgtgccctgcgacgtgaagctggtggaaaagagcttcgagacagacaccaacctgaacttccagaacctgagcgtgatcggcttcagaatcctgctgctgaaagtggccggctttaacctgctgatgaccctgcggctgtggtccagccgcgccaagagaagcggatctggcgtgaagcagaccctgaatttcgacctgctgaagctggctggcgacgtggaatccaacccaggcccttctagaggccatatgaccgagtacaagcccacggtgcgcctcgccacccgcgacgacgtccccagggccgtacgcaccctcgccgccgcgttcgccgactaccccgccacgcgccacaccgtcgatccggaccgccacatcgagcgggtcaccgagctgcaagaactcttcctcacgcgcgtcgggctcgacatcggcaaggtgtgggtcgcggacgacggcgccgcggtggcggtctggaccacgccggagagcgtcgaagcgggggcggtgttcgccgagatcggcccgcgcatggccgagttgagcggttcccggctggccgcgcagcaacagatggaaggcctcctggcgccgcaccggcccaaggagcccgcgtggttcctggccaccgtcggcgtctcgcccgaccaccagggcaagggtctgggcagcgccgtcgtgctccccggagtggaggcggccgagcgcgccggggtgcccgccttcctggagacctccgcgccccgcaacctccccttctacgagcggctcggcttcaccgtcaccgccgacgtcgaggtgcccgaaggaccgcgcacctggtgcatgacccgcaagcccggtgcctga

SEQ ID NO: 17448 - DNA, 2052 bp, synthetic construct
  source 1..2052: mol_type = other DNA
atggccttaccagtgaccgccttgctcctgccgctggccttgctgctccacgccgccaggccgctcgaggaggacctgaagaacgtgttcccacctgaggtggccgtgttcgagcctagcaaggccgagatcgcccacacccagaaagccaccctcgtgtgcctggctaccggcttctaccccgaccatgtggaactgtcttggtgggtcaacggcaaagaggtgcacagcggcgtgtgtaccgacccccagccactgaaagaacagcccgccctgaacgacagccggtactgcctgagcagcagactgagagtgtccgccaccttctggcagaacccccggaaccacttcagatgccaggtgcagttctacggcctgagcgagaacgacgagtggacccaggacagagccaagcccgtgacccagatcgtgtctgccgaagcctggggcagagccgattgcggcatcaccagcgccagctaccaccagggcgtgctgagcgccaccatcctgtacgagatcctgctgggcaaggccaccctgtacgccgtgctggtgtctgccctggtgctgatggctatggtcaagcggaaggacagccggggaagggccaagcgatctggatctggagcaacaaacttctcactactcaaacaagcaggtgacgtggaggagaatcccgggcctactagcatggactggatttggcgcatccttttccttgtcggcgctgctaccggcgcccattccttcgaaggcagcggattcgaatacgccaaagagatgcggaacgcctactgggagatcgccctgctgcccaatctgaccaaccagcagaagagagcccccatcagaaagctgtacgacgacccctcccagagcagcgagctgctgtctgaggctaaaaaactgaacgatagccagacgcgtatccagaaccctgatcctgccgtgtaccagctgcgggatagcaagagcagcgacaagagcgtgtgtctgttcaccgacttcgacagccagaccaacgtgtcccagagcaaggactccgacgtgtacatcaccgataagtgcgtgctggacatgcggagcatggacttcaagagcaactccgccgtggcctggtccaacaagtccgatttcgcctgcgccaacgccttcaacaacagcattatccccgaggacacattcttcccaagcagcgacgtgccctgcgacgtgaagctggtggaaaagagcttcgagacagacaccaacctgaacttccagaacctgagcgtgatcggcttcagaatcctgctgctgaaagtggccggctttaacctgctgatgaccctgcggctgtggtccagccgcgccaagagaagcggatctggcgtgaagcagaccctgaatttcgacctgctgaagctggctggcgacgtggaatccaacccaggcccttctagaggccatatgaccgagtacaagcccacggtgcgcctcgccacccgcgacgacgtccccagggccgtacgcaccctcgccgccgcgttcgccgactaccccgccacgcgccacaccgtcgatccggaccgccacatcgagcgggtcaccgagctgcaagaactcttcctcacgcgcgtcgggctcgacatcggcaaggtgtgggtcgcggacgacggcgccgcggtggcggtctggaccacgccggagagcgtcgaagcgggggcggtgttcgccgagatcggcccgcgcatggccgagttgagcggttcccggctggccgcgcagcaacagatggaaggcctcctggcgccgcaccggcccaaggagcccgcgtggttcctggccaccgtcggcgtctcgcccgaccaccagggcaagggtctgggcagcgccgtcgtgctccccggagtggaggcggccgagcgcgccggggtgcccgccttcctggagacctccgcgccccgcaacctccccttctacgagcggctcggcttcaccgtcaccgccgacgtcgaggtgcccgaaggaccgcgcacctggtgcatgacccgcaagcccggtgcctga

SEQ ID NO: 17449 - DNA, 2718 bp, synthetic construct
  source 1..2718: mol_type = other DNA
atggccttaccagtgaccgccttgctcctgccgctggccttgctgctccacgccgccaggccgctcgaggaggacctgaagaacgtgttcccacctgaggtggccgtgttcgagcctagcaaggccgagatcgcccacacccagaaagccaccctcgtgtgcctggctaccggcttctaccccgaccatgtggaactgtcttggtgggtcaacggcaaagaggtgcacagcggcgtgtgtaccgacccccagccactgaaagaacagcccgccctgaacgacagccggtactgcctgagcagcagactgagagtgtccgccaccttctggcagaacccccggaaccacttcagatgccaggtgcagttctacggcctgagcgagaacgacgagtggacccaggacagagccaagcccgtgacccagatcgtgtctgccgaagcctggggcagagccgattgcggcatcaccagcgccagctaccaccagggcgtgctgagcgccaccatcctgtacgagatcctgctgggcaaggccaccctgtacgccgtgctggtgtctgccctggtgctgatggctatggtcaagcggaaggacagccggggaagggccaagcgatctggatctggagcaacaaacttctcactactcaaacaagcaggtgacgtggaggagaatcccgggcctactagcatggccctgcccgtgacagccctgctgctgcctctggctctgctgctgcacgccgccagacccgatgaattcgaggtgcaactggtggaaagcggcggaggcctggtgcaggctggcggatctctgagactgagctgtgccgccagcggcatcaccttcagcatcaacacaatgggctggtacagacaggcccctggcaagcagagggaactggtggccctgatctccagcatcggcgacacctactacgccgacagcgtgaagggccggttcaccatcagccgggacaacgccaagaacaccgtgtacctccagatgaacagcctgaagcccgaggacaccgccgtgtactactgcaagcggttcagaacagccgcccagggcaccgattattggggccagggaacacaagtgaccgtgtcctctctcgagggaggaggcggctccgggggaggcggaagtggaggcggaggatctgggtctggaggaagcggatctggaggctcagggtcagggggctcaggcagtggaggctctttcgaagtgcaactggtggaatctgggggcggactggtgcagccaggcggaagtctgaggctgtcttgtgccgcctccggcagcatcttcggcttcaacgacatggcctggtatcggcaggctcccggaaaacagcgcgagctggtggctctgattagcagagtgggcgtgaccagcagcgccgactctgtgaagggcagattcacaatctccagagtgaacgccaaggatacagtgtacctccagatgaactctctgaaacctgaggatacagcagtgtactattgctacatggaccagcggctggacggcagcacactggcctactggggacagggaactcaagtgacagtgtctagcacgcgtatccagaaccctgatcctgccgtgtaccagctgcgggatagcaagagcagcgacaagagcgtgtgtctgttcaccgacttcgacagccagaccaacgtgtcccagagcaaggactccgacgtgtacatcaccgataagtgcgtgctggacatgcggagcatggacttcaagagcaactccgccgtggcctggtccaacaagtccgatttcgcctgcgccaacgccttcaacaacagcattatccccgaggacacattcttcccaagcagcgacgtgccctgcgacgtgaagctggtggaaaagagcttcgagacagacaccaacctgaacttccagaacctgagcgtgatcggcttcagaatcctgctgctgaaagtggccggctttaacctgctgatgaccctgcggctgtggtccagccgcgccaagagaagcggatctggcgtgaagcagaccctgaatttcgacctgctgaagctggctggcgacgtggaatccaacccaggcccttctagaggccatatgaccgagtacaagcccacggtgcgcctcgccacccgcgacgacgtccccagggccgtacgcaccctcgccgccgcgttcgccgactaccccgccacgcgccacaccgtcgatccggaccgccacatcgagcgggtcaccgagctgcaagaactcttcctcacgcgcgtcgggctcgacatcggcaaggtgtgggtcgcggacgacggcgccgcggtggcggtctggaccacgccggagagcgtcgaagcgggggcggtgttcgccgagatcggcccgcgcatggccgagttgagcggttcccggctggccgcgcagcaacagatggaaggcctcctggcgccgcaccggcccaaggagcccgcgtggttcctggccaccgtcggcgtctcgcccgaccaccagggcaagggtctgggcagcgccgtcgtgctccccggagtggaggcggccgagcgcgccggggtgcccgccttcctggagacctccgcgccccgcaacctccccttctacgagcggctcggcttcaccgtcaccgccgacgtcgaggtgcccgaaggaccgcgcacctggtgcatgacccgcaagcccggtgcctga

SEQ ID NO: 17450 - DNA, 2460 bp, synthetic construct
  source 1..2460: mol_type = other DNA
atggccttaccagtgaccgccttgctcctgccgctggccttgctgctccacgccgccaggccgctcgaggaggacctgaagaacgtgttcccacctgaggtggccgtgttcgagcctagcaaggccgagatcgcccacacccagaaagccaccctcgtgtgcctggctaccggcttctaccccgaccatgtggaactgtcttggtgggtcaacggcaaagaggtgcacagcggcgtgtgtaccgacccccagccactgaaagaacagcccgccctgaacgacagccggtactgcctgagcagcagactgagagtgtccgccaccttctggcagaacccccggaaccacttcagatgccaggtgcagttctacggcctgagcgagaacgacgagtggacccaggacagagccaagcccgtgacccagatcgtgtctgccgaagcctggggcagagccgattgcggcatcaccagcgccagctaccaccagggcgtgctgagcgccaccatcctgtacgagatcctgctgggcaaggccaccctgtacgccgtgctggtgtctgccctggtgctgatggctatggtcaagcggaaggacagccggggaagggccaagcgatctggatctggagcaacaaacttctcactactcaaacaagcaggtgacgtggaggagaatcccgggcctactagcatggcccttccagtcactgccttgctgttgcctctggcgctcctgctccacgccgctagaccgggcatgagaaccgaggacctgcctaaggccgtggtgttcctggaaccccagtggtacagagtgctggaaaaggacagcgtgaccctgaagtgccagggcgcctacagccccgaggacaatagcacccagtggttccacaacgagagcctgatctccagccaggccagcagctacttcatcgacgccgccaccgtggacgacagcggcgagtatagatgccagaccaacctgagcaccctgagcgaccccgtgcagctggaagtgcacatcggatggctgctgctgcaggcccccagatgggtgttcaaagaagaggaccccatccacctgagatgccactcttggaagaacaccgccctgcacaaagtgacctacctgcagaacggcaagggcagaaagtacttccaccacaacagcgacttctacatccccaaggccaccctgaaggactccggctcctacttctgcagaggcctcgtgggcagcaagaacgtgtccagcgagacagtgaacatcaccatcacccagggcctggccgtgtctaccatcagcagctttttcccacccggctaccagacgcgtatccagaaccctgatcctgccgtgtaccagctgcgggatagcaagagcagcgacaagagcgtgtgtctgttcaccgacttcgacagccagaccaacgtgtcccagagcaaggactccgacgtgtacatcaccgataagtgcgtgctggacatgcggagcatggacttcaagagcaactccgccgtggcctggtccaacaagtccgatttcgcctgcgccaacgccttcaacaacagcattatccccgaggacacattcttcccaagcagcgacgtgccctgcgacgtgaagctggtggaaaagagcttcgagacagacaccaacctgaacttccagaacctgagcgtgatcggcttcagaatcctgctgctgaaagtggccggctttaacctgctgatgaccctgcggctgtggtccagccgcgccaagagaagcggatctggcgtgaagcagaccctgaatttcgacctgctgaagctggctggcgacgtggaatccaacccaggcccttctagaggccatatgaccgagtacaagcccacggtgcgcctcgccacccgcgacgacgtccccagggccgtacgcaccctcgccgccgcgttcgccgactaccccgccacgcgccacaccgtcgatccggaccgccacatcgagcgggtcaccgagctgcaagaactcttcctcacgcgcgtcgggctcgacatcggcaaggtgtgggtcgcggacgacggcgccgcggtggcggtctggaccacgccggagagcgtcgaagcgggggcggtgttcgccgagatcggcccgcgcatggccgagttgagcggttcccggctggccgcgcagcaacagatggaaggcctcctggcgccgcaccggcccaaggagcccgcgtggttcctggccaccgtcggcgtctcgcccgaccaccagggcaagggtctgggcagcgccgtcgtgctccccggagtggaggcggccgagcgcgccggggtgcccgccttcctggagacctccgcgccccgcaacctccccttctacgagcggctcggcttcaccgtcaccgccgacgtcgaggtgcccgaaggaccgcgcacctggtgcatgacccgcaagcccggtgcctga

SEQ ID NO: 17451 - DNA, 1341 bp, synthetic construct
  source 1..1341: mol_type = other DNA
atggccttaccagtgaccgccttgctcctgccgctggccttgctgctccacgccgccaggccgctcgaggaggacctgaagaacgtgttcccacctgaggtggccgtgttcgagcctagcaaggccgagatcgcccacacccagaaagccaccctcgtgtgcctggctaccggcttctaccccgaccatgtggaactgtcttggtgggtcaacggcaaagaggtgcacagcggcgtgtgtaccgacccccagccactgaaagaacagcccgccctgaacgacagccggtactgcctgagcagcagactgagagtgtccgccaccttctggcagaacccccggaaccacttcagatgccaggtgcagttctacggcctgagcgagaacgacgagtggacccaggacagagccaagcccgtgacccagatcgtgtctgccgaagcctggggcagagccgattgcggcatcaccagcgccagctaccaccagggcgtgctgagcgccaccatcctgtacgagatcctgctgggcaaggccaccctgtacgccgtgctggtgtctgccctggtgctgatggctatggtcaagcggaaggacagccggggaagggccaagcgatctggatctggagcaacaaacttctcactactcaaacaagcaggtgacgtggaggagaatcccgggcctactagcgccaccatggccttaccagtgaccgccttgctcctgccgctggccttgctgctccacgccgccaggccgatggaccccgacctggaaatcagagccgccttcctgcggcagagaaacacagccctgagaacagaggtggccgagctggaacaagaggtgcagcggctggaaaacgaggtgtcccagtacgagacaagatacggccctctcggaggcggaaaaacgcgtatccagaaccctgatcctgccgtgtaccagctgcgggatagcaagagcagcgacaagagcgtgtgtctgttcaccgacttcgacagccagaccaacgtgtcccagagcaaggactccgacgtgtacatcaccgataagtgcgtgctggacatgcggagcatggacttcaagagcaactccgccgtggcctggtccaacaagtccgatttcgcctgcgccaacgccttcaacaacagcattatccccgaggacacattcttcccaagcagcgacgtgccctgcgacgtgaagctggtggaaaagagcttcgagacagacaccaacctgaacttccagaacctgagcgtgatcggcttcagaatcctgctgctgaaagtggccggctttaacctgctgatgaccctgcggctgtggtccagc

SEQ ID NO: 17452 - DNA, 1341 bp, synthetic construct
  source 1..1341: mol_type = other DNA
atggccttaccagtgaccgccttgctcctgccgctggccttgctgctccacgccgccaggccgctcgaggaggacctgaagaacgtgttcccacctgaggtggccgtgttcgagcctagcaaggccgagatcgcccacacccagaaagccaccctcgtgtgcctggctaccggcttctaccccgaccatgtggaactgtcttggtgggtcaacggcaaagaggtgcacagcggcgtgtgtaccgacccccagccactgaaagaacagcccgccctgaacgacagccggtactgcctgagcagcagactgagagtgtccgccaccttctggcagaacccccggaaccacttcagatgccaggtgcagttctacggcctgagcgagaacgacgagtggacccaggacagagccaagcccgtgacccagatcgtgtctgccgaagcctggggcagagccgattgcggcatcaccagcgccagctaccaccagggcgtgctgagcgccaccatcctgtacgagatcctgctgggcaaggccaccctgtacgccgtgctggtgtctgccctggtgctgatggctatggtcaagcggaaggacagccggggaagggccaagcgatctggatctggagcaacaaacttctcactactcaaacaagcaggtgacgtggaggagaatcccgggcctactagcgccaccatggccttaccagtgaccgccttgctcctgccgctggccttgctgctccacgccgccaggccgatggaccctgatctcgaaattgaggccgcctttctggaacgcgagaacactgccctggaaaccagggtcgcagagctgagacagagagtgcagagactgcggaacagagtgtctcagtaccgcaccagatatggcccactcggcggaggtaaaacgcgtatccagaaccctgatcctgccgtgtaccagctgcgggatagcaagagcagcgacaagagcgtgtgtctgttcaccgacttcgacagccagaccaacgtgtcccagagcaaggactccgacgtgtacatcaccgataagtgcgtgctggacatgcggagcatggacttcaagagcaactccgccgtggcctggtccaacaagtccgatttcgcctgcgccaacgccttcaacaacagcattatccccgaggacacattcttcccaagcagcgacgtgccctgcgacgtgaagctggtggaaaagagcttcgagacagacaccaacctgaacttccagaacctgagcgtgatcggcttcagaatcctgctgctgaaagtggccggctttaacctgctgatgaccctgcggctgtggtccagc

SEQ ID NO: 17453 - DNA, 1272 bp, synthetic construct
  source 1..1272: mol_type = other DNA
atggccttaccagtgaccgccttgctcctgccgctggccttgctgctccacgccgccaggccgctcgaggaggacctgaagaacgtgttcccacctgaggtggccgtgttcgagcctagcaaggccgagatcgcccacacccagaaagccaccctcgtgtgcctggctaccggcttctaccccgaccatgtggaactgtcttggtgggtcaacggcaaagaggtgcacagcggcgtgtgtaccgacccccagccactgaaagaacagcccgccctgaacgacagccggtactgcctgagcagcagactgagagtgtccgccaccttctggcagaacccccggaaccacttcagatgccaggtgcagttctacggcctgagcgagaacgacgagtggacccaggacagagccaagcccgtgacccagatcgtgtctgccgaagcctggggcagagccgattgcggcatcaccagcgccagctaccaccagggcgtgctgagcgccaccatcctgtacgagatcctgctgggcaaggccaccctgtacgccgtgctggtgtctgccctggtgctgatggctatggtcaagcggaaggacagccggggaagggccaagcgatctggatctggagcaacaaacttctcactactcaaacaagcaggtgacgtggaggagaatcccgggcctactagcgccaccatggccttaccagtgaccgccttgctcctgccgctggccttgctgctccacgccgccaggccggaagttgctgccctcgagaaggaggtagcagctttggaaaaagaagtcgcagcccttgagaaagaagttgcggctctggagaagacgcgtatccagaaccctgatcctgccgtgtaccagctgcgggatagcaagagcagcgacaagagcgtgtgtctgttcaccgacttcgacagccagaccaacgtgtcccagagcaaggactccgacgtgtacatcaccgataagtgcgtgctggacatgcggagcatggacttcaagagcaactccgccgtggcctggtccaacaagtccgatttcgcctgcgccaacgccttcaacaacagcattatccccgaggacacattcttcccaagcagcgacgtgccctgcgacgtgaagctggtggaaaagagcttcgagacagacaccaacctgaacttccagaacctgagcgtgatcggcttcagaatcctgctgctgaaagtggccggctttaacctgctgatgaccctgcggctgtggtccagc

SEQ ID NO: 17454 - DNA, 2046 bp, synthetic construct
  source 1..2046: mol_type = other DNA
atggccttaccagtgaccgccttgctcctgccgctggccttgctgctccacgccgccaggccgctcgaggaggacctgaagaacgtgttcccacctgaggtggccgtgttcgagcctagcaaggccgagatcgcccacacccagaaagccaccctcgtgtgcctggctaccggcttctaccccgaccatgtggaactgtcttggtgggtcaacggcaaagaggtgcacagcggcgtgtgtaccgacccccagccactgaaagaacagcccgccctgaacgacagccggtactgcctgagcagcagactgagagtgtccgccaccttctggcagaacccccggaaccacttcagatgccaggtgcagttctacggcctgagcgagaacgacgagtggacccaggacagagccaagcccgtgacccagatcgtgtctgccgaagcctggggcagagccgattgcggcatcaccagcgccagctaccaccagggcgtgctgagcgccaccatcctgtacgagatcctgctgggcaaggccaccctgtacgccgtgctggtgtctgccctggtgctgatggctatggtcaagcggaaggacagccggggaagggccaagcgatctggatctggagcaacaaacttctcactactcaaacaagcaggtgacgtggaggagaatcccgggcctactagcgccaccatggccttaccagtgaccgccttgctcctgccgctggccttgctgctccacgccgccaggccgctgttcaatcaagaggtgcagatccctctgaccgagagctactgtggcccctgtcctaagaactggatctgctacaagaacaactgctaccagttcttcgacgagagcaagaattggtacgagagccaggccagctgcatgagccagaatgccagcctgctgaaggtgtacagcaaagaggaccaggacctgctgaaactggtcaagagcgcccactggatgggccttgtgcacatccccaccaatggctcttggcagtgggaggacggcagcattctgagccctaacctgctgaccatcatcgagatgcagaagggcgactgcgccctgtacgccagcagctttaagggctacatcgagaattgcagcaccccgaacacctacatctgtatgcagagaaccgtttctggcggaggcggctctggaggaggcggaagtggcggcggaggcgacctctttaatcaagaagtccagattccactcaccgaatcctactgcggaccttgtccaaaaaattggatttgttataagaacaactgttatcaattctttgatgagtctaaaaattggtatgagtcccaggcttcctgcatgtctcagaacgcttctctgctgaaagtctactctaaagaagatcaggatctcctgaagctcgtcaagtctgcccattggatggggctcgtccacattcctaccaacggaagctggcaatgggaagatggctccatcctgtctccaaatctgctcacgattattgaaatgcagaaaggggattgtgctctctacgccagctccttcaagggatatattgagaactgtagcacgcccaatacttatatctgtatgcaacggaccgtgacgcgtatccagaaccctgatcctgccgtgtaccagctgcgggatagcaagagcagcgacaagagcgtgtgtctgttcaccgacttcgacagccagaccaacgtgtcccagagcaaggactccgacgtgtacatcaccgataagtgcgtgctggacatgcggagcatggacttcaagagcaactccgccgtggcctggtccaacaagtccgatttcgcctgcgccaacgccttcaacaacagcattatccccgaggacacattcttcccaagcagcgacgtgccctgcgacgtgaagctggtggaaaagagcttcgagacagacaccaacctgaacttccagaacctgagcgtgatcggcttcagaatcctgctgctgaaagtggccggctttaacctgctgatgaccctgcggctgtggtccagc

SEQ ID NO: 17455 - DNA, 2046 bp, synthetic construct
  source 1..2046: mol_type = other DNA
atggccttaccagtgaccgccttgctcctgccgctggccttgctgctccacgccgccaggccgctcgaggaggacctgaagaacgtgttcccacctgaggtggccgtgttcgagcctagcaaggccgagatcgcccacacccagaaagccaccctcgtgtgcctggctaccggcttctaccccgaccatgtggaactgtcttggtgggtcaacggcaaagaggtgcacagcggcgtgtgtaccgacccccagccactgaaagaacagcccgccctgaacgacagccggtactgcctgagcagcagactgagagtgtccgccaccttctggcagaacccccggaaccacttcagatgccaggtgcagttctacggcctgagcgagaacgacgagtggacccaggacagagccaagcccgtgacccagatcgtgtctgccgaagcctggggcagagccgattgcggcatcaccagcgccagctaccaccagggcgtgctgagcgccaccatcctgtacgagatcctgctgggcaaggccaccctgtacgccgtgctggtgtctgccctggtgctgatggctatggtcaagcggaaggacagccggggaagggccaagcgatctggatctggagcaacaaacttctcactactcaaacaagcaggtgacgtggaggagaatcccgggcctactagcgccaccatggccttaccagtgaccgccttgctcctgccgctggccttgctgctccacgccgccaggccgctgttcaatcaagaggtgcagatccctctgaccgagagctactgtggcccctgtcctaagaactggatctgctacaagaacaactgctaccagttcttcgacgagagcaagaattggtacgagagccaggccagctgcatgagccagaatgccagcctgctgaaggtgtacagcaaagaggaccaggacctgctgaaactggtcaagagcgcccactggatgggccttgtgcacatccccaccaatggctcttggcagtgggaggacggcagcattctgagccctaacctgctgaccatcatcgagatgcagaagggcgactgcgccctgtacgccagcagctttaagggcttcatcgagaattgcagcaccccgaacacctacatctgtatgcagagaaccgttggcggaggcggaagtggaggcggaggatctggcggcggaggctctgacctctttaatcaagaagtccagattccactcaccgaatcctactgcggaccttgtccaaaaaattggatttgttataagaacaactgttatcaattctttgatgagtctaaaaattggtatgagtcccaggcttcctgcatgtctcagaacgcttctctgctgaaagtctactctaaagaagatcaggatctcctgaagctcgtcaagtctgcccattggatggggctcgtccacattcctaccaacggaagctggcaatgggaagatggctccatcctgtctccaaatctgctcacgattattgaaatgcagaaaggggattgtgctctctacgccagctccttcaagggatttattgagaactgtagcacgcccaatacttatatctgtatgcaacggaccgtgacgcgtatccagaaccctgatcctgccgtgtaccagctgcgggatagcaagagcagcgacaagagcgtgtgtctgttcaccgacttcgacagccagaccaacgtgtcccagagcaaggactccgacgtgtacatcaccgataagtgcgtgctggacatgcggagcatggacttcaagagcaactccgccgtggcctggtccaacaagtccgatttcgcctgcgccaacgccttcaacaacagcattatccccgaggacacattcttcccaagcagcgacgtgccctgcgacgtgaagctggtggaaaagagcttcgagacagacaccaacctgaacttccagaacctgagcgtgatcggcttcagaatcctgctgctgaaagtggccggctttaacctgctgatgaccctgcggctgtggtccagc

SEQ ID NO: 17456 - DNA, 2124 bp, synthetic construct
  source 1..2124: mol_type = other DNA
atggccttaccagtgaccgccttgctcctgccgctggccttgctgctccacgccgccaggccgctcgaggaggacctgaagaacgtgttcccacctgaggtggccgtgttcgagcctagcaaggccgagatcgcccacacccagaaagccaccctcgtgtgcctggctaccggcttctaccccgaccatgtggaactgtcttggtgggtcaacggcaaagaggtgcacagcggcgtgtgtaccgacccccagccactgaaagaacagcccgccctgaacgacagccggtactgcctgagcagcagactgagagtgtccgccaccttctggcagaacccccggaaccacttcagatgccaggtgcagttctacggcctgagcgagaacgacgagtggacccaggacagagccaagcccgtgacccagatcgtgtctgccgaagcctggggcagagccgattgcggcatcaccagcgccagctaccaccagggcgtgctgagcgccaccatcctgtacgagatcctgctgggcaaggccaccctgtacgccgtgctggtgtctgccctggtgctgatggctatggtcaagcggaaggacagccggggaagggccaagcgatctggatctggagcaacaaacttctcactactcaaacaagcaggtgacgtggaggagaatcccgggcctactagcatggccttaccagtgaccgccttgctcctgccgctggccttgctgctccacgccgccaggccgatggaccccgacctggaaatcagagccgccttcctgcggcagagaaacacagccctgagaacagaggtggccgagctggaacaagaggtgcagcggctggaaaacgaggtgtcccagtacgagacaagatacggccctctcggaggcggaaaaggtaccggcggaggcggatctggcggcggaggtagcggtggcggaggatctgaattcgacatccagatgacacagagccctagcagcctgtctgccagcgtgggagacagagtgaccatcacatgcaaggccagcgaccacatcaacaactggctggcctggtatcagcagaagcctggacaggcccctaagctgctgatctacggcgctaccacactggaaacaggcgtgcccagcagattttctggcagcggctctggcaccgactacaccctgacaatatccagcctccagcctgaggacttcgccacctactactgtcagcagagctggaacaccccttggacattcggccagggcaccaagctggaaatcaagagaggcggaggcggaagtggaggcggaggatctggcggcggaggctctcaagttcagcttcaacagcctggcgctgagctggtcaaacctggcgcttctgtgaagatgagctgcaaagccagcggctacgccttcagcagctactggatcaactggatgaagcagaaacccggccagggactcgaatggatcggccaaatctatcccggcgacggcgacaccaactacaacggcaagttcaagggcagagccacactgaccgccgatacctctagcagcacagcctacatgcagctgagcagcctgaccagcgaagatagcgccgtgtacttctgtgcccggtccatcacaacagtcgtgggctgcgctatggactattggggccagggaacaagcgtgaccgtgtctagtacgcgtatccagaaccctgatcctgccgtgtaccagctgcgggatagcaagagcagcgacaagagcgtgtgtctgttcaccgacttcgacagccagaccaacgtgtcccagagcaaggactccgacgtgtacatcaccgataagtgcgtgctggacatgcggagcatggacttcaagagcaactccgccgtggcctggtccaacaagtccgatttcgcctgcgccaacgccttcaacaacagcattatccccgaggacacattcttcccaagcagcgacgtgccctgcgacgtgaagctggtggaaaagagcttcgagacagacaccaacctgaacttccagaacctgagcgtgatcggcttcagaatcctgctgctgaaagtggccggctttaacctgctgatgaccctgcggctgtggtccagc

SEQ ID NO: 17457 - DNA, 2829 bp, synthetic construct
  source 1..2829: mol_type = other DNA
atggccttaccagtgaccgccttgctcctgccgctggccttgctgctccacgccgccaggccgctcgaggaggacctgaagaacgtgttcccacctgaggtggccgtgttcgagcctagcaaggccgagatcgcccacacccagaaagccaccctcgtgtgcctggctaccggcttctaccccgaccatgtggaactgtcttggtgggtcaacggcaaagaggtgcacagcggcgtgtgtaccgacccccagccactgaaagaacagcccgccctgaacgacagccggtactgcctgagcagcagactgagagtgtccgccaccttctggcagaacccccggaaccacttcagatgccaggtgcagttctacggcctgagcgagaacgacgagtggacccaggacagagccaagcccgtgacccagatcgtgtctgccgaagcctggggcagagccgattgcggcatcaccagcgccagctaccaccagggcgtgctgagcgccaccatcctgtacgagatcctgctgggcaaggccaccctgtacgccgtgctggtgtctgccctggtgctgatggctatggtcaagcggaaggacagccggggaagggccaagcgatctggatctggagcaacaaacttctcactactcaaacaagcaggtgacgtggaggagaatcccgggcctactagcatggccttaccagtgaccgccttgctcctgccgctggccttgctgctccacgccgccaggccgctgttcaatcaagaggtgcagatccctctgaccgagagctactgtggcccctgtcctaagaactggatctgctacaagaacaactgctaccagttcttcgacgagagcaagaattggtacgagagccaggccagctgcatgagccagaatgccagcctgctgaaggtgtacagcaaagaggaccaggacctgctgaaactggtcaagagcgcccactggatgggccttgtgcacatccccaccaatggctcttggcagtgggaggacggcagcattctgagccctaacctgctgaccatcatcgagatgcagaagggcgactgcgccctgtacgccagcagctttaagggcttcatcgagaattgcagcaccccgaacacctacatctgtatgcagagaaccgttggcggaggcggaagtggaggcggaggatctggcggcggaggctctgacctctttaatcaagaagtccagattccactcaccgaatcctactgcggaccttgtccaaaaaattggatttgttataagaacaactgttatcaattctttgatgagtctaaaaattggtatgagtcccaggcttcctgcatgtctcagaacgcttctctgctgaaagtctactctaaagaagatcaggatctcctgaagctcgtcaagtctgcccattggatggggctcgtccacattcctaccaacggaagctggcaatgggaagatggctccatcctgtctccaaatctgctcacgattattgaaatgcagaaaggggattgtgctctctacgccagctccttcaagggatttattgagaactgtagcacgcccaatacttatatctgtatgcaacggaccgtgggtaccggcggaggcggatctggcggcggaggtagcggtggcggaggatctgaattcgacatccagatgacacagagccctagcagcctgtctgccagcgtgggagacagagtgaccatcacatgcaaggccagcgaccacatcaacaactggctggcctggtatcagcagaagcctggacaggcccctaagctgctgatctacggcgctaccacactggaaacaggcgtgcccagcagattttctggcagcggctctggcaccgactacaccctgacaatatccagcctccagcctgaggacttcgccacctactactgtcagcagagctggaacaccccttggacattcggccagggcaccaagctggaaatcaagagaggcggaggcggaagtggaggcggaggatctggcggcggaggctctcaagttcagcttcaacagcctggcgctgagctggtcaaacctggcgcttctgtgaagatgagctgcaaagccagcggctacgccttcagcagctactggatcaactggatgaagcagaaacccggccagggactcgaatggatcggccaaatctatcccggcgacggcgacaccaactacaacggcaagttcaagggcagagccacactgaccgccgatacctctagcagcacagcctacatgcagctgagcagcctgaccagcgaagatagcgccgtgtacttctgtgcccggtccatcacaacagtcgtgggctgcgctatggactattggggccagggaacaagcgtgaccgtgtctagtacgcgtatccagaaccctgatcctgccgtgtaccagctgcgggatagcaagagcagcgacaagagcgtgtgtctgttcaccgacttcgacagccagaccaacgtgtcccagagcaaggactccgacgtgtacatcaccgataagtgcgtgctggacatgcggagcatggacttcaagagcaactccgccgtggcctggtccaacaagtccgatttcgcctgcgccaacgccttcaacaacagcattatccccgaggacacattcttcccaagcagcgacgtgccctgcgacgtgaagctggtggaaaagagcttcgagacagacaccaacctgaacttccagaacctgagcgtgatcggcttcagaatcctgctgctgaaagtggccggctttaacctgctgatgaccctgcggctgtggtccagc

SEQ ID NO: 17458 - DNA, 1944 bp, synthetic construct
  source 1..1944: mol_type = other DNA
atggccttaccagtgaccgccttgctcctgccgctggccttgctgctccacgccgccaggccgctcgaggaggacctgaagaacgtgttcccacctgaggtggccgtgttcgagcctagcaaggccgagatcgcccacacccagaaagccaccctcgtgtgcctggctaccggcttctaccccgaccatgtggaactgtcttggtgggtcaacggcaaagaggtgcacagcggcgtgtgtaccgacccccagccactgaaagaacagcccgccctgaacgacagccggtactgcctgagcagcagactgagagtgtccgccaccttctggcagaacccccggaaccacttcagatgccaggtgcagttctacggcctgagcgagaacgacgagtggacccaggacagagccaagcccgtgacccagatcgtgtctgccgaagcctggggcagagccgattgcggcatcaccagcgccagctaccaccagggcgtgctgagcgccaccatcctgtacgagatcctgctgggcaaggccaccctgtacgccgtgctggtgtctgccctggtgctgatggctatggtcaagcggaaggacagccggggaagggccaagcgatctggatctggagcaacaaacttctcactactcaaacaagcaggtgacgtggaggagaatcccgggcctactagcatggccttaccagtgaccgccttgctcctgccgctggccttgctgctccacgccgccaggccgcagtctgtgctgacacagcctcctagtgtgtctggcgctcctggacagagagtgaccatctcttgtaccggcagcagcagcaatatcggagccggctatgacgtgcactggtatcagcagctccctggcacagcccctaaactgctgatcttcggcaacagcaacagacccagcggcgtgcccgatagattcagcggctttaagagcggcacaagcgccagcctggctatcactggactgcaagccgaggacgaggccgactacttctgccagagctacgatagcagcctgagcggcagcggagtgtttggcacaggcaccaaagtgacagtgcttggcggcggaggcggaagtggaggcggaggatctggcggcggaggctctcaaatgcaactggttcaaagcggcggtggcctggtgcaacctggaagaagtctgagactgagctgtgccgccagcggcttcaccttcgatgattacgccatgcactgggtccgacaggcccctggaaaaggactggaatgggtgtccggcatctcctggaatagcggctctatcggctacgccgacagcgtgaagggcagattcaccatcagccgggacaacgccaagaacagcctgtacctccagatgaactccctgagagccgaggatacagccctgtactactgcgccaaggacatccacagcggcagctactacggcctgctgtactacgctatggacgtgtggggccagggcacaaccgtgacagtttcttctacgcgtatccagaaccctgatcctgccgtgtaccagctgcgggatagcaagagcagcgacaagagcgtgtgtctgttcaccgacttcgacagccagaccaacgtgtcccagagcaaggactccgacgtgtacatcaccgataagtgcgtgctggacatgcggagcatggacttcaagagcaactccgccgtggcctggtccaacaagtccgatttcgcctgcgccaacgccttcaacaacagcattatccccgaggacacattcttcccaagcagcgacgtgccctgcgacgtgaagctggtggaaaagagcttcgagacagacaccaacctgaacttccagaacctgagcgtgatcggcttcagaatcctgctgctgaaagtggccggctttaacctgctgatgaccctgcggctgtggtccagc

SEQ ID NO: 17459 - DNA, 1455 bp, synthetic construct
  source 1..1455: mol_type = other DNA
atggccttaccagtgaccgccttgctcctgccgctggccttgctgctccacgccgccaggccgctcgaggaggacctgaagaacgtgttcccacctgaggtggccgtgttcgagcctagcaaggccgagatcgcccacacccagaaagccaccctcgtgtgcctggctaccggcttctaccccgaccatgtggaactgtcttggtgggtcaacggcaaagaggtgcacagcggcgtgtgtaccgacccccagccactgaaagaacagcccgccctgaacgacagccggtactgcctgagcagcagactgagagtgtccgccaccttctggcagaacccccggaaccacttcagatgccaggtgcagttctacggcctgagcgagaacgacgagtggacccaggacagagccaagcccgtgacccagatcgtgtctgccgaagcctggggcagagccgattgcggcatcaccagcgccagctaccaccagggcgtgctgagcgccaccatcctgtacgagatcctgctgggcaaggccaccctgtacgccgtgctggtgtctgccctggtgctgatggctatggtcaagcggaaggacagccggggaagggccaagcgatctggatctggagcaacaaacttctcactactcaaacaagcaggtgacgtggaggagaatcccgggcctactagcatggccttaccagtgaccgccttgctcctgccgctggccttgctgctccacgccgccaggccgatgtgtatgccctgcttcaccaccgaccatcagatggcccggaagtgcgacgattgctgtggcggaaaaggcagaggcaagtgctacggccctcagtgcttgtgtagactcgagggcggaggcggaagtggaggcggaggatctggcggcggaggctctttcgaagtgtgtatgccttgttttaccacggatcaacaaatggctcgcaagtgttctgactgctgcggaggcaaaggccggggaaagtgttatggcccacagtgtctgtgccggacgcgtatccagaaccctgatcctgccgtgtaccagctgcgggatagcaagagcagcgacaagagcgtgtgtctgttcaccgacttcgacagccagaccaacgtgtcccagagcaaggactccgacgtgtacatcaccgataagtgcgtgctggacatgcggagcatggacttcaagagcaactccgccgtggcctggtccaacaagtccgatttcgcctgcgccaacgccttcaacaacagcattatccccgaggacacattcttcccaagcagcgacgtgccctgcgacgtgaagctggtggaaaagagcttcgagacagacaccaacctgaacttccagaacctgagcgtgatcggcttcagaatcctgctgctgaaagtggccggctttaacctgctgatgaccctgcggctgtggtccagc

SEQ ID NO: 17460 - DNA, 2244 bp, synthetic construct
  source 1..2244: mol_type = other DNA
atggccttaccagtgaccgccttgctcctgccgctggccttgctgctccacgccgccaggccgctcgaggaggacctgaagaacgtgttcccacctgaggtggccgtgttcgagcctagcaaggccgagatcgcccacacccagaaagccaccctcgtgtgcctggctaccggcttctaccccgaccatgtggaactgtcttggtgggtcaacggcaaagaggtgcacagcggcgtgtgtaccgacccccagccactgaaagaacagcccgccctgaacgacagccggtactgcctgagcagcagactgagagtgtccgccaccttctggcagaacccccggaaccacttcagatgccaggtgcagttctacggcctgagcgagaacgacgagtggacccaggacagagccaagcccgtgacccagatcgtgtctgccgaagcctggggcagagccgattgcggcatcaccagcgccagctaccaccagggcgtgctgagcgccaccatcctgtacgagatcctgctgggcaaggccaccctgtacgccgtgctggtgtctgccctggtgctgatggctatggtcaagcggaaggacagccggggaagggccaagcgatctggatctggagcaacaaacttctcactactcaaacaagcaggtgacgtggaggagaatcccgggcctactagcatggccttaccagtgaccgccttgctcctgccgctggccttgctgctccacgccgccaggccgatgtgtatgccctgcttcaccaccgaccatcagatggcccggaagtgcgacgattgctgtggcggaaaaggcagaggcaagtgctacggccctcagtgcttgtgtagactcgagggcggaggcggaagtggaggcggaggatctggcggcggaggctctttcgaagtgtgtatgccttgttttaccacggatcaacaaatggctcgcaagtgttctgactgctgcggaggcaaaggccggggaaagtgttatggcccacagtgtctgtgccggggtaccggcggaggcggatctggcggcggaggtagcggtggcggaggatctgaattcgacatccagatgacacagagccctagcagcctgtctgccagcgtgggagacagagtgaccatcacatgcaaggccagcgaccacatcaacaactggctggcctggtatcagcagaagcctggacaggcccctaagctgctgatctacggcgctaccacactggaaacaggcgtgcccagcagattttctggcagcggctctggcaccgactacaccctgacaatatccagcctccagcctgaggacttcgccacctactactgtcagcagagctggaacaccccttggacattcggccagggcaccaagctggaaatcaagagaggcggaggcggaagtggaggcggaggatctggcggcggaggctctcaagttcagcttcaacagcctggcgctgagctggtcaaacctggcgcttctgtgaagatgagctgcaaagccagcggctacgccttcagcagctactggatcaactggatgaagcagaaacccggccagggactcgaatggatcggccaaatctatcccggcgacggcgacaccaactacaacggcaagttcaagggcagagccacactgaccgccgatacctctagcagcacagcctacatgcagctgagcagcctgaccagcgaagatagcgccgtgtacttctgtgcccggtccatcacaacagtcgtgggctgcgctatggactattggggccagggaacaagcgtgaccgtgtctagtacgcgtatccagaaccctgatcctgccgtgtaccagctgcgggatagcaagagcagcgacaagagcgtgtgtctgttcaccgacttcgacagccagaccaacgtgtcccagagcaaggactccgacgtgtacatcaccgataagtgcgtgctggacatgcggagcatggacttcaagagcaactccgccgtggcctggtccaacaagtccgatttcgcctgcgccaacgccttcaacaacagcattatccccgaggacacattcttcccaagcagcgacgtgccctgcgacgtgaagctggtggaaaagagcttcgagacagacaccaacctgaacttccagaacctgagcgtgatcggcttcagaatcctgctgctgaaagtggccggctttaacctgctgatgaccctgcggctgtggtccagc

SEQ ID NO: 17461 - DNA, 2469 bp, synthetic construct
  source 1..2469: mol_type = other DNA
atggccttaccagtgaccgccttgctcctgccgctggccttgctgctccacgccgccaggccgctcgaggaggacctgaagaacgtgttcccacctgaggtggccgtgttcgagcctagcaaggccgagatcgcccacacccagaaagccaccctcgtgtgcctggctaccggcttctaccccgaccatgtggaactgtcttggtgggtcaacggcaaagaggtgcacagcggcgtgtgtaccgacccccagccactgaaagaacagcccgccctgaacgacagccggtactgcctgagcagcagactgagagtgtccgccaccttctggcagaacccccggaaccacttcagatgccaggtgcagttctacggcctgagcgagaacgacgagtggacccaggacagagccaagcccgtgacccagatcgtgtctgccgaagcctggggcagagccgattgcggcatcaccagcgccagctaccaccagggcgtgctgagcgccaccatcctgtacgagatcctgctgggcaaggccaccctgtacgccgtgctggtgtctgccctggtgctgatggctatggtcaagcggaaggacagccggggaagggccaagcgatctggatctggagcaacaaacttctcactactcaaacaagcaggtgacgtggaggagaatcccgggcctactagcatggccttaccagtgaccgccttgctcctgccgctggccttgctgctccacgccgccaggccgagccccgtagctcctgcctgtgaccccagactcctaaataaactgctgcgtgactcccacctccttcacagccgactgagtcagtgtcccgacgtggaccctttgtctatccctgttctgctgcctgctgtggactttagcctgggagaatggaaaacccagacggaacagagcaaggcacaggacattctaggggcagtgtcccttctactggagggagtgatggcagcacgaggacagttggaaccctcctgcctctcatccctcctgggacagctttctgggcaggttcgcctcctcttgggggccctgcagggcctcctaggaacccagcttcctctacagggcaggaccacagctcacaaggaccccaatgccctcttcttgagcttgcaacaactgcttcggggaaaggtgcgcttcctgcttctggtagaaggtcccaccctctgtgtcagacggaccctgccaaccacagctgtcccaagcagtacttctggtaccggcggaggcggatctggcggcggaggtagcggtggcggaggatctgaattcgacatccagatgacacagagccctagcagcctgtctgccagcgtgggagacagagtgaccatcacatgcaaggccagcgaccacatcaacaactggctggcctggtatcagcagaagcctggacaggcccctaagctgctgatctacggcgctaccacactggaaacaggcgtgcccagcagattttctggcagcggctctggcaccgactacaccctgacaatatccagcctccagcctgaggacttcgccacctactactgtcagcagagctggaacaccccttggacattcggccagggcaccaagctggaaatcaagagaggcggaggcggaagtggaggcggaggatctggcggcggaggctctcaagttcagcttcaacagcctggcgctgagctggtcaaacctggcgcttctgtgaagatgagctgcaaagccagcggctacgccttcagcagctactggatcaactggatgaagcagaaacccggccagggactcgaatggatcggccaaatctatcccggcgacggcgacaccaactacaacggcaagttcaagggcagagccacactgaccgccgatacctctagcagcacagcctacatgcagctgagcagcctgaccagcgaagatagcgccgtgtacttctgtgcccggtccatcacaacagtcgtgggctgcgctatggactattggggccagggaacaagcgtgaccgtgtctagtacgcgtatccagaaccctgatcctgccgtgtaccagctgcgggatagcaagagcagcgacaagagcgtgtgtctgttcaccgacttcgacagccagaccaacgtgtcccagagcaaggactccgacgtgtacatcaccgataagtgcgtgctggacatgcggagcatggacttcaagagcaactccgccgtggcctggtccaacaagtccgatttcgcctgcgccaacgccttcaacaacagcattatccccgaggacacattcttcccaagcagcgacgtgccctgcgacgtgaagctggtggaaaagagcttcgagacagacaccaacctgaacttccagaacctgagcgtgatcggcttcagaatcctgctgctgaaagtggccggctttaacctgctgatgaccctgcggctgtggtccagc

SEQ ID NO: 17462 - DNA, 2190 bp, synthetic construct
  source 1..2190: mol_type = other DNA
atggccttaccagtgaccgccttgctcctgccgctggccttgctgctccacgccgccaggccgctcgaggaggacctgaagaacgtgttcccacctgaggtggccgtgttcgagcctagcaaggccgagatcgcccacacccagaaagccaccctcgtgtgcctggctaccggcttctaccccgaccatgtggaactgtcttggtgggtcaacggcaaagaggtgcacagcggcgtgtgtaccgacccccagccactgaaagaacagcccgccctgaacgacagccggtactgcctgagcagcagactgagagtgtccgccaccttctggcagaacccccggaaccacttcagatgccaggtgcagttctacggcctgagcgagaacgacgagtggacccaggacagagccaagcccgtgacccagatcgtgtctgccgaagcctggggcagagccgattgcggcatcaccagcgccagctaccaccagggcgtgctgagcgccaccatcctgtacgagatcctgctgggcaaggccaccctgtacgccgtgctggtgtctgccctggtgctgatggctatggtcaagcggaaggacagccggggaagggccaagcgatctggatctggagcaacaaacttctcactactcaaacaagcaggtgacgtggaggagaatcccgggcctactagcatggccttaccagtgaccgccttgctcctgccgctggccttgctgctccacgccgccaggccgatgggcagctgggaagagttcgagctgagactgaacgccatcgaggaacggctgtatgccctcggaggatctgaagccgagctggcctacttcgagtacgtgatcgccgacttcgagggcaacctgcagcggtacaaaggcaagggcaaccctgaagtggaagccctgtacttcgaggccgacgccatcttcgaggaactggtggcctacagacacaacggtaccggcggaggcggatctggcggcggaggtagcggtggcggaggatctgaattcgacatccagatgacacagagccctagcagcctgtctgccagcgtgggagacagagtgaccatcacatgcaaggccagcgaccacatcaacaactggctggcctggtatcagcagaagcctggacaggcccctaagctgctgatctacggcgctaccacactggaaacaggcgtgcccagcagattttctggcagcggctctggcaccgactacaccctgacaatatccagcctccagcctgaggacttcgccacctactactgtcagcagagctggaacaccccttggacattcggccagggcaccaagctggaaatcaagagaggcggaggcggaagtggaggcggaggatctggcggcggaggctctcaagttcagcttcaacagcctggcgctgagctggtcaaacctggcgcttctgtgaagatgagctgcaaagccagcggctacgccttcagcagctactggatcaactggatgaagcagaaacccggccagggactcgaatggatcggccaaatctatcccggcgacggcgacaccaactacaacggcaagttcaagggcagagccacactgaccgccgatacctctagcagcacagcctacatgcagctgagcagcctgaccagcgaagatagcgccgtgtacttctgtgcccggtccatcacaacagtcgtgggctgcgctatggactattggggccagggaacaagcgtgaccgtgtctagtacgcgtatccagaaccctgatcctgccgtgtaccagctgcgggatagcaagagcagcgacaagagcgtgtgtctgttcaccgacttcgacagccagaccaacgtgtcccagagcaaggactccgacgtgtacatcaccgataagtgcgtgctggacatgcggagcatggacttcaagagcaactccgccgtggcctggtccaacaagtccgatttcgcctgcgccaacgccttcaacaacagcattatccccgaggacacattcttcccaagcagcgacgtgccctgcgacgtgaagctggtggaaaagagcttcgagacagacaccaacctgaacttccagaacctgagcgtgatcggcttcagaatcctgctgctgaaagtggccggctttaacctgctgatgaccctgcggctgtggtccagc

SEQ ID NO: 17463 - DNA, 2610 bp, synthetic construct
  source 1..2610: mol_type = other DNA
atggccttaccagtgaccgccttgctcctgccgctggccttgctgctccacgccgccaggccgctcgagatccagaaccctgatcctgccgtgtaccagctgcgggatagcaagagcagcgacaagagcgtgtgtctgttcaccgacttcgacagccagaccaacgtgtcccagagcaaggactccgacgtgtacatcaccgataagtgcgtgctggacatgcggagcatggacttcaagagcaactccgccgtggcctggtccaacaagtccgatttcgcctgcgccaacgccttcaacaacagcattatccccgaggacacattcttcccaagcagcgacgtgccctgcgacgtgaagctggtggaaaagagcttcgagacagacaccaacctgaacttccagaacctgagcgtgatcggcttcagaatcctgctgctgaaagtggccggctttaacctgctgatgaccctgcggctgtggtccagcagggccaagcgatctggatctggagcaacaaacttctcactactcaaacaagcaggtgacgtggaggagaatcccgggcctactagcatggccttaccagtgaccgccttgctcctgccgctggccttgctgctccacgccgccaggccggacatccagatgacacagactacatcctccctgtctgcctctctgggagacagagtcaccatcagttgcagggcaagtcaggacattagtaaatatttaaattggtatcagcagaaaccagatggaactgttaaactcctgatctaccatacatcaagattacactcaggagtcccatcaaggttcagtggcagtgggtctggaacagattattctctcaccattagcaacctggagcaagaagatattgccacttacttttgccaacagggtaatacgcttccgtacacgttcggaggggggaccaagctggagatcacaggtggcggtggctcgggcggtggtgggtcgggtggcggcggatctgaggtgaaactgcaggagtcaggacctggcctggtggcgccctcacagagcctgtccgtcacatgcactgtctcaggggtctcattacccgactatggtgtaagctggattcgccagcctccacgaaagggtctggagtggctgggagtaatatggggtagtgaaaccacatactataattcagctctcaaatccagactgaccatcatcaaggacaactccaagagccaagttttcttaaaaatgaacagtctgcaaactgatgacacagccatttactactgtgccaaacattattactacggtggtagctatgctatggactactggggtcaaggaacctcagtcaccgtctcctcaacgcgtgaggacctgaagaacgtgttcccacctgaggtggccgtgttcgagcctagcaaggccgagatcgcccacacccagaaagccaccctcgtgtgcctggctaccggcttctaccccgaccatgtggaactgtcttggtgggtcaacggcaaagaggtgcacagcggcgtgtgtaccgacccccagccactgaaagaacagcccgccctgaacgacagccggtactgcctgagcagcagactgagagtgtccgccaccttctggcagaacccccggaaccacttcagatgccaggtgcagttctacggcctgagcgagaacgacgagtggacccaggacagagccaagcccgtgacccagatcgtgtctgccgaagcctggggcagagccgattgcggcatcaccagcgccagctaccaccagggcgtgctgagcgccaccatcctgtacgagatcctgctgggcaaggccaccctgtacgccgtgctggtgtctgccctggtgctgatggctatggtcaagcggaaggacagccggggacgcgccaagagaagcggatctggcgtgaagcagaccctgaatttcgacctgctgaagctggctggcgacgtggaatccaacccaggcccttctagaggccatatgaccgagtacaagcccacggtgcgcctcgccacccgcgacgacgtccccagggccgtacgcaccctcgccgccgcgttcgccgactaccccgccacgcgccacaccgtcgatccggaccgccacatcgagcgggtcaccgagctgcaagaactcttcctcacgcgcgtcgggctcgacatcggcaaggtgtgggtcgcggacgacggcgccgcggtggcggtctggaccacgccggagagcgtcgaagcgggggcggtgttcgccgagatcggcccgcgcatggccgagttgagcggttcccggctggccgcgcagcaacagatggaaggcctcctggcgccgcaccggcccaaggagcccgcgtggttcctggccaccgtcggcgtctcgcccgaccaccagggcaagggtctgggcagcgccgtcgtgctccccggagtggaggcggccgagcgcgccggggtgcccgccttcctggagacctccgcgccccgcaacctccccttctacgagcggctcggcttcaccgtcaccgccgacgtcgaggtgcccgaaggaccgcgcacctggtgcatgacccgcaagcccggtgcctga

SEQ ID NO: 17464 - DNA, 2613 bp, synthetic construct
  source 1..2613: mol_type = other DNA
atggccttaccagtgaccgccttgctcctgccgctggccttgctgctccacgccgccaggccgctcgagatccagaaccctgatcctgccgtgtaccagctgcgggatagcaagagcagcgacaagagcgtgtgtctgttcaccgacttcgacagccagaccaacgtgtcccagagcaaggactccgacgtgtacatcaccgataagtgcgtgctggacatgcggagcatggacttcaagagcaactccgccgtggcctggtccaacaagtccgatttcgcctgcgccaacgccttcaacaacagcattatccccgaggacacattcttcccaagcagcgacgtgccctgcgacgtgaagctggtggaaaagagcttcgagacagacaccaacctgaacttccagaacctgagcgtgatcggcttcagaatcctgctgctgaaagtggccggctttaacctgctgatgaccctgcggctgtggtccagcagggccaagcgatctggatctggagcaacaaacttctcactactcaaacaagcaggtgacgtggaggagaatcccgggcctactagcaccatggccttaccagtgaccgccttgctcctgccgctggccttgctgctccacgccgccaggccggagatcgtgatgacccagagccctgccaccctgtctctgagccctggcgaaagagccaccctgagctgtagagccagccaggacatcagcaagtacctgaactggtatcagcagaagcccggccaggcccccagactgctgatctaccacaccagcagactgcacagcggcatccccgccagattttctggctctggcagcggcaccgactacaccctgacaatcagcagcctccagcccgaggacttcgccgtgtacttctgtcagcaaggcaacaccctgccctacaccttcggccagggcaccaagctggaaatcaagggcggaggcggaagtggaggcggaggatctggcggcggaggctctcaggtgcaactccaggaatctggccctggcctcgtgaagcccagcgagacactgagcctgacctgtaccgtgtccggcgtgtccctgcctgactatggcgtgtcctggatcagacagccccctggcaagggcctggaatggatcggagtgatttggggcagcgaaaccacctactacaacagctccctgaagtccagagtgaccatctccaaggacaactccaagaaccaggtgtccctgaagctgagcagcgtgacagccgccgacaccgccgtgtattactgcgccaagcactactactacggcggcagctacgctatggactactggggccagggaaccctcgtgaccgtgtctagtacgcgtgaggacctgaagaacgtgttcccacctgaggtggccgtgttcgagcctagcaaggccgagatcgcccacacccagaaagccaccctcgtgtgcctggctaccggcttctaccccgaccatgtggaactgtcttggtgggtcaacggcaaagaggtgcacagcggcgtgtgtaccgacccccagccactgaaagaacagcccgccctgaacgacagccggtactgcctgagcagcagactgagagtgtccgccaccttctggcagaacccccggaaccacttcagatgccaggtgcagttctacggcctgagcgagaacgacgagtggacccaggacagagccaagcccgtgacccagatcgtgtctgccgaagcctggggcagagccgattgcggcatcaccagcgccagctaccaccagggcgtgctgagcgccaccatcctgtacgagatcctgctgggcaaggccaccctgtacgccgtgctggtgtctgccctggtgctgatggctatggtcaagcggaaggacagccggggacgcgccaagagaagcggatctggcgtgaagcagaccctgaatttcgacctgctgaagctggctggcgacgtggaatccaacccaggcccttctagaggccatatgaccgagtacaagcccacggtgcgcctcgccacccgcgacgacgtccccagggccgtacgcaccctcgccgccgcgttcgccgactaccccgccacgcgccacaccgtcgatccggaccgccacatcgagcgggtcaccgagctgcaagaactcttcctcacgcgcgtcgggctcgacatcggcaaggtgtgggtcgcggacgacggcgccgcggtggcggtctggaccacgccggagagcgtcgaagcgggggcggtgttcgccgagatcggcccgcgcatggccgagttgagcggttcccggctggccgcgcagcaacagatggaaggcctcctggcgccgcaccggcccaaggagcccgcgtggttcctggccaccgtcggcgtctcgcccgaccaccagggcaagggtctgggcagcgccgtcgtgctccccggagtggaggcggccgagcgcgccggggtgcccgccttcctggagacctccgcgccccgcaacctccccttctacgagcggctcggcttcaccgtcaccgccgacgtcgaggtgcccgaaggaccgcgcacctggtgcatgacccgcaagcccggtgcctga

SEQ ID NO: 17465 - DNA, 2616 bp, synthetic construct
  source 1..2616: mol_type = other DNA
atggccttaccagtgaccgccttgctcctgccgctggccttgctgctccacgccgccaggccgctcgagatccagaaccctgatcctgccgtgtaccagctgcgggatagcaagagcagcgacaagagcgtgtgtctgttcaccgacttcgacagccagaccaacgtgtcccagagcaaggactccgacgtgtacatcaccgataagtgcgtgctggacatgcggagcatggacttcaagagcaactccgccgtggcctggtccaacaagtccgatttcgcctgcgccaacgccttcaacaacagcattatccccgaggacacattcttcccaagcagcgacgtgccctgcgacgtgaagctggtggaaaagagcttcgagacagacaccaacctgaacttccagaacctgagcgtgatcggcttcagaatcctgctgctgaaagtggccggctttaacctgctgatgaccctgcggctgtggtccagcagggccaagcgatctggatctggagcaacaaacttctcactactcaaacaagcaggtgacgtggaggagaatcccgggcctactagcaccatggccttaccagtgaccgccttgctcctgccgctggccttgctgctccacgccgccaggccggacgagatcgtgctgacacagagccccgccaccctgtcactgtctccaggcgaaagagccaccctgagctgtagcgccagcagcagcgtgtcctacatgcactggtatcagcagaagcccggccaggcccccagactgctgatctacgataccagcaagctggcctccggcatccccgccagattttctggcagcggctccggcaccgacttcaccctgacaatcagcagcctggaacccgaggacgtggccgtgtactactgttttcaaggcagcgtgtaccccttcaccttcggccagggcaccaagctggaaatcaagagaggtggcggtggctcgggcggtggtgggtcgggtggcggcggatctcaggtgcagctccaggaatctggccctggcctcgtgaagcctagccagaccctgagcctgacctgtaccgtgtctggcggcagcatcagcacaagcggcatgggcgtgggctggatcagacagcaccctggcaagggcctggaatggatcggccacatttggtgggacgacgacaagcggtacaaccccgccctgaagtccagagtgaccatcagcgtggacaccagcaagaaccagttcagcctgaagctgagcagcgtgacagccgccgataccgccgtgtattattgcgcccggatggaactgtggtcctactacttcgactactggggccagggaaccctcgtgaccgtgtctagtacgcgtgaggacctgaagaacgtgttcccacctgaggtggccgtgttcgagcctagcaaggccgagatcgcccacacccagaaagccaccctcgtgtgcctggctaccggcttctaccccgaccatgtggaactgtcttggtgggtcaacggcaaagaggtgcacagcggcgtgtgtaccgacccccagccactgaaagaacagcccgccctgaacgacagccggtactgcctgagcagcagactgagagtgtccgccaccttctggcagaacccccggaaccacttcagatgccaggtgcagttctacggcctgagcgagaacgacgagtggacccaggacagagccaagcccgtgacccagatcgtgtctgccgaagcctggggcagagccgattgcggcatcaccagcgccagctaccaccagggcgtgctgagcgccaccatcctgtacgagatcctgctgggcaaggccaccctgtacgccgtgctggtgtctgccctggtgctgatggctatggtcaagcggaaggacagccggggacgcgccaagagaagcggatctggcgtgaagcagaccctgaatttcgacctgctgaagctggctggcgacgtggaatccaacccaggcccttctagaggccatatgaccgagtacaagcccacggtgcgcctcgccacccgcgacgacgtccccagggccgtacgcaccctcgccgccgcgttcgccgactaccccgccacgcgccacaccgtcgatccggaccgccacatcgagcgggtcaccgagctgcaagaactcttcctcacgcgcgtcgggctcgacatcggcaaggtgtgggtcgcggacgacggcgccgcggtggcggtctggaccacgccggagagcgtcgaagcgggggcggtgttcgccgagatcggcccgcgcatggccgagttgagcggttcccggctggccgcgcagcaacagatggaaggcctcctggcgccgcaccggcccaaggagcccgcgtggttcctggccaccgtcggcgtctcgcccgaccaccagggcaagggtctgggcagcgccgtcgtgctccccggagtggaggcggccgagcgcgccggggtgcccgccttcctggagacctccgcgccccgcaacctccccttctacgagcggctcggcttcaccgtcaccgccgacgtcgaggtgcccgaaggaccgcgcacctggtgcatgacccgcaagcccggtgcctga

SEQ ID NO: 17466 - DNA, 2604 bp, synthetic construct
  source 1..2604: mol_type = other DNA
atggccttaccagtgaccgccttgctcctgccgctggccttgctgctccacgccgccaggccgctcgagatccagaaccctgatcctgccgtgtaccagctgcgggatagcaagagcagcgacaagagcgtgtgtctgttcaccgacttcgacagccagaccaacgtgtcccagagcaaggactccgacgtgtacatcaccgataagtgcgtgctggacatgcggagcatggacttcaagagcaactccgccgtggcctggtccaacaagtccgatttcgcctgcgccaacgccttcaacaacagcattatccccgaggacacattcttcccaagcagcgacgtgccctgcgacgtgaagctggtggaaaagagcttcgagacagacaccaacctgaacttccagaacctgagcgtgatcggcttcagaatcctgctgctgaaagtggccggctttaacctgctgatgaccctgcggctgtggtccagcagggccaagcgatctggatctggagcaacaaacttctcactactcaaacaagcaggtgacgtggaggagaatcccgggcctactagcatggccttaccagtgaccgccttgctcctgccgctggccttgctgctccacgccgccaggccggacatccagatgacacagagccctagcagcctgtctgccagcgtgggagacagagtgaccatcacctgtagagccagccaggacatcagcaactacctgaactggtatcagcagaagcccggcaaggcccctaagctgctgatctactacaccagcagactgcacagcggcgtgcccagcagattttctggctctggcagcggcaccgacttcaccctgacaatatctagcctccagcctgaggacttcgccacctactattgccagcagggcaacaccctgccttacacatttggacagggcaccaaggtggaaatcaagagaggcggaggcggaagtggaggcggaggatctggcggcggaggctctgaagtgcagctggttgaatcaggtggcggcctggttcaacctggcggatctctgagactgagctgtgccgccagcggcttcaccttcagcgactactttatgagctgggtccgacaggcccctggcaaaggacttgaatgggtcgccaccatcagcaatggcggcacctacacttactaccccgacagcgtgaagggcagattcaccatctccagagacaacagcaagaacaccctgtacctccagatgaactccctgagagccgaggacaccgccgtgtactactgcgccagattcgacggctacatcttcgactattggggccagggcaccctggtcacagtctcttctacgcgtgaggacctgaagaacgtgttcccacctgaggtggccgtgttcgagcctagcaaggccgagatcgcccacacccagaaagccaccctcgtgtgcctggctaccggcttctaccccgaccatgtggaactgtcttggtgggtcaacggcaaagaggtgcacagcggcgtgtgtaccgacccccagccactgaaagaacagcccgccctgaacgacagccggtactgcctgagcagcagactgagagtgtccgccaccttctggcagaacccccggaaccacttcagatgccaggtgcagttctacggcctgagcgagaacgacgagtggacccaggacagagccaagcccgtgacccagatcgtgtctgccgaagcctggggcagagccgattgcggcatcaccagcgccagctaccaccagggcgtgctgagcgccaccatcctgtacgagatcctgctgggcaaggccaccctgtacgccgtgctggtgtctgccctggtgctgatggctatggtcaagcggaaggacagccggggacgcgccaagagaagcggatctggcgtgaagcagaccctgaatttcgacctgctgaagctggctggcgacgtggaatccaacccaggcccttctagaggccatatgaccgagtacaagcccacggtgcgcctcgccacccgcgacgacgtccccagggccgtacgcaccctcgccgccgcgttcgccgactaccccgccacgcgccacaccgtcgatccggaccgccacatcgagcgggtcaccgagctgcaagaactcttcctcacgcgcgtcgggctcgacatcggcaaggtgtgggtcgcggacgacggcgccgcggtggcggtctggaccacgccggagagcgtcgaagcgggggcggtgttcgccgagatcggcccgcgcatggccgagttgagcggttcccggctggccgcgcagcaacagatggaaggcctcctggcgccgcaccggcccaaggagcccgcgtggttcctggccaccgtcggcgtctcgcccgaccaccagggcaagggtctgggcagcgccgtcgtgctccccggagtggaggcggccgagcgcgccggggtgcccgccttcctggagacctccgcgccccgcaacctccccttctacgagcggctcggcttcaccgtcaccgccgacgtcgaggtgcccgaaggaccgcgcacctggtgcatgacccgcaagcccggtgcctga

SEQ ID NO: 17467 - DNA, 2616 bp, synthetic construct
  source 1..2616: mol_type = other DNA
atggccttaccagtgaccgccttgctcctgccgctggccttgctgctccacgccgccaggccgctcgagatccagaaccctgatcctgccgtgtaccagctgcgggatagcaagagcagcgacaagagcgtgtgtctgttcaccgacttcgacagccagaccaacgtgtcccagagcaaggactccgacgtgtacatcaccgataagtgcgtgctggacatgcggagcatggacttcaagagcaactccgccgtggcctggtccaacaagtccgatttcgcctgcgccaacgccttcaacaacagcattatccccgaggacacattcttcccaagcagcgacgtgccctgcgacgtgaagctggtggaaaagagcttcgagacagacaccaacctgaacttccagaacctgagcgtgatcggcttcagaatcctgctgctgaaagtggccggctttaacctgctgatgaccctgcggctgtggtccagcagggccaagcgatctggatctggagcaacaaacttctcactactcaaacaagcaggtgacgtggaggagaatcccgggcctactagcatggccttaccagtgaccgccttgctcctgccgctggccttgctgctccacgccgccaggccggacatccagatgacacagagccctagcagcctgtctgccagcgtgggagacagagtgaccatcacatgcaaggccagcgaccacatcaacaactggctggcctggtatcagcagaagcctggacaggcccctaagctgctgatctacggcgctaccacactggaaacaggcgtgcccagcagattttctggcagcggctctggcaccgactacaccctgacaatatccagcctccagcctgaggacttcgccacctactactgtcagcagagctggaacaccccttggacattcggccagggcaccaagctggaaatcaagagaggcggaggcggaagtggaggcggaggatctggcggcggaggctctcaagttcagcttcaacagcctggcgctgagctggtcaaacctggcgcttctgtgaagatgagctgcaaagccagcggctacgccttcagcagctactggatcaactggatgaagcagaaacccggccagggactcgaatggatcggccaaatctatcccggcgacggcgacaccaactacaacggcaagttcaagggcagagccacactgaccgccgatacctctagcagcacagcctacatgcagctgagcagcctgaccagcgaagatagcgccgtgtacttctgtgcccggtccatcacaacagtcgtgggctgcgctatggactattggggccagggaacaagcgtgaccgtgtctagtacgcgtgaggacctgaagaacgtgttcccacctgaggtggccgtgttcgagcctagcaaggccgagatcgcccacacccagaaagccaccctcgtgtgcctggctaccggcttctaccccgaccatgtggaactgtcttggtgggtcaacggcaaagaggtgcacagcggcgtgtgtaccgacccccagccactgaaagaacagcccgccctgaacgacagccggtactgcctgagcagcagactgagagtgtccgccaccttctggcagaacccccggaaccacttcagatgccaggtgcagttctacggcctgagcgagaacgacgagtggacccaggacagagccaagcccgtgacccagatcgtgtctgccgaagcctggggcagagccgattgcggcatcaccagcgccagctaccaccagggcgtgctgagcgccaccatcctgtacgagatcctgctgggcaaggccaccctgtacgccgtgctggtgtctgccctggtgctgatggctatggtcaagcggaaggacagccggggacgcgccaagagaagcggatctggcgtgaagcagaccctgaatttcgacctgctgaagctggctggcgacgtggaatccaacccaggcccttctagaggccatatgaccgagtacaagcccacggtgcgcctcgccacccgcgacgacgtccccagggccgtacgcaccctcgccgccgcgttcgccgactaccccgccacgcgccacaccgtcgatccggaccgccacatcgagcgggtcaccgagctgcaagaactcttcctcacgcgcgtcgggctcgacatcggcaaggtgtgggtcgcggacgacggcgccgcggtggcggtctggaccacgccggagagcgtcgaagcgggggcggtgttcgccgagatcggcccgcgcatggccgagttgagcggttcccggctggccgcgcagcaacagatggaaggcctcctggcgccgcaccggcccaaggagcccgcgtggttcctggccaccgtcggcgtctcgcccgaccaccagggcaagggtctgggcagcgccgtcgtgctccccggagtggaggcggccgagcgcgccggggtgcccgccttcctggagacctccgcgccccgcaacctccccttctacgagcggctcggcttcaccgtcaccgccgacgtcgaggtgcccgaaggaccgcgcacctggtgcatgacccgcaagcccggtgcctga

SEQ ID NO: 17468 - DNA, 2622 bp, synthetic construct
  source 1..2622: mol_type = other DNA
atggccttaccagtgaccgccttgctcctgccgctggccttgctgctccacgccgccaggccgctcgagatccagaaccctgatcctgccgtgtaccagctgcgggatagcaagagcagcgacaagagcgtgtgtctgttcaccgacttcgacagccagaccaacgtgtcccagagcaaggactccgacgtgtacatcaccgataagtgcgtgctggacatgcggagcatggacttcaagagcaactccgccgtggcctggtccaacaagtccgatttcgcctgcgccaacgccttcaacaacagcattatccccgaggacacattcttcccaagcagcgacgtgccctgcgacgtgaagctggtggaaaagagcttcgagacagacaccaacctgaacttccagaacctgagcgtgatcggcttcagaatcctgctgctgaaagtggccggctttaacctgctgatgaccctgcggctgtggtccagcagggccaagcgatctggatctggagcaacaaacttctcactactcaaacaagcaggtgacgtggaggagaatcccgggcctactagcatggccttaccagtgaccgccttgctcctgccgctggccttgctgctccacgccgccaggccgcagatcgtgctgtctcagtctcctgccatcctgagcgcttccccaggcgagaaagtgaccatgacctgtagagccagcagcagcgtgtcctacatgcactggtatcagcagaagcccggcagcagccctaagccttggatctacgccaccagcaatctggcctctggcgtgccagccagattttctggctctggcagcggcaccagctacagcttcacaatcagcagagtggaagccgaggacgccgccacctactattgtcagcagtggaccttcaatcctcctaccttcggcggaggcacccggctggaaatcaaaagaacagtggctgctggcggaggcggaagtggaggcggaggatctggcggcggaggctctcaggcttatctgcaacagagcggagccgaactcgtcagacctggcgcttctgtgaagatgagctgcaaggccagcggctacaccttcaccagctataatatgcactgggtcaagcagacccctcggcagggactcgaatggatcggcggaatctatcccggcaacggcgacacctcctacaaccagaagttcaagggcaaagccacactgaccgtgggcaagagcagcagcaccgcctatatgcagctcagcagcctgaccagcgaggacagcgccgtgtacttctgcgccagatacgactacaactacgctatggactactggggccagggcaccagcgtgacagttagctctgccagcacgcgtgaggacctgaagaacgtgttcccacctgaggtggccgtgttcgagcctagcaaggccgagatcgcccacacccagaaagccaccctcgtgtgcctggctaccggcttctaccccgaccatgtggaactgtcttggtgggtcaacggcaaagaggtgcacagcggcgtgtgtaccgacccccagccactgaaagaacagcccgccctgaacgacagccggtactgcctgagcagcagactgagagtgtccgccaccttctggcagaacccccggaaccacttcagatgccaggtgcagttctacggcctgagcgagaacgacgagtggacccaggacagagccaagcccgtgacccagatcgtgtctgccgaagcctggggcagagccgattgcggcatcaccagcgccagctaccaccagggcgtgctgagcgccaccatcctgtacgagatcctgctgggcaaggccaccctgtacgccgtgctggtgtctgccctggtgctgatggctatggtcaagcggaaggacagccggggacgcgccaagagaagcggatctggcgtgaagcagaccctgaatttcgacctgctgaagctggctggcgacgtggaatccaacccaggcccttctagaggccatatgaccgagtacaagcccacggtgcgcctcgccacccgcgacgacgtccccagggccgtacgcaccctcgccgccgcgttcgccgactaccccgccacgcgccacaccgtcgatccggaccgccacatcgagcgggtcaccgagctgcaagaactcttcctcacgcgcgtcgggctcgacatcggcaaggtgtgggtcgcggacgacggcgccgcggtggcggtctggaccacgccggagagcgtcgaagcgggggcggtgttcgccgagatcggcccgcgcatggccgagttgagcggttcccggctggccgcgcagcaacagatggaaggcctcctggcgccgcaccggcccaaggagcccgcgtggttcctggccaccgtcggcgtctcgcccgaccaccagggcaagggtctgggcagcgccgtcgtgctccccggagtggaggcggccgagcgcgccggggtgcccgccttcctggagacctccgcgccccgcaacctccccttctacgagcggctcggcttcaccgtcaccgccgacgtcgaggtgcccgaaggaccgcgcacctggtgcatgacccgcaagcccggtgcctga

SEQ ID NO: 17469 - DNA, 2616 bp, synthetic construct
  source 1..2616: mol_type = other DNA
atggccttaccagtgaccgccttgctcctgccgctggccttgctgctccacgccgccaggccgctcgagatccagaaccctgatcctgccgtgtaccagctgcgggatagcaagagcagcgacaagagcgtgtgtctgttcaccgacttcgacagccagaccaacgtgtcccagagcaaggactccgacgtgtacatcaccgataagtgcgtgctggacatgcggagcatggacttcaagagcaactccgccgtggcctggtccaacaagtccgatttcgcctgcgccaacgccttcaacaacagcattatccccgaggacacattcttcccaagcagcgacgtgccctgcgacgtgaagctggtggaaaagagcttcgagacagacaccaacctgaacttccagaacctgagcgtgatcggcttcagaatcctgctgctgaaagtggccggctttaacctgctgatgaccctgcggctgtggtccagcagggccaagcgatctggatctggagcaacaaacttctcactactcaaacaagcaggtgacgtggaggagaatcccgggcctactagcatggccttaccagtgaccgccttgctcctgccgctggccttgctgctccacgccgccaggccggagatcgtgctgacacagagccctgccaccctgtctctgagccctggcgaaagagccaccctgagctgtagagccagccagagcgtgtccagctacctggcctggtatcagcagaagcccggccaggctccccggctgctgatctacgatgccagcaatagagccaccggcatccccgccagattttccggctctggcagcggcaccgacttcaccctgaccatcagctccctggaacccgaggacttcgccgtgtactactgccagcagcggagcaactggcccatcacattcggccagggcacccggctggaaatcaaaggcggaggcggaagtggaggcggaggatctggcggcggaggctctgaggtgcagcttgttgagtctggcggaggactggtgcagcccgatagaagcctgagactgtcttgtgccgccagcggcttcaccttccacgattatgccatgcactgggtccgacaggcccctggcaaaggacttgaatgggtgtccaccatctcttggaacagcggcacaatcggctacgccgactctgtgaagggcagattcaccatcagccgggacaacgccaagaacagcctgtacctccagatgaactccctgagagccgaggacacagccctgtactactgcgccaaggacatccagtacggcaactactactacggcatggacgtgtggggccagggcacaacagtgacagtctcttctacgcgtgaggacctgaagaacgtgttcccacctgaggtggccgtgttcgagcctagcaaggccgagatcgcccacacccagaaagccaccctcgtgtgcctggctaccggcttctaccccgaccatgtggaactgtcttggtgggtcaacggcaaagaggtgcacagcggcgtgtgtaccgacccccagccactgaaagaacagcccgccctgaacgacagccggtactgcctgagcagcagactgagagtgtccgccaccttctggcagaacccccggaaccacttcagatgccaggtgcagttctacggcctgagcgagaacgacgagtggacccaggacagagccaagcccgtgacccagatcgtgtctgccgaagcctggggcagagccgattgcggcatcaccagcgccagctaccaccagggcgtgctgagcgccaccatcctgtacgagatcctgctgggcaaggccaccctgtacgccgtgctggtgtctgccctggtgctgatggctatggtcaagcggaaggacagccggggacgcgccaagagaagcggatctggcgtgaagcagaccctgaatttcgacctgctgaagctggctggcgacgtggaatccaacccaggcccttctagaggccatatgaccgagtacaagcccacggtgcgcctcgccacccgcgacgacgtccccagggccgtacgcaccctcgccgccgcgttcgccgactaccccgccacgcgccacaccgtcgatccggaccgccacatcgagcgggtcaccgagctgcaagaactcttcctcacgcgcgtcgggctcgacatcggcaaggtgtgggtcgcggacgacggcgccgcggtggcggtctggaccacgccggagagcgtcgaagcgggggcggtgttcgccgagatcggcccgcgcatggccgagttgagcggttcccggctggccgcgcagcaacagatggaaggcctcctggcgccgcaccggcccaaggagcccgcgtggttcctggccaccgtcggcgtctcgcccgaccaccagggcaagggtctgggcagcgccgtcgtgctccccggagtggaggcggccgagcgcgccggggtgcccgccttcctggagacctccgcgccccgcaacctccccttctacgagcggctcggcttcaccgtcaccgccgacgtcgaggtgcccgaaggaccgcgcacctggtgcatgacccgcaagcccggtgcctga

SEQ ID NO: 17470 - DNA, 2610 bp, synthetic construct
  source 1..2610: mol_type = other DNA
atggccttaccagtgaccgccttgctcctgccgctggccttgctgctccacgccgccaggccgctcgagatccagaaccctgatcctgccgtgtaccagctgcgggatagcaagagcagcgacaagagcgtgtgtctgttcaccgacttcgacagccagaccaacgtgtcccagagcaaggactccgacgtgtacatcaccgataagtgcgtgctggacatgcggagcatggacttcaagagcaactccgccgtggcctggtccaacaagtccgatttcgcctgcgccaacgccttcaacaacagcattatccccgaggacacattcttcccaagcagcgacgtgccctgcgacgtgaagctggtggaaaagagcttcgagacagacaccaacctgaacttccagaacctgagcgtgatcggcttcagaatcctgctgctgaaagtggccggctttaacctgctgatgaccctgcggctgtggtccagcagggccaagcgatctggatctggagcaacaaacttctcactactcaaacaagcaggtgacgtggaggagaatcccgggcctactagcatggccttaccagtgaccgccttgctcctgccgctggccttgctgctccacgccgccaggccggacatccagatgacccagagccccagcagcctgtctgccagcgtgggcgacagagtgaccatcacctgtagagccagccaggacgtgaacaccgccgtggcctggtatcagcagaagcctggcaaggcccccaagctgctgatctacagcgccagcttcctggaaagcggcgtgcccagcagattcagcggaagcagaagcggcaccgacttcaccctgaccatcagctccctccagcccgaggacttcgccacctactactgccagcagcactacaccacccctcccaccttcggccagaccaaggtggaaatcaagagaggcggaggcggaagtggaggcggaggatctggcggcggaggctctgaagtgcaactggtggaatctggcggcggactggtgcagcctggcggatctctgagactgagctgtgccgccagcggcttcaacatcaaggacacctacatccactgggtgcgccaggcccctggaaagggactggaatgggtggcccggatctaccccaccaacggctacaccagatacgccgacagcgtgaagggccggttcaccatcagcgccgacaccagcaagaataccgcctacctccagatgaacagcctgcgggccgaggataccgccgtgtactactgctcaagatggggaggcgacggcttctacgctatggacgtgtggggccagggcacccttgtgaccgtgtcatctacgcgtgaggacctgaagaacgtgttcccacctgaggtggccgtgttcgagcctagcaaggccgagatcgcccacacccagaaagccaccctcgtgtgcctggctaccggcttctaccccgaccatgtggaactgtcttggtgggtcaacggcaaagaggtgcacagcggcgtgtgtaccgacccccagccactgaaagaacagcccgccctgaacgacagccggtactgcctgagcagcagactgagagtgtccgccaccttctggcagaacccccggaaccacttcagatgccaggtgcagttctacggcctgagcgagaacgacgagtggacccaggacagagccaagcccgtgacccagatcgtgtctgccgaagcctggggcagagccgattgcggcatcaccagcgccagctaccaccagggcgtgctgagcgccaccatcctgtacgagatcctgctgggcaaggccaccctgtacgccgtgctggtgtctgccctggtgctgatggctatggtcaagcggaaggacagccggggacgcgccaagagaagcggatctggcgtgaagcagaccctgaatttcgacctgctgaagctggctggcgacgtggaatccaacccaggcccttctagaggccatatgaccgagtacaagcccacggtgcgcctcgccacccgcgacgacgtccccagggccgtacgcaccctcgccgccgcgttcgccgactaccccgccacgcgccacaccgtcgatccggaccgccacatcgagcgggtcaccgagctgcaagaactcttcctcacgcgcgtcgggctcgacatcggcaaggtgtgggtcgcggacgacggcgccgcggtggcggtctggaccacgccggagagcgtcgaagcgggggcggtgttcgccgagatcggcccgcgcatggccgagttgagcggttcccggctggccgcgcagcaacagatggaaggcctcctggcgccgcaccggcccaaggagcccgcgtggttcctggccaccgtcggcgtctcgcccgaccaccagggcaagggtctgggcagcgccgtcgtgctccccggagtggaggcggccgagcgcgccggggtgcccgccttcctggagacctccgcgccccgcaacctccccttctacgagcggctcggcttcaccgtcaccgccgacgtcgaggtgcccgaaggaccgcgcacctggtgcatgacccgcaagcccggtgcctga

SEQ ID NO: 17471 - DNA, 2247 bp, synthetic construct
  source 1..2247: mol_type = other DNA
atggccttaccagtgaccgccttgctcctgccgctggccttgctgctccacgccgccaggccgctcgagatccagaaccctgatcctgccgtgtaccagctgcgggatagcaagagcagcgacaagagcgtgtgtctgttcaccgacttcgacagccagaccaacgtgtcccagagcaaggactccgacgtgtacatcaccgataagtgcgtgctggacatgcggagcatggacttcaagagcaactccgccgtggcctggtccaacaagtccgatttcgcctgcgccaacgccttcaacaacagcattatccccgaggacacattcttcccaagcagcgacgtgccctgcgacgtgaagctggtggaaaagagcttcgagacagacaccaacctgaacttccagaacctgagcgtgatcggcttcagaatcctgctgctgaaagtggccggctttaacctgctgatgaccctgcggctgtggtccagcagggccaagcgatctggatctggagcaacaaacttctcactactcaaacaagcaggtgacgtggaggagaatcccgggcctactagcatggccctgcccgtgacagccctgctgctgcctctggctctgctgctgcacgccgccagacccgatgaattcgaggtgcaactggtggaaagcggcggaggcctggtgcaggctggcggatctctgagactgagctgtgccgccagcggcatcaccttcagcatcaacacaatgggctggtacagacaggcccctggcaagcagagggaactggtggccctgatctccagcatcggcgacacctactacgccgacagcgtgaagggccggttcaccatcagccgggacaacgccaagaacaccgtgtacctccagatgaacagcctgaagcccgaggacaccgccgtgtactactgcaagcggttcagaacagccgcccagggcaccgattattggggccagggaacacaagtgaccgtgtcctctacgcgtgaggacctgaagaacgtgttcccacctgaggtggccgtgttcgagcctagcaaggccgagatcgcccacacccagaaagccaccctcgtgtgcctggctaccggcttctaccccgaccatgtggaactgtcttggtgggtcaacggcaaagaggtgcacagcggcgtgtgtaccgacccccagccactgaaagaacagcccgccctgaacgacagccggtactgcctgagcagcagactgagagtgtccgccaccttctggcagaacccccggaaccacttcagatgccaggtgcagttctacggcctgagcgagaacgacgagtggacccaggacagagccaagcccgtgacccagatcgtgtctgccgaagcctggggcagagccgattgcggcatcaccagcgccagctaccaccagggcgtgctgagcgccaccatcctgtacgagatcctgctgggcaaggccaccctgtacgccgtgctggtgtctgccctggtgctgatggctatggtcaagcggaaggacagccggggacgcgccaagagaagcggatctggcgtgaagcagaccctgaatttcgacctgctgaagctggctggcgacgtggaatccaacccaggcccttctagaggccatatgaccgagtacaagcccacggtgcgcctcgccacccgcgacgacgtccccagggccgtacgcaccctcgccgccgcgttcgccgactaccccgccacgcgccacaccgtcgatccggaccgccacatcgagcgggtcaccgagctgcaagaactcttcctcacgcgcgtcgggctcgacatcggcaaggtgtgggtcgcggacgacggcgccgcggtggcggtctggaccacgccggagagcgtcgaagcgggggcggtgttcgccgagatcggcccgcgcatggccgagttgagcggttcccggctggccgcgcagcaacagatggaaggcctcctggcgccgcaccggcccaaggagcccgcgtggttcctggccaccgtcggcgtctcgcccgaccaccagggcaagggtctgggcagcgccgtcgtgctccccggagtggaggcggccgagcgcgccggggtgcccgccttcctggagacctccgcgccccgcaacctccccttctacgagcggctcggcttcaccgtcaccgccgacgtcgaggtgcccgaaggaccgcgcacctggtgcatgacccgcaagcccggtgcctga

SEQ ID NO: 17472 - DNA, 2247 bp, synthetic construct; identical to SEQ ID NO: 17471
  source 1..2247: mol_type = other DNA

SEQ ID NO: 17473 - DNA, 3042 bp, synthetic construct
  source 1..3042: mol_type = other DNA
atggccttaccagtgaccgccttgctcctgccgctggccttgctgctccacgccgccaggccgctcgagatccagaaccctgatcctgccgtgtaccagctgcgggatagcaagagcagcgacaagagcgtgtgtctgttcaccgacttcgacagccagaccaacgtgtcccagagcaaggactccgacgtgtacatcaccgataagtgcgtgctggacatgcggagcatggacttcaagagcaactccgccgtggcctggtccaacaagtccgatttcgcctgcgccaacgccttcaacaacagcattatccccgaggacacattcttcccaagcagcgacgtgccctgcgacgtgaagctggtggaaaagagcttcgagacagacaccaacctgaacttccagaacctgagcgtgatcggcttcagaatcctgctgctgaaagtggccggctttaacctgctgatgaccctgcggctgtggtccagcagggccaagcgatctggatctggagcaacaaacttctcactactcaaacaagcaggtgacgtggaggagaatcccgggcctactagcatggccttaccagtgaccgccttgctcctgccgctggccttgctgctccacgccgccaggccgcaggtccagctcgtcgagtccggcggcggcctcgtccaggccggcgactccgtcaccctctcctgcaccgcctccggccgcaccttctcctcctacgccctcgcctggttccgccagcgccccggcaaggagcgcgagttcgtcgccggcctccgctggggcggccccaccaactacgccgactccgtcaaggaccgcttcaccatctccggcgactccgccaagcacaccatgtacctccagatgaactccctcaagcccgaggacaccgccgtctactactgcggctacaaccccggcggctgggccgtcccctcccagtacgagtacgactcctggggccagggcacccaggtcaccgtctcctccggtaccggcggaggcggatctggcggcggaggtagcggtggcggaggatctgaattcgacatccagatgacacagagccctagcagcctgtctgccagcgtgggagacagagtgaccatcacatgcaaggccagcgaccacatcaacaactggctggcctggtatcagcagaagcctggacaggcccctaagctgctgatctacggcgctaccacactggaaacaggcgtgcccagcagattttctggcagcggctctggcaccgactacaccctgacaatatccagcctccagcctgaggacttcgccacctactactgtcagcagagctggaacaccccttggacattcggccagggcaccaagctggaaatcaagagaggcggaggcggaagtggaggcggaggatctggcggcggaggctctcaagttcagcttcaacagcctggcgctgagctggtcaaacctggcgcttctgtgaagatgagctgcaaagccagcggctacgccttcagcagctactggatcaactggatgaagcagaaacccggccagggactcgaatggatcggccaaatctatcccggcgacggcgacaccaactacaacggcaagttcaagggcagagccacactgaccgccgatacctctagcagcacagcctacatgcagctgagcagcctgaccagcgaagatagcgccgtgtacttctgtgcccggtccatcacaacagtcgtgggctgcgctatggactattggggccagggaacaagcgtgaccgtgtctagtacgcgtgaggacctgaagaacgtgttcccacctgaggtggccgtgttcgagcctagcaaggccgagatcgcccacacccagaaagccaccctcgtgtgcctggctaccggcttctaccccgaccatgtggaactgtcttggtgggtcaacggcaaagaggtgcacagcggcgtgtgtaccgacccccagccactgaaagaacagcccgccctgaacgacagccggtactgcctgagcagcagactgagagtgtccgccaccttctggcagaacccccggaaccacttcagatgccaggtgcagttctacggcctgagcgagaacgacgagtggacccaggacagagccaagcccgtgacccagatcgtgtctgccgaagcctggggcagagccgattgcggcatcaccagcgccagctaccaccagggcgtgctgagcgccaccatcctgtacgagatcctgctgggcaaggccaccctgtacgccgtgctggtgtctgccctggtgctgatggctatggtcaagcggaaggacagccggggacgcgccaagagaagcggatctggcgtgaagcagaccctgaatttcgacctgctgaagctggctggcgacgtggaatccaacccaggcccttctagaggccatatgaccgagtacaagcccacggtgcgcctcgccacccgcgacgacgtccccagggccgtacgcaccctcgccgccgcgttcgccgactaccccgccacgcgccacaccgtcgatccggaccgccacatcgagcgggtcaccgagctgcaagaactcttcctcacgcgcgtcgggctcgacatcggcaaggtgtgggtcgcggacgacggcgccgcggtggcggtctggaccacgccggagagcgtcgaagcgggggcggtgttcgccgagatcggcccgcgcatggccgagttgagcggttcccggctggccgcgcagcaacagatggaaggcctcctggcgccgcaccggcccaaggagcccgcgtggttcctggccaccgtcggcgtctcgcccgaccaccagggcaagggtctgggcagcgccgtcgtgctccccggagtggaggcggccgagcgcgccggggtgcccgccttcctggagacctccgcgccccgcaacctccccttctacgagcggctcggcttcaccgtcaccgccgacgtcgaggtgcccgaaggaccgcgcacctggtgcatgacccgcaagcccggtgcctga

SEQ ID NO: 17474 - DNA, 3429 bp, synthetic construct
  source 1..3429: mol_type = other DNA
atggccttaccagtgaccgccttgctcctgccgctggccttgctgctccacgccgccaggccgctcgagatccagaaccctgatcctgccgtgtaccagctgcgggatagcaagagcagcgacaagagcgtgtgtctgttcaccgacttcgacagccagaccaacgtgtcccagagcaaggactccgacgtgtacatcaccgataagtgcgtgctggacatgcggagcatggacttcaagagcaactccgccgtggcctggtccaacaagtccgatttcgcctgcgccaacgccttcaacaacagcattatccccgaggacacattcttcccaagcagcgacgtgccctgcgacgtgaagctggtggaaaagagcttcgagacagacaccaacctgaacttccagaacctgagcgtgatcggcttcagaatcctgctgctgaaagtggccggctttaacctgctgatgaccctgcggctgtggtccagcagggccaagcgatctggatctggagcaacaaacttctcactactcaaacaagcaggtgacgtggaggagaatcccgggcctactagcatggccttaccagtgaccgccttgctcctgccgctggccttgctgctccacgccgccaggccggaggttcagctgcttgagtctggcggaggactggttcaacctggcggaagcctgagactgtcttgtgccgccagcggcttcacctttagcagctacgccatgagctgggtccgacaggctcctggcaaaggactggaatgggtgtccagcatcagcggcagcggcgactacatctactacgccgatagcgtgaagggcagattcaccatcagccgggacatcagcaagaacaccctgtacctccagatgaacagcctgagagccgaggacaccgccgtgtactactgtgccaaagaaggcaccggcgctaacagcagcctggccgattatagaggccagggcacactggtcaccgtgtctagtggcggaggaagcggcggaggatctcaggtccagctcgtcgagtccggcggcggcctcgtccaggccggcgactccgtcaccctctcctgcaccgcctccggccgcaccttctcctcctacgccctcgcctggttccgccagcgccccggcaaggagcgcgagttcgtcgccggcctccgctggggcggccccaccaactacgccgactccgtcaaggaccgcttcaccatctccggcgactccgccaagcacaccatgtacctccagatgaactccctcaagcccgaggacaccgccgtctactactgcggctacaaccccggcggctgggccgtcccctcccagtacgagtacgactcctggggccagggcacccaggtcaccgtctcctccggtaccggcggaggcggatctggcggcggaggtagcggtggcggaggatctgaattcgacatccagatgacacagagccctagcagcctgtctgccagcgtgggagacagagtgaccatcacatgcaaggccagcgaccacatcaacaactggctggcctggtatcagcagaagcctggacaggcccctaagctgctgatctacggcgctaccacactggaaacaggcgtgcccagcagattttctggcagcggctctggcaccgactacaccctgacaatatccagcctccagcctgaggacttcgccacctactactgtcagcagagctggaacaccccttggacattcggccagggcaccaagctggaaatcaagagaggcggaggcggaagtggaggcggaggatctggcggcggaggctctcaagttcagcttcaacagcctggcgctgagctggtcaaacctggcgcttctgtgaagatgagctgcaaagccagcggctacgccttcagcagctactggatcaactggatgaagcagaaacccggccagggactcgaatggatcggccaaatctatcccggcgacggcgacaccaactacaacggcaagttcaagggcagagccacactgaccgccgatacctctagcagcacagcctacatgcagctgagcagcctgaccagcgaagatagcgccgtgtacttctgtgcccggtccatcacaacagtcgtgggctgcgctatggactattggggccagggaacaagcgtgaccgtgtctagtacgcgtgaggacctgaagaacgtgttcccacctgaggtggccgtgttcgagcctagcaaggccgagatcgcccacacccagaaagccaccctcgtgtgcctggctaccggcttctaccccgaccatgtggaactgtcttggtgggtcaacggcaaagaggtgcacagcggcgtgtgtaccgacccccagccactgaaagaacagcccgccctgaacgacagccggtactgcctgagcagcagactgagagtgtccgccaccttctggcagaacccccggaaccacttcagatgccaggtgcagttctacggcctgagcgagaacgacgagtggacccaggacagagccaagcccgtgacccagatcgtgtctgccgaagcctggggcagagccgattgcggcatcaccagcgccagctaccaccagggcgtgctgagcgccaccatcctgtacgagatcctgctgggcaaggccaccctgtacgccgtgctggtgtctgccctggtgctgatggctatggtcaagcggaaggacagccggggacgcgccaagagaagcggatctggcgtgaagcagaccctgaatttcgacctgctgaagctggctggcgacgtggaatccaacccaggcccttctagaggccatatgaccgagtacaagcccacggtgcgcctcgccacccgcgacgacgtccccagggccgtacgcaccctcgccgccgcgttcgccgactaccccgccacgcgccacaccgtcgatccggaccgccacatcgagcgggtcaccgagctgcaagaactcttcctcacgcgcgtcgggctcgacatcggcaaggtgtgggtcgcggacgacggcgccgcggtggcggtctggaccacgccggagagcgtcgaagcgggggcggtgttcgccgagatcggcccgcgcatggccgagttgagcggttcccggctggccgcgcagcaacagatggaaggcctcctggcgccgcaccggcccaaggagcccgcgtggttcctggccaccgtcggcgtctcgcccgaccaccagggcaagggtctgggcagcgccgtcgtgctccccggagtggaggcggccgagcgcgccggggtgcccgccttcctggagacctccgcgccccgcaacctccccttctacgagcggctcggcttcaccgtcaccgccgacgtcgaggtgcccgaaggaccgcgcacctggtgcatgacccgcaagcccggtgcctga

SEQ ID NO: 17475 - DNA, 3423 bp, synthetic construct
  source 1..3423: mol_type = other DNA
atggccttaccagtgaccgccttgctcctgccgctggccttgctgctccacgccgccaggccgctcgagatccagaaccctgatcctgccgtgtaccagctgcgggatagcaagagcagcgacaagagcgtgtgtctgttcaccgacttcgacagccagaccaacgtgtcccagagcaaggactccgacgtgtacatcaccgataagtgcgtgctggacatgcggagcatggacttcaagagcaactccgccgtggcctggtccaacaagtccgatttcgcctgcgccaacgccttcaacaacagcattatccccgaggacacattcttcccaagcagcgacgtgccctgcgacgtgaagctggtggaaaagagcttcgagacagacaccaacctgaacttccagaacctgagcgtgatcggcttcagaatcctgctgctgaaagtggccggctttaacctgctgatgaccctgcggctgtggtccagcagggccaagcgatctggatctggagcaacaaacttctcactactcaaacaagcaggtgacgtggaggagaatcccgggcctactagcatggccttaccagtgaccgccttgctcctgccgctggccttgctgctccacgccgccaggccgggcgtgacacagagccccacacacctgattaagaccagaggccagcaggccacactgagatgcagccctatcagcggccacaccagcgtgtactggtatcagcaggctctcggactgggcctccagttcctgctttggtacgacgagggcgaagagagaaaccggggcaacttccctcctcggttttccggcagacagttccccaactacagcagcgagctgaacgtgaacgccctggaactggaagatagcgccctgtacctgtgtgcctcttctcttggtggacctcgcggactggctggactgagaggggatgagcagtttttcggccctggcaccagactgaccgtgctggaaggcggaggaagcggcggaggatctcaggtccagctcgtcgagtccggcggcggcctcgtccaggccggcgactccgtcaccctctcctgcaccgcctccggccgcaccttctcctcctacgccctcgcctggttccgccagcgccccggcaaggagcgcgagttcgtcgccggcctccgctggggcggccccaccaactacgccgactccgtcaaggaccgcttcaccatctccggcgactccgccaagcacaccatgtacctccagatgaactccctcaagcccgaggacaccgccgtctactactgcggctacaaccccggcggctgggccgtcccctcccagtacgagtacgactcctggggccagggcacccaggtcaccgtctcctccggtaccggcggaggcggatctggcggcggaggtagcggtggcggaggatctgaattcgacatccagatgacacagagccctagcagcctgtctgccagcgtgggagacagagtgaccatcacatgcaaggccagcgaccacatcaacaactggctggcctggtatcagcagaagcctggacaggcccctaagctgctgatctacggcgctaccacactggaaacaggcgtgcccagcagattttctggcagcggctctggcaccgactacaccctgacaatatccagcctccagcctgaggacttcgccacctactactgtcagcagagctggaacaccccttggacattcggccagggcaccaagctggaaatcaagagaggcggaggcggaagtggaggcggaggatctggcggcggaggctctcaagttcagcttcaacagcctggcgctgagctggtcaaacctggcgcttctgtgaagatgagctgcaaagccagcggctacgccttcagcagctactggatcaactggatgaagcagaaacccggccagggactcgaatggatcggccaaatctatcccggcgacggcgacaccaactacaacggcaagttcaagggcagagccacactgaccgccgatacctctagcagcacagcctacatgcagctgagcagcctgaccagcgaagatagcgccgtgtacttctgtgcccggtccatcacaacagtcgtgggctgcgctatggactattggggccagggaacaagcgtgaccgtgtctagtacgcgtgaggacctgaagaacgtgttcccacctgaggtggccgtgttcgagcctagcaaggccgagatcgcccacacccagaaagccaccctcgtgtgcctggctaccggcttctaccccgaccatgtggaactgtcttggtgggtcaacggcaaagaggtgcacagcggcgtgtgtaccgacccccagccactgaaagaacagcccgccctgaacgacagccggtactgcctgagcagcagactgagagtgtccgccaccttctggcagaacccccggaaccacttcagatgccaggtgcagttctacggcctgagcgagaacgacgagtggacccaggacagagccaagcccgtgacccagatcgtgtctgccgaagcctggggcagagccgattgcggcatcaccagcgccagctaccaccagggcgtgctgagcgccaccatcctgtacgagatcctgctgggcaaggccaccctgtacgccgtgctggtgtctgccctggtgctgatggctatggtcaagcggaaggacagccggggacgcgccaagagaagcggatctggcgtgaagcagaccctgaatttcgacctgctgaagctggctggcgacgtggaatccaacccaggcccttctagaggccatatgaccgagtacaagcccacggtgcgcctcgccacccgcgacgacgtccccagggccgtacgcaccctcgccgccgcgttcgccgactaccccgccacgcgccacaccgtcgatccggaccgccacatcgagcgggtcaccgagctgcaagaactcttcctcacgcgcgtcgggctcgacatcggcaaggtgtgggtcgcggacgacggcgccgcggtggcggtctggaccacgccggagagcgtcgaagcgggggcggtgttcgccgagatcggcccgcgcatggccgagttgagcggttcccggctggccgcgcagcaacagatggaaggcctcctggcgccgcaccggcccaaggagcccgcgtggttcctggccaccgtcggcgtctcgcccgaccaccagggcaagggtctgggcagcgccgtcgtgctccccggagtggaggcggccgagcgcgccggggtgcccgccttcctggagacctccgcgccccgcaacctccccttctacgagcggctcggcttcaccgtcaccgccgacgtcgaggtgcccgaaggaccgcgcacctggtgcatgacccgcaagcccggtgcctga

SEQ ID NO: 17476 - DNA, 2703 bp, synthetic construct
  source 1..2703: mol_type = other DNA
atggccttaccagtgaccgccttgctcctgccgctggccttgctgctccacgccgccaggccgctcgagatccagaaccctgatcctgccgtgtaccagctgcgggatagcaagagcagcgacaagagcgtgtgtctgttcaccgacttcgacagccagaccaacgtgtcccagagcaaggactccgacgtgtacatcaccgataagtgcgtgctggacatgcggagcatggacttcaagagcaactccgccgtggcctggtccaacaagtccgatttcgcctgcgccaacgccttcaacaacagcattatccccgaggacacattcttcccaagcagcgacgtgccctgcgacgtgaagctggtggaaaagagcttcgagacagacaccaacctgaacttccagaacctgagcgtgatcggcttcagaatcctgctgctgaaagtggccggctttaacctgctgatgaccctgcggctgtggtccagcagggccaagcgatctggatctggagcaacaaacttctcactactcaaacaagcaggtgacgtggaggagaatcccgggcctactagcatggccttaccagtgaccgccttgctcctgccgctggccttgctgctccacgccgccaggccgggcgtgacacagagccccacacacctgattaagaccagaggccagcaggccacactgagatgcagccctatcagcggccacaccagcgtgtactggtatcagcaggctctcggactgggcctccagttcctgctttggtacgacgagggcgaagagagaaaccggggcaacttccctcctcggttttccggcagacagttccccaactacagcagcgagctgaacgtgaacgccctggaactggaagatagcgccctgtacctgtgtgcctcttctcttggtggacctcgcggactggctggactgagaggggatgagcagtttttcggccctggcaccagactgaccgtgctggaaggcggaggaagcggcggaggatctggcgtgacacagagccccacacacctgattaagaccagaggccagcaggccacactgagatgcagccctatcagcggccacaccagcgtgtactggtatcagcaggctctcggactgggcctccagttcctgctttggtacgacgagggcgaagagagaaaccggggcaacttccctcctcggttttccggcagacagttccccaactacagcagcgagctgaacgtgaacgccctggaactggaagatagcgccctgtacctgtgtgccagctctctcggcggagatgaactgggagccgatggcaacgagcagttctttggccctggcaccagactgaccgtgctggaaggtaccggcggaggcggatctggcggcggaggtagcggtggcggaggatctgaattcgacatccagatgacacagagccctagcagcctgtctgccagcgtgggagacagagtgaccatcacatgcaaggccagcgaccacatcaacaactggctggcctggtatcagcagaagcctggacaggcccctaagctgctgatctacggcgctaccacactggaaacaggcgtgcccagcagattttctggcagcggctctggcaccgactacaccctgacaatatccagcctccagcctgaggacttcgccacctactactgtcagcagagctggaacaccccttggacattcggccagggcaccaagctggaaatcaagagaggcggaggcggaagtggaggcggaggatctggcggcggaggctctcaagttcagcttcaacagcctggcgctgagctggtcaaacctggcgcttctgtgaagatgagctgcaaagccagcggctacgccttcagcagctactggatcaactggatgaagcagaaacccggccagggactcgaatggatcggccaaatctatcccggcgacggcgacaccaactacaacggcaagttcaagggcagagccacactgaccgccgatacctctagcagcacagcctacatgcagctgagcagcctgaccagcgaagatagcgccgtgtacttctgtgcccggtccatcacaacagtcgtgggctgcgctatggactattggggccagggaacaagcgtgaccgtgtctagtacgcgtgaggacctgaagaacgtgttcccacctgaggtggccgtgttcgagcctagcaaggccgagatcgcccacacccagaaagccaccctcgtgtgcctggctaccggcttctaccccgaccatgtggaactgtcttggtgggtcaacggcaaagaggtgcacagcggcgtgtgtaccgacccccagccactgaaagaacagcccgccctgaacgacagccggtactgcctgagcagcagactgagagtgtccgccaccttctggcagaacccccggaaccacttcagatgccaggtgcagttctacggcctgagcgagaacgacgagtggacccaggacagagccaagcccgtgacccagatcgtgtctgccgaagcctggggcagagccgattgcggcatcaccagcgccagctaccaccagggcgtgctgagcgccaccatcctgtacgagatcctgctgggcaaggccaccctgtacgccgtgctggtgtctgccctggtgctgatggctatggtcaagcggaaggacagccgggga

SEQ ID NO: 17477 - DNA, 2265 bp, synthetic construct
  source 1..2265: mol_type = other DNA
atggccttaccagtgaccgccttgctcctgccgctggccttgctgctccacgccgccaggccgctcgagatccagaaccctgatcctgccgtgtaccagctgcgggatagcaagagcagcgacaagagcgtgtgtctgttcaccgacttcgacagccagaccaacgtgtcccagagcaaggactccgacgtgtacatcaccgataagtgcgtgctggacatgcggagcatggacttcaagagcaactccgccgtggcctggtccaacaagtccgatttcgcctgcgccaacgccttcaacaacagcattatccccgaggacacattcttcccaagcagcgacgtgccctgcgacgtgaagctggtggaaaagagcttcgagacagacaccaacctgaacttccagaacctgagcgtgatcggcttcagaatcctgctgctgaaagtggccggctttaacctgctgatgaccctgcggctgtggtccagcagggccaagcgatctggatctggagcaacaaacttctcactactcaaacaagcaggtgacgtggaggagaatcccgggcctactagcatggccctgcccgtgacagccctgctgctgcctctggctctgctgctgcacgccgccagacccgatgaattcggctctgacctgggcatcaagctgctgttcgccgctgccaagggccaggacgacgaagtgcggattctgctggctgctggggccgacgtgaacgccaaggatttcgagggctacacccccctgcacgtggccgcctatgatggacacctggaaatcgtggaagtgctgctgaaggctggcgctgatgtgaatgccaaagacagccagggccggacccctctgcatgaagccgcctacagcggccatctggaaattgtggaagtgctgctgaaagccggggcagacgtgaacgctcaggacgacgctggcgagacaccagccgatctggctgcagcttggggccacgaagatatcgccgaggtgctgcagaagacgcgtgaggacctgaagaacgtgttcccacctgaggtggccgtgttcgagcctagcaaggccgagatcgcccacacccagaaagccaccctcgtgtgcctggctaccggcttctaccccgaccatgtggaactgtcttggtgggtcaacggcaaagaggtgcacagcggcgtgtgtaccgacccccagccactgaaagaacagcccgccctgaacgacagccggtactgcctgagcagcagactgagagtgtccgccaccttctggcagaacccccggaaccacttcagatgccaggtgcagttctacggcctgagcgagaacgacgagtggacccaggacagagccaagcccgtgacccagatcgtgtctgccgaagcctggggcagagccgattgcggcatcaccagcgccagctaccaccagggcgtgctgagcgccaccatcctgtacgagatcctgctgggcaaggccaccctgtacgccgtgctggtgtctgccctggtgctgatggctatggtcaagcggaaggacagccggggacgcgccaagagaagcggatctggcgtgaagcagaccctgaatttcgacctgctgaagctggctggcgacgtggaatccaacccaggcccttctagaggccatatgaccgagtacaagcccacggtgcgcctcgccacccgcgacgacgtccccagggccgtacgcaccctcgccgccgcgttcgccgactaccccgccacgcgccacaccgtcgatccggaccgccacatcgagcgggtcaccgagctgcaagaactcttcctcacgcgcgtcgggctcgacatcggcaaggtgtgggtcgcggacgacggcgccgcggtggcggtctggaccacgccggagagcgtcgaagcgggggcggtgttcgccgagatcggcccgcgcatggccgagttgagcggttcccggctggccgcgcagcaacagatggaaggcctcctggcgccgcaccggcccaaggagcccgcgtggttcctggccaccgtcggcgtctcgcccgaccaccagggcaagggtctgggcagcgccgtcgtgctccccggagtggaggcggccgagcgcgccggggtgcccgccttcctggagacctccgcgccccgcaacctccccttctacgagcggctcggcttcaccgtcaccgccgacgtcgaggtgcccgaaggaccgcgcacctggtgcatgacccgcaagcccggtgcctga

SEQ ID NO: 17478 - DNA, 2052 bp, synthetic construct
  source 1..2052: mol_type = other DNA
atggccttaccagtgaccgccttgctcctgccgctggccttgctgctccacgccgccaggccgctcgagatccagaaccctgatcctgccgtgtaccagctgcgggatagcaagagcagcgacaagagcgtgtgtctgttcaccgacttcgacagccagaccaacgtgtcccagagcaaggactccgacgtgtacatcaccgataagtgcgtgctggacatgcggagcatggacttcaagagcaactccgccgtggcctggtccaacaagtccgatttcgcctgcgccaacgccttcaacaacagcattatccccgaggacacattcttcccaagcagcgacgtgccctgcgacgtgaagctggtggaaaagagcttcgagacagacaccaacctgaacttccagaacctgagcgtgatcggcttcagaatcctgctgctgaaagtggccggctttaacctgctgatgaccctgcggctgtggtccagcagggccaagcgatctggatctggagcaacaaacttctcactactcaaacaagcaggtgacgtggaggagaatcccgggcctactagcatggactggatttggcgcatccttttccttgtcggcgctgctaccggcgcccattccttcgaaggcagcggattcgaatacgccaaagagatgcggaacgcctactgggagatcgccctgctgcccaatctgaccaaccagcagaagagagcccccatcagaaagctgtacgacgacccctcccagagcagcgagctgctgtctgaggctaaaaaactgaacgatagccagacgcgtgaggacctgaagaacgtgttcccacctgaggtggccgtgttcgagcctagcaaggccgagatcgcccacacccagaaagccaccctcgtgtgcctggctaccggcttctaccccgaccatgtggaactgtcttggtgggtcaacggcaaagaggtgcacagcggcgtgtgtaccgacccccagccactgaaagaacagcccgccctgaacgacagccggtactgcctgagcagcagactgagagtgtccgccaccttctggcagaacccccggaaccacttcagatgccaggtgcagttctacggcctgagcgagaacgacgagtggacccaggacagagccaagcccgtgacccagatcgtgtctgccgaagcctggggcagagccgattgcggcatcaccagcgccagctaccaccagggcgtgctgagcgccaccatcctgtacgagatcctgctgggcaaggccaccctgtacgccgtgctggtgtctgccctggtgctgatggctatggtcaagcggaaggacagccggggacgcgccaagagaagcggatctggcgtgaagcagaccctgaatttcgacctgctgaagctggctggcgacgtggaatccaacccaggcccttctagaggccatatgaccgagtacaagcccacggtgcgcctcgccacccgcgacgacgtccccagggccgtacgcaccctcgccgccgcgttcgccgactaccccgccacgcgccacaccgtcgatccggaccgccacatcgagcgggtcaccgagctgcaagaactcttcctcacgcgcgtcgggctcgacatcggcaaggtgtgggtcgcggacgacggcgccgcggtggcggtctggaccacgccggagagcgtcgaagcgggggcggtgttcgccgagatcggcccgcgcatggccgagttgagcggttcccggctggccgcgcagcaacagatggaaggcctcctggcgccgcaccggcccaaggagcccgcgtggttcctggccaccgtcggcgtctcgcccgaccaccagggcaagggtctgggcagcgccgtcgtgctccccggagtggaggcggccgagcgcgccggggtgcccgccttcctggagacctccgcgccccgcaacctccccttctacgagcggctcggcttcaccgtcaccgccgacgtcgaggtgcccgaaggaccgcgcacctggtgcatgacccgcaagcccggtgcctga

SEQ ID NO: 17479 - DNA, 2718 bp, synthetic construct
  source 1..2718: mol_type = other DNA
atggccttaccagtgaccgccttgctcctgccgctggccttgctgctccacgccgccaggccgctcgagatccagaaccctgatcctgccgtgtaccagctgcgggatagcaagagcagcgacaagagcgtgtgtctgttcaccgacttcgacagccagaccaacgtgtcccagagcaaggactccgacgtgtacatcaccgataagtgcgtgctggacatgcggagcatggacttcaagagcaactccgccgtggcctggtccaacaagtccgatttcgcctgcgccaacgccttcaacaacagcattatccccgaggacacattcttcccaagcagcgacgtgccctgcgacgtgaagctggtggaaaagagcttcgagacagacaccaacctgaacttccagaacctgagcgtgatcggcttcagaatcctgctgctgaaagtggccggctttaacctgctgatgaccctgcggctgtggtccagcagggccaagcgatctggatctggagcaacaaacttctcactactcaaacaagcaggtgacgtggaggagaatcccgggcctactagcatggccctgcccgtgacagccctgctgctgcctctggctctgctgctgcacgccgccagacccgatgaattcgaggtgcaactggtggaaagcggcggaggcctggtgcaggctggcggatctctgagactgagctgtgccgccagcggcatcaccttcagcatcaacacaatgggctggtacagacaggcccctggcaagcagagggaactggtggccctgatctccagcatcggcgacacctactacgccgacagcgtgaagggccggttcaccatcagccgggacaacgccaagaacaccgtgtacctccagatgaacagcctgaagcccgaggacaccgccgtgtactactgcaagcggttcagaacagccgcccagggcaccgattattggggccagggaacacaagtgaccgtgtcctctctcgagggaggaggcggctccgggggaggcggaagtggaggcggaggatctgggtctggaggaagcggatctggaggctcagggtcagggggctcaggcagtggaggctctttcgaagtgcaactggtggaatctgggggcggactggtgcagccaggcggaagtctgaggctgtcttgtgccgcctccggcagcatcttcggcttcaacgacatggcctggtatcggcaggctcccggaaaacagcgcgagctggtggctctgattagcagagtgggcgtgaccagcagcgccgactctgtgaagggcagattcacaatctccagagtgaacgccaaggatacagtgtacctccagatgaactctctgaaacctgaggatacagcagtgtactattgctacatggaccagcggctggacggcagcacactggcctactggggacagggaactcaagtgacagtgtctagcacgcgtgaggacctgaagaacgtgttcccacctgaggtggccgtgttcgagcctagcaaggccgagatcgcccacacccagaaagccaccctcgtgtgcctggctaccggcttctaccccgaccatgtggaactgtcttggtgggtcaacggcaaagaggtgcacagcggcgtgtgtaccgacccccagccactgaaagaacagcccgccctgaacgacagccggtactgcctgagcagcagactgagagtgtccgccaccttctggcagaacccccggaaccacttcagatgccaggtgcagttctacggcctgagcgagaacgacgagtggacccaggacagagccaagcccgtgacccagatcgtgtctgccgaagcctggggcagagccgattgcggcatcaccagcgccagctaccaccagggcgtgctgagcgccaccatcctgtacgagatcctgctgggcaaggccaccctgtacgccgtgctggtgtctgccctggtgctgatggctatggtcaagcggaaggacagccggggacgcgccaagagaagcggatctggcgtgaagcagaccctgaatttcgacctgctgaagctggctggcgacgtggaatccaacccaggcccttctagaggccatatgaccgagtacaagcccacggtgcgcctcgccacccgcgacgacgtccccagggccgtacgcaccctcgccgccgcgttcgccgactaccccgccacgcgccacaccgtcgatccggaccgccacatcgagcgggtcaccgagctgcaagaactcttcctcacgcgcgtcgggctcgacatcggcaaggtgtgggtcgcggacgacggcgccgcggtggcggtctggaccacgccggagagcgtcgaagcgggggcggtgttcgccgagatcggcccgcgcatggccgagttgagcggttcccggctggccgcgcagcaacagatggaaggcctcctggcgccgcaccggcccaaggagcccgcgtggttcctggccaccgtcggcgtctcgcccgaccaccagggcaagggtctgggcagcgccgtcgtgctccccggagtggaggcggccgagcgcgccggggtgcccgccttcctggagacctccgcgccccgcaacctccccttctacgagcggctcggcttcaccgtcaccgccgacgtcgaggtgcccgaaggaccgcgcacctggtgcatgacccgcaagcccggtgcctga

SEQ ID NO: 17480 - DNA, 2460 bp, synthetic construct
  source 1..2460: mol_type = other DNA
atggccttaccagtgaccgccttgctcctgccgctggccttgctgctccacgccgccaggccgctcgagatccagaaccctgatcctgccgtgtaccagctgcgggatagcaagagcagcgacaagagcgtgtgtctgttcaccgacttcgacagccagaccaacgtgtcccagagcaaggactccgacgtgtacatcaccgataagtgcgtgctggacatgcggagcatggacttcaagagcaactccgccgtggcctggtccaacaagtccgatttcgcctgcgccaacgccttcaacaacagcattatccccgaggacacattcttcccaagcagcgacgtgccctgcgacgtgaagctggtggaaaagagcttcgagacagacaccaacctgaacttccagaacctgagcgtgatcggcttcagaatcctgctgctgaaagtggccggctttaacctgctgatgaccctgcggctgtggtccagcagggccaagcgatctggatctggagcaacaaacttctcactactcaaacaagcaggtgacgtggaggagaatcccgggcctactagcatggcccttccagtcactgccttgctgttgcctctggcgctcctgctccacgccgctagaccgggcatgagaaccgaggacctgcctaaggccgtggtgttcctggaaccccagtggtacagagtgctggaaaaggacagcgtgaccctgaagtgccagggcgcctacagccccgaggacaatagcacccagtggttccacaacgagagcctgatctccagccaggccagcagctacttcatcgacgccgccaccgtggacgacagcggcgagtatagatgccagaccaacctgagcaccctgagcgaccccgtgcagctggaagtgcacatcggatggctgctgctgcaggcccccagatgggtgttcaaagaagaggaccccatccacctgagatgccactcttggaagaacaccgccctgcacaaagtgacctacctgcagaacggcaagggcagaaagtacttccaccacaacagcgacttctacatccccaaggccaccctgaaggactccggctcctacttctgcagaggcctcgtgggcagcaagaacgtgtccagcgagacagtgaacatcaccatcacccagggcctggccgtgtctaccatcagcagctttttcccacccggctaccagacgcgtgaggacctgaagaacgtgttcccacctgaggtggccgtgttcgagcctagcaaggccgagatcgcccacacccagaaagccaccctcgtgtgcctggctaccggcttctaccccgaccatgtggaactgtcttggtgggtcaacggcaaagaggtgcacagcggcgtgtgtaccgacccccagccactgaaagaacagcccgccctgaacgacagccggtactgcctgagcagcagactgagagtgtccgccaccttctggcagaacccccggaaccacttcagatgccaggtgcagttctacggcctgagcgagaacgacgagtggacccaggacagagccaagcccgtgacccagatcgtgtctgccgaagcctggggcagagccgattgcggcatcaccagcgccagctaccaccagggcgtgctgagcgccaccatcctgtacgagatcctgctgggcaaggccaccctgtacgccgtgctggtgtctgccctggtgctgatggctatggtcaagcggaaggacagccggggacgcgccaagagaagcggatctggcgtgaagcagaccctgaatttcgacctgctgaagctggctggcgacgtggaatccaacccaggcccttctagaggccatatgaccgagtacaagcccacggtgcgcctcgccacccgcgacgacgtccccagggccgtacgcaccctcgccgccgcgttcgccgactaccccgccacgcgccacaccgtcgatccggaccgccacatcgagcgggtcaccgagctgcaagaactcttcctcacgcgcgtcgggctcgacatcggcaaggtgtgggtcgcggacgacggcgccgcggtggcggtctggaccacgccggagagcgtcgaagcgggggcggtgttcgccgagatcggcccgcgcatggccgagttgagcggttcccggctggccgcgcagcaacagatggaaggcctcctggcgccgcaccggcccaaggagcccgcgtggttcctggccaccgtcggcgtctcgcccgaccaccagggcaagggtctgggcagcgccgtcgtgctccccggagtggaggcggccgagcgcgccggggtgcccgccttcctggagacctccgcgccccgcaacctccccttctacgagcggctcggcttcaccgtcaccgccgacgtcgaggtgcccgaaggaccgcgcacctggtgcatgacccgcaagcccggtgcctga

SEQ ID NO: 17481 - DNA, 1341 bp, synthetic construct
  source 1..1341: mol_type = other DNA
atggccttaccagtgaccgccttgctcctgccgctggccttgctgctccacgccgccaggccgctcgagatccagaaccctgatcctgccgtgtaccagctgcgggatagcaagagcagcgacaagagcgtgtgtctgttcaccgacttcgacagccagaccaacgtgtcccagagcaaggactccgacgtgtacatcaccgataagtgcgtgctggacatgcggagcatggacttcaagagcaactccgccgtggcctggtccaacaagtccgatttcgcctgcgccaacgccttcaacaacagcattatccccgaggacacattcttcccaagcagcgacgtgccctgcgacgtgaagctggtggaaaagagcttcgagacagacaccaacctgaacttccagaacctgagcgtgatcggcttcagaatcctgctgctgaaagtggccggctttaacctgctgatgaccctgcggctgtggtccagcagggccaagcgatctggatctggagcaacaaacttctcactactcaaacaagcaggtgacgtggaggagaatcccgggcctactagcgccaccatggccttaccagtgaccgccttgctcctgccgctggccttgctgctccacgccgccaggccgatggaccccgacctggaaatcagagccgccttcctgcggcagagaaacacagccctgagaacagaggtggccgagctggaacaagaggtgcagcggctggaaaacgaggtgtcccagtacgagacaagatacggccctctcggaggcggaaaaacgcgtgaggacctgaagaacgtgttcccacctgaggtggccgtgttcgagcctagcaaggccgagatcgcccacacccagaaagccaccctcgtgtgcctggctaccggcttctaccccgaccatgtggaactgtcttggtgggtcaacggcaaagaggtgcacagcggcgtgtgtaccgacccccagccactgaaagaacagcccgccctgaacgacagccggtactgcctgagcagcagactgagagtgtccgccaccttctggcagaacccccggaaccacttcagatgccaggtgcagttctacggcctgagcgagaacgacgagtggacccaggacagagccaagcccgtgacccagatcgtgtctgccgaagcctggggcagagccgattgcggcatcaccagcgccagctaccaccagggcgtgctgagcgccaccatcctgtacgagatcctgctgggcaaggccaccctgtacgccgtgctggtgtctgccctggtgctgatggctatggtcaagcggaaggacagccgggga

SEQ ID NO: 17482 - DNA, 1341 bp, synthetic construct
  source 1..1341: mol_type = other DNA
atggccttaccagtgaccgccttgctcctgccgctggccttgctgctccacgccgccaggccgctcgagatccagaaccctgatcctgccgtgtaccagctgcgggatagcaagagcagcgacaagagcgtgtgtctgttcaccgacttcgacagccagaccaacgtgtcccagagcaaggactccgacgtgtacatcaccgataagtgcgtgctggacatgcggagcatggacttcaagagcaactccgccgtggcctggtccaacaagtccgatttcgcctgcgccaacgccttcaacaacagcattatccccgaggacacattcttcccaagcagcgacgtgccctgcgacgtgaagctggtggaaaagagcttcgagacagacaccaacctgaacttccagaacctgagcgtgatcggcttcagaatcctgctgctgaaagtggccggctttaacctgctgatgaccctgcggctgtggtccagcagggccaagcgatctggatctggagcaacaaacttctcactactcaaacaagcaggtgacgtggaggagaatcccgggcctactagcgccaccatggccttaccagtgaccgccttgctcctgccgctggccttgctgctccacgccgccaggccgatggaccctgatctcgaaattgaggccgcctttctggaacgcgagaacactgccctggaaaccagggtcgcagagctgagacagagagtgcagagactgcggaacagagtgtctcagtaccgcaccagatatggcccactcggcggaggtaaaacgcgtgaggacctgaagaacgtgttcccacctgaggtggccgtgttcgagcctagcaaggccgagatcgcccacacccagaaagccaccctcgtgtgcctggctaccggcttctaccccgaccatgtggaactgtcttggtgggtcaacggcaaagaggtgcacagcggcgtgtgtaccgacccccagccactgaaagaacagcccgccctgaacgacagccggtactgcctgagcagcagactgagagtgtccgccaccttctggcagaacccccggaaccacttcagatgccaggtgcagttctacggcctgagcgagaacgacgagtggacccaggacagagccaagcccgtgacccagatcgtgtctgccgaagcctggggcagagccgattgcggcatcaccagcgccagctaccaccagggcgtgctgagcgccaccatcctgtacgagatcctgctgggcaaggccaccctgtacgccgtgctggtgtctgccctggtgctgatggctatggtcaagcggaaggacagccgggga

SEQ ID NO: 17483 - DNA, 2046 bp, synthetic construct
  source 1..2046: mol_type = other DNA
atggccttaccagtgaccgccttgctcctgccgctggccttgctgctccacgccgccaggccgctcgagatccagaaccctgatcctgccgtgtaccagctgcgggatagcaagagcagcgacaagagcgtgtgtctgttcaccgacttcgacagccagaccaacgtgtcccagagcaaggactccgacgtgtacatcaccgataagtgcgtgctggacatgcggagcatggacttcaagagcaactccgccgtggcctggtccaacaagtccgatttcgcctgcgccaacgccttcaacaacagcattatccccgaggacacattcttcccaagcagcgacgtgccctgcgacgtgaagctggtggaaaagagcttcgagacagacaccaacctgaacttccagaacctgagcgtgatcggcttcagaatcctgctgctgaaagtggccggctttaacctgctgatgaccctgcggctgtggtccagcagggccaagcgatctggatctggagcaacaaacttctcactactcaaacaagcaggtgacgtggaggagaatcccgggcctactagcgccaccatggccttaccagtgaccgccttgctcctgccgctggccttgctgctccacgccgccaggccgctgttcaatcaagaggtgcagatccctctgaccgagagctactgtggcccctgtcctaagaactggatctgctacaagaacaactgctaccagttcttcgacgagagcaagaattggtacgagagccaggccagctgcatgagccagaatgccagcctgctgaaggtgtacagcaaagaggaccaggacctgctgaaactggtcaagagcgcccactggatgggccttgtgcacatccccaccaatggctcttggcagtgggaggacggcagcattctgagccctaacctgctgaccatcatcgagatgcagaagggcgactgcgccctgtacgccagcagctttaagggctacatcgagaattgcagcaccccgaacacctacatctgtatgcagagaaccgtttctggcggaggcggctctggaggaggcggaagtggcggcggaggcgacctctttaatcaagaagtccagattccactcaccgaatcctactgcggaccttgtccaaaaaattggatttgttataagaacaactgttatcaattctttgatgagtctaaaaattggtatgagtcccaggcttcctgcatgtctcagaacgcttctctgctgaaagtctactctaaagaagatcaggatctcctgaagctcgtcaagtctgcccattggatggggctcgtccacattcctaccaacggaagctggcaatgggaagatggctccatcctgtctccaaatctgctcacgattattgaaatgcagaaaggggattgtgctctctacgccagctccttcaagggatatattgagaactgtagcacgcccaatacttatatctgtatgcaacggaccgtgacgcgtgaggacctgaagaacgtgttcccacctgaggtggccgtgttcgagcctagcaaggccgagatcgcccacacccagaaagccaccctcgtgtgcctggctaccggcttctaccccgaccatgtggaactgtcttggtgggtcaacggcaaagaggtgcacagcggcgtgtgtaccgacccccagccactgaaagaacagcccgccctgaacgacagccggtactgcctgagcagcagactgagagtgtccgccaccttctggcagaacccccggaaccacttcagatgccaggtgcagttctacggcctgagcgagaacgacgagtggacccaggacagagccaagcccgtgacccagatcgtgtctgccgaagcctggggcagagccgattgcggcatcaccagcgccagctaccaccagggcgtgctgagcgccaccatcctgtacgagatcctgctgggcaaggccaccctgtacgccgtgctggtgtctgccctggtgctgatggctatggtcaagcggaaggacagccgggga

SEQ ID NO: 17484 - DNA, 2046 bp, synthetic construct
  source 1..2046: mol_type = other DNA
atggccttaccagtgaccgccttgctcctgccgctggccttgctgctccacgccgccaggccgctcgagatccagaaccctgatcctgccgtgtaccagctgcgggatagcaagagcagcgacaagagcgtgtgtctgttcaccgacttcgacagccagaccaacgtgtcccagagcaaggactccgacgtgtacatcaccgataagtgcgtgctggacatgcggagcatggacttcaagagcaactccgccgtggcctggtccaacaagtccgatttcgcctgcgccaacgccttcaacaacagcattatccccgaggacacattcttcccaagcagcgacgtgccctgcgacgtgaagctggtggaaaagagcttcgagacagacaccaacctgaacttccagaacctgagcgtgatcggcttcagaatcctgctgctgaaagtggccggctttaacctgctgatgaccctgcggctgtggtccagcagggccaagcgatctggatctggagcaacaaacttctcactactcaaacaagcaggtgacgtggaggagaatcccgggcctactagcgccaccatggccttaccagtgaccgccttgctcctgccgctggccttgctgctccacgccgccaggccgctgttcaatcaagaggtgcagatccctctgaccgagagctactgtggcccctgtcctaagaactggatctgctacaagaacaactgctaccagttcttcgacgagagcaagaattggtacgagagccaggccagctgcatgagccagaatgccagcctgctgaaggtgtacagcaaagaggaccaggacctgctgaaactggtcaagagcgcccactggatgggccttgtgcacatccccaccaatggctcttggcagtgggaggacggcagcattctgagccctaacctgctgaccatcatcgagatgcagaagggcgactgcgccctgtacgccagcagctttaagggcttcatcgagaattgcagcaccccgaacacctacatctgtatgcagagaaccgttggcggaggcggaagtggaggcggaggatctggcggcggaggctctgacctctttaatcaagaagtccagattccactcaccgaatcctactgcggaccttgtccaaaaaattggatttgttataagaacaactgttatcaattctttgatgagtctaaaaattggtatgagtcccaggcttcctgcatgtctcagaacgcttctctgctgaaagtctactctaaagaagatcaggatctcctgaagctcgtcaagtctgcccattggatggggctcgtccacattcctaccaacggaagctggcaatgggaagatggctccatcctgtctccaaatctgctcacgattattgaaatgcagaaaggggattgtgctctctacgccagctccttcaagggatttattgagaactgtagcacgcccaatacttatatctgtatgcaacggaccgtgacgcgtgaggacctgaagaacgtgttcccacctgaggtggccgtgttcgagcctagcaaggccgagatcgcccacacccagaaagccaccctcgtgtgcctggctaccggcttctaccccgaccatgtggaactgtcttggtgggtcaacggcaaagaggtgcacagcggcgtgtgtaccgacccccagccactgaaagaacagcccgccctgaacgacagccggtactgcctgagcagcagactgagagtgtccgccaccttctggcagaacccccggaaccacttcagatgccaggtgcagttctacggcctgagcgagaacgacgagtggacccaggacagagccaagcccgtgacccagatcgtgtctgccgaagcctggggcagagccgattgcggcatcaccagcgccagctaccaccagggcgtgctgagcgccaccatcctgtacgagatcctgctgggcaaggccaccctgtacgccgtgctggtgtctgccctggtgctgatggctatggtcaagcggaaggacagccgggga

SEQ ID NO: 17485 - DNA, 2124 bp, synthetic construct
  source 1..2124: mol_type = other DNA
atggccttaccagtgaccgccttgctcctgccgctggccttgctgctccacgccgccaggccgctcgagatccagaaccctgatcctgccgtgtaccagctgcgggatagcaagagcagcgacaagagcgtgtgtctgttcaccgacttcgacagccagaccaacgtgtcccagagcaaggactccgacgtgtacatcaccgataagtgcgtgctggacatgcggagcatggacttcaagagcaactccgccgtggcctggtccaacaagtccgatttcgcctgcgccaacgccttcaacaacagcattatccccgaggacacattcttcccaagcagcgacgtgccctgcgacgtgaagctggtggaaaagagcttcgagacagacaccaacctgaacttccagaacctgagcgtgatcggcttcagaatcctgctgctgaaagtggccggctttaacctgctgatgaccctgcggctgtggtccagcagggccaagcgatctggatctggagcaacaaacttctcactactcaaacaagcaggtgacgtggaggagaatcccgggcctactagcatggccttaccagtgaccgccttgctcctgccgctggccttgctgctccacgccgccaggccgatggaccccgacctggaaatcagagccgccttcctgcggcagagaaacacagccctgagaacagaggtggccgagctggaacaagaggtgcagcggctggaaaacgaggtgtcccagtacgagacaagatacggccctctcggaggcggaaaaggtaccggcggaggcggatctggcggcggaggtagcggtggcggaggatctgaattcgacatccagatgacacagagccctagcagcctgtctgccagcgtgggagacagagtgaccatcacatgcaaggccagcgaccacatcaacaactggctggcctggtatcagcagaagcctggacaggcccctaagctgctgatctacggcgctaccacactggaaacaggcgtgcccagcagattttctggcagcggctctggcaccgactacaccctgacaatatccagcctccagcctgaggacttcgccacctactactgtcagcagagctggaacaccccttggacattcggccagggcaccaagctggaaatcaagagaggcggaggcggaagtggaggcggaggatctggcggcggaggctctcaagttcagcttcaacagcctggcgctgagctggtcaaacctggcgcttctgtgaagatgagctgcaaagccagcggctacgccttcagcagctactggatcaactggatgaagcagaaacccggccagggactcgaatggatcggccaaatctatcccggcgacggcgacaccaactacaacggcaagttcaagggcagagccacactgaccgccgatacctctagcagcacagcctacatgcagctgagcagcctgaccagcgaagatagcgccgtgtacttctgtgcccggtccatcacaacagtcgtgggctgcgctatggactattggggccagggaacaagcgtgaccgtgtctagtacgcgtgaggacctgaagaacgtgttcccacctgaggtggccgtgttcgagcctagcaaggccgagatcgcccacacccagaaagccaccctcgtgtgcctggctaccggcttctaccccgaccatgtggaactgtcttggtgggtcaacggcaaagaggtgcacagcggcgtgtgtaccgacccccagccactgaaagaacagcccgccctgaacgacagccggtactgcctgagcagcagactgagagtgtccgccaccttctggcagaacccccggaaccacttcagatgccaggtgcagttctacggcctgagcgagaacgacgagtggacccaggacagagccaagcccgtgacccagatcgtgtctgccgaagcctggggcagagccgattgcggcatcaccagcgccagctaccaccagggcgtgctgagcgccaccatcctgtacgagatcctgctgggcaaggccaccctgtacgccgtgctggtgtctgccctggtgctgatggctatggtcaagcggaaggacagccgggga

SEQ ID NO: 17486 - DNA, 2829 bp, synthetic construct
  source 1..2829: mol_type = other DNA
atggccttaccagtgaccgccttgctcctgccgctggccttgctgctccacgccgccaggccgctcgagatccagaaccctgatcctgccgtgtaccagctgcgggatagcaagagcagcgacaagagcgtgtgtctgttcaccgacttcgacagccagaccaacgtgtcccagagcaaggactccgacgtgtacatcaccgataagtgcgtgctggacatgcggagcatggacttcaagagcaactccgccgtggcctggtccaacaagtccgatttcgcctgcgccaacgccttcaacaacagcattatccccgaggacacattcttcccaagcagcgacgtgccctgcgacgtgaagctggtggaaaagagcttcgagacagacaccaacctgaacttccagaacctgagcgtgatcggcttcagaatcctgctgctgaaagtggccggctttaacctgctgatgaccctgcggctgtggtccagcagggccaagcgatctggatctggagcaacaaacttctcactactcaaacaagcaggtgacgtggaggagaatcccgggcctactagcatggccttaccagtgaccgccttgctcctgccgctggccttgctgctccacgccgccaggccgctgttcaatcaagaggtgcagatccctctgaccgagagctactgtggcccctgtcctaagaactggatctgctacaagaacaactgctaccagttcttcgacgagagcaagaattggtacgagagccaggccagctgcatgagccagaatgccagcctgctgaaggtgtacagcaaagaggaccaggacctgctgaaactggtcaagagcgcccactggatgggccttgtgcacatccccaccaatggctcttggcagtgggaggacggcagcattctgagccctaacctgctgaccatcatcgagatgcagaagggcgactgcgccctgtacgccagcagctttaagggcttcatcgagaattgcagcaccccgaacacctacatctgtatgcagagaaccgttggcggaggcggaagtggaggcggaggatctggcggcggaggctctgacctctttaatcaagaagtccagattccactcaccgaatcctactgcggaccttgtccaaaaaattggatttgttataagaacaactgttatcaattctttgatgagtctaaaaattggtatgagtcccaggcttcctgcatgtctcagaacgcttctctgctgaaagtctactctaaagaagatcaggatctcctgaagctcgtcaagtctgcccattggatggggctcgtccacattcctaccaacggaagctggcaatgggaagatggctccatcctgtctccaaatctgctcacgattattgaaatgcagaaaggggattgtgctctctacgccagctccttcaagggatttattgagaactgtagcacgcccaatacttatatctgtatgcaacggaccgtgggtaccggcggaggcggatctggcggcggaggtagcggtggcggaggatctgaattcgacatccagatgacacagagccctagcagcctgtctgccagcgtgggagacagagtgaccatcacatgcaaggccagcgaccacatcaacaactggctggcctggtatcagcagaagcctggacaggcccctaagctgctgatctacggcgctaccacactggaaacaggcgtgcccagcagattttctggcagcggctctggcaccgactacaccctgacaatatccagcctccagcctgaggacttcgccacctactactgtcagcagagctggaacaccccttggacattcggccagggcaccaagctggaaatcaagagaggcggaggcggaagtggaggcggaggatctggcggcggaggctctcaagttcagcttcaacagcctggcgctgagctggtcaaacctggcgcttctgtgaagatgagctgcaaagccagcggctacgccttcagcagctactggatcaactggatgaagcagaaacccggccagggactcgaatggatcggccaaatctatcccggcgacggcgacaccaactacaacggcaagttcaagggcagagccacactgaccgccgatacctctagcagcacagcctacatgcagctgagcagcctgaccagcgaagatagcgccgtgtacttctgtgcccggtccatcacaacagtcgtgggctgcgctatggactattggggccagggaacaagcgtgaccgtgtctagtacgcgtgaggacctgaagaacgtgttcccacctgaggtggccgtgttcgagcctagcaaggccgagatcgcccacacccagaaagccaccctcgtgtgcctggctaccggcttctaccccgaccatgtggaactgtcttggtgggtcaacggcaaagaggtgcacagcggcgtgtgtaccgacccccagccactgaaagaacagcccgccctgaacgacagccggtactgcctgagcagcagactgagagtgtccgccaccttctggcagaacccccggaaccacttcagatgccaggtgcagttctacggcctgagcgagaacgacgagtggacccaggacagagccaagcccgtgacccagatcgtgtctgccgaagcctggggcagagccgattgcggcatcaccagcgccagctaccaccagggcgtgctgagcgccaccatcctgtacgagatcctgctgggcaaggccaccctgtacgccgtgctggtgtctgccctggtgctgatggctatggtcaagcggaaggacagccgggga

SEQ ID NO: 17487 - DNA, 1944 bp, synthetic construct
  source 1..1944: mol_type = other DNA
atggccttaccagtgaccgccttgctcctgccgctggccttgctgctccacgccgccaggccgctcgagatccagaaccctgatcctgccgtgtaccagctgcgggatagcaagagcagcgacaagagcgtgtgtctgttcaccgacttcgacagccagaccaacgtgtcccagagcaaggactccgacgtgtacatcaccgataagtgcgtgctggacatgcggagcatggacttcaagagcaactccgccgtggcctggtccaacaagtccgatttcgcctgcgccaacgccttcaacaacagcattatccccgaggacacattcttcccaagcagcgacgtgccctgcgacgtgaagctggtggaaaagagcttcgagacagacaccaacctgaacttccagaacctgagcgtgatcggcttcagaatcctgctgctgaaagtggccggctttaacctgctgatgaccctgcggctgtggtccagcagggccaagcgatctggatctggagcaacaaacttctcactactcaaacaagcaggtgacgtggaggagaatcccgggcctactagcatggccttaccagtgaccgccttgctcctgccgctggccttgctgctccacgccgccaggccgcagtctgtgctgacacagcctcctagtgtgtctggcgctcctggacagagagtgaccatctcttgtaccggcagcagcagcaatatcggagccggctatgacgtgcactggtatcagcagctccctggcacagcccctaaactgctgatcttcggcaacagcaacagacccagcggcgtgcccgatagattcagcggctttaagagcggcacaagcgccagcctggctatcactggactgcaagccgaggacgaggccgactacttctgccagagctacgatagcagcctgagcggcagcggagtgtttggcacaggcaccaaagtgacagtgcttggcggcggaggcggaagtggaggcggaggatctggcggcggaggctctcaaatgcaactggttcaaagcggcggtggcctggtgcaacctggaagaagtctgagactgagctgtgccgccagcggcttcaccttcgatgattacgccatgcactgggtccgacaggcccctggaaaaggactggaatgggtgtccggcatctcctggaatagcggctctatcggctacgccgacagcgtgaagggcagattcaccatcagccgggacaacgccaagaacagcctgtacctccagatgaactccctgagagccgaggatacagccctgtactactgcgccaaggacatccacagcggcagctactacggcctgctgtactacgctatggacgtgtggggccagggcacaaccgtgacagtttcttctacgcgtgaggacctgaagaacgtgttcccacctgaggtggccgtgttcgagcctagcaaggccgagatcgcccacacccagaaagccaccctcgtgtgcctggctaccggcttctaccccgaccatgtggaactgtcttggtgggtcaacggcaaagaggtgcacagcggcgtgtgtaccgacccccagccactgaaagaacagcccgccctgaacgacagccggtactgcctgagcagcagactgagagtgtccgccaccttctggcagaacccccggaaccacttcagatgccaggtgcagttctacggcctgagcgagaacgacgagtggacccaggacagagccaagcccgtgacccagatcgtgtctgccgaagcctggggcagagccgattgcggcatcaccagcgccagctaccaccagggcgtgctgagcgccaccatcctgtacgagatcctgctgggcaaggccaccctgtacgccgtgctggtgtctgccctggtgctgatggctatggtcaagcggaaggacagccgggga

SEQ ID NO: 17488 - DNA, 1455 bp, synthetic construct
  source 1..1455: mol_type = other DNA
atggccttaccagtgaccgccttgctcctgccgctggccttgctgctccacgccgccaggccgctcgagatccagaaccctgatcctgccgtgtaccagctgcgggatagcaagagcagcgacaagagcgtgtgtctgttcaccgacttcgacagccagaccaacgtgtcccagagcaaggactccgacgtgtacatcaccgataagtgcgtgctggacatgcggagcatggacttcaagagcaactccgccgtggcctggtccaacaagtccgatttcgcctgcgccaacgccttcaacaacagcattatccccgaggacacattcttcccaagcagcgacgtgccctgcgacgtgaagctggtggaaaagagcttcgagacagacaccaacctgaacttccagaacctgagcgtgatcggcttcagaatcctgctgctgaaagtggccggctttaacctgctgatgaccctgcggctgtggtccagcagggccaagcgatctggatctggagcaacaaacttctcactactcaaacaagcaggtgacgtggaggagaatcccgggcctactagcatggccttaccagtgaccgccttgctcctgccgctggccttgctgctccacgccgccaggccgatgtgtatgccctgcttcaccaccgaccatcagatggcccggaagtgcgacgattgctgtggcggaaaaggcagaggcaagtgctacggccctcagtgcttgtgtagactcgagggcggaggcggaagtggaggcggaggatctggcggcggaggctctttcgaagtgtgtatgccttgttttaccacggatcaacaaatggctcgcaagtgttctgactgctgcggaggcaaaggccggggaaagtgttatggcccacagtgtctgtgccggacgcgtgaggacctgaagaacgtgttcccacctgaggtggccgtgttcgagcctagcaaggccgagatcgcccacacccagaaagccaccctcgtgtgcctggctaccggcttctaccccgaccatgtggaactgtcttggtgggtcaacggcaaagaggtgcacagcggcgtgtgtaccgacccccagccactgaaagaacagcccgccctgaacgacagccggtactgcctgagcagcagactgagagtgtccgccaccttctggcagaacccccggaaccacttcagatgccaggtgcagttctacggcctgagcgagaacgacgagtggacccaggacagagccaagcccgtgacccagatcgtgtctgccgaagcctggggcagagccgattgcggcatcaccagcgccagctaccaccagggcgtgctgagcgccaccatcctgtacgagatcctgctgggcaaggccaccctgtacgccgtgctggtgtctgccctggtgctgatggctatggtcaagcggaaggacagccgggga

SEQ ID NO: 17489 - DNA, 2085 bp, synthetic construct
  source 1..2085: mol_type = other DNA
atggccttaccagtgaccgccttgctcctgccgctggccttgctgctccacgccgccaggccgctcgagatccagaaccctgatcctgccgtgtaccagctgcgggatagcaagagcagcgacaagagcgtgtgtctgttcaccgacttcgacagccagaccaacgtgtcccagagcaaggactccgacgtgtacatcaccgataagtgcgtgctggacatgcggagcatggacttcaagagcaactccgccgtggcctggtccaacaagtccgatttcgcctgcgccaacgccttcaacaacagcattatccccgaggacacattcttcccaagcagcgacgtgccctgcgacgtgaagctggtggaaaagagcttcgagacagacaccaacctgaacttccagaacctgagcgtgatcggcttcagaatcctgctgctgaaagtggccggctttaacctgctgatgaccctgcggctgtggtccagcagggccaagcgatctggatctggagcaacaaacttctcactactcaaacaagcaggtgacgtggaggagaatcccgggcctactagcatggccttaccagtgaccgccttgctcctgccgctggccttgctgctccacgccgccaggccgttcgaagtgtgtatgccttgttttaccacggatcaacaaatggctcgcaagtgttctgactgctgcggaggcaaaggccggggaaagtgttatggcccacagtgtctgtgccggggtaccggcggaggcggatctggcggcggaggtagcggtggcggaggatctgaattcgacatccagatgacacagagccctagcagcctgtctgccagcgtgggagacagagtgaccatcacatgcaaggccagcgaccacatcaacaactggctggcctggtatcagcagaagcctggacaggcccctaagctgctgatctacggcgctaccacactggaaacaggcgtgcccagcagattttctggcagcggctctggcaccgactacaccctgacaatatccagcctccagcctgaggacttcgccacctactactgtcagcagagctggaacaccccttggacattcggccagggcaccaagctggaaatcaagagaggcggaggcggaagtggaggcggaggatctggcggcggaggctctcaagttcagcttcaacagcctggcgctgagctggtcaaacctggcgcttctgtgaagatgagctgcaaagccagcggctacgccttcagcagctactggatcaactggatgaagcagaaacccggccagggactcgaatggatcggccaaatctatcccggcgacggcgacaccaactacaacggcaagttcaagggcagagccacactgaccgccgatacctctagcagcacagcctacatgcagctgagcagcctgaccagcgaagatagcgccgtgtacttctgtgcccggtccatcacaacagtcgtgggctgcgctatggactattggggccagggaacaagcgtgaccgtgtctagtacgcgtgaggacctgaagaacgtgttcccacctgaggtggccgtgttcgagcctagcaaggccgagatcgcccacacccagaaagccaccctcgtgtgcctggctaccggcttctaccccgaccatgtggaactgtcttggtgggtcaacggcaaagaggtgcacagcggcgtgtgtaccgacccccagccactgaaagaacagcccgccctgaacgacagccggtactgcctgagcagcagactgagagtgtccgccaccttctggcagaacccccggaaccacttcagatgccaggtgcagttctacggcctgagcgagaacgacgagtggacccaggacagagccaagcccgtgacccagatcgtgtctgccgaagcctggggcagagccgattgcggcatcaccagcgccagctaccaccagggcgtgctgagcgccaccatcctgtacgagatcctgctgggcaaggccaccctgtacgccgtgctggtgtctgccctggtgctgatggctatggtcaagcggaaggacagccgggga

SEQ ID NO: 17490 - DNA, 2475 bp, synthetic construct
  source 1..2475: mol_type = other DNA
atggccttaccagtgaccgccttgctcctgccgctggccttgctgctccacgccgccaggccgctcgagatccagaaccctgatcctgccgtgtaccagctgcgggatagcaagagcagcgacaagagcgtgtgtctgttcaccgacttcgacagccagaccaacgtgtcccagagcaaggactccgacgtgtacatcaccgataagtgcgtgctggacatgcggagcatggacttcaagagcaactccgccgtggcctggtccaacaagtccgatttcgcctgcgccaacgccttcaacaacagcattatccccgaggacacattcttcccaagcagcgacgtgccctgcgacgtgaagctggtggaaaagagcttcgagacagacaccaacctgaacttccagaacctgagcgtgatcggcttcagaatcctgctgctgaaagtggccggctttaacctgctgatgaccctgcggctgtggtccagcagggccaagcgatctggatctggagcaacaaacttctcactactcaaacaagcaggtgacgtggaggagaatcccgggcctactagcatggccttaccagtgaccgccttgctcctgccgctggccttgctgctccacgccgccaggccgttcgaaagccccgtagctcctgcctgtgaccccagactcctaaataaactgctgcgtgactcccacctccttcacagccgactgagtcagtgtcccgacgtggaccctttgtctatccctgttctgctgcctgctgtggactttagcctgggagaatggaaaacccagacggaacagagcaaggcacaggacattctaggggcagtgtcccttctactggagggagtgatggcagcacgaggacagttggaaccctcctgcctctcatccctcctgggacagctttctgggcaggttcgcctcctcttgggggccctgcagggcctcctaggaacccagcttcctctacagggcaggaccacagctcacaaggaccccaatgccctcttcttgagcttgcaacaactgcttcggggaaaggtgcgcttcctgcttctggtagaaggtcccaccctctgtgtcagacggaccctgccaaccacagctgtcccaagcagtacttctggtaccggcggaggcggatctggcggcggaggtagcggtggcggaggatctgaattcgacatccagatgacacagagccctagcagcctgtctgccagcgtgggagacagagtgaccatcacatgcaaggccagcgaccacatcaacaactggctggcctggtatcagcagaagcctggacaggcccctaagctgctgatctacggcgctaccacactggaaacaggcgtgcccagcagattttctggcagcggctctggcaccgactacaccctgacaatatccagcctccagcctgaggacttcgccacctactactgtcagcagagctggaacaccccttggacattcggccagggcaccaagctggaaatcaagagaggcggaggcggaagtggaggcggaggatctggcggcggaggctctcaagttcagcttcaacagcctggcgctgagctggtcaaacctggcgcttctgtgaagatgagctgcaaagccagcggctacgccttcagcagctactggatcaactggatgaagcagaaacccggccagggactcgaatggatcggccaaatctatcccggcgacggcgacaccaactacaacggcaagttcaagggcagagccacactgaccgccgatacctctagcagcacagcctacatgcagctgagcagcctgaccagcgaagatagcgccgtgtacttctgtgcccggtccatcacaacagtcgtgggctgcgctatggactattggggccagggaacaagcgtgaccgtgtctagtacgcgtgaggacctgaagaacgtgttcccacctgaggtggccgtgttcgagcctagcaaggccgagatcgcccacacccagaaagccaccctcgtgtgcctggctaccggcttctaccccgaccatgtggaactgtcttggtgggtcaacggcaaagaggtgcacagcggcgtgtgtaccgacccccagccactgaaagaacagcccgccctgaacgacagccggtactgcctgagcagcagactgagagtgtccgccaccttctggcagaacccccggaaccacttcagatgccaggtgcagttctacggcctgagcgagaacgacgagtggacccaggacagagccaagcccgtgacccagatcgtgtctgccgaagcctggggcagagccgattgcggcatcaccagcgccagctaccaccagggcgtgctgagcgccaccatcctgtacgagatcctgctgggcaaggccaccctgtacgccgtgctggtgtctgccctggtgctgatggctatggtcaagcggaaggacagccgggga

SEQ ID NO: 17491 - DNA, 2196 bp, synthetic construct
  source 1..2196: mol_type = other DNA
atggccttaccagtgaccgccttgctcctgccgctggccttgctgctccacgccgccaggccgctcgagatccagaaccctgatcctgccgtgtaccagctgcgggatagcaagagcagcgacaagagcgtgtgtctgttcaccgacttcgacagccagaccaacgtgtcccagagcaaggactccgacgtgtacatcaccgataagtgcgtgctggacatgcggagcatggacttcaagagcaactccgccgtggcctggtccaacaagtccgatttcgcctgcgccaacgccttcaacaacagcattatccccgaggacacattcttcccaagcagcgacgtgccctgcgacgtgaagctggtggaaaagagcttcgagacagacaccaacctgaacttccagaacctgagcgtgatcggcttcagaatcctgctgctgaaagtggccggctttaacctgctgatgaccctgcggctgtggtccagcagggccaagcgatctggatctggagcaacaaacttctcactactcaaacaagcaggtgacgtggaggagaatcccgggcctactagcatggccttaccagtgaccgccttgctcctgccgctggccttgctgctccacgccgccaggccgttcgaaatgggcagctgggaagagttcgagctgagactgaacgccatcgaggaacggctgtatgccctcggaggatctgaagccgagctggcctacttcgagtacgtgatcgccgacttcgagggcaacctgcagcggtacaaaggcaagggcaaccctgaagtggaagccctgtacttcgaggccgacgccatcttcgaggaactggtggcctacagacacaacggtaccggcggaggcggatctggcggcggaggtagcggtggcggaggatctgaattcgacatccagatgacacagagccctagcagcctgtctgccagcgtgggagacagagtgaccatcacatgcaaggccagcgaccacatcaacaactggctggcctggtatcagcagaagcctggacaggcccctaagctgctgatctacggcgctaccacactggaaacaggcgtgcccagcagattttctggcagcggctctggcaccgactacaccctgacaatatccagcctccagcctgaggacttcgccacctactactgtcagcagagctggaacaccccttggacattcggccagggcaccaagctggaaatcaagagaggcggaggcggaagtggaggcggaggatctggcggcggaggctctcaagttcagcttcaacagcctggcgctgagctggtcaaacctggcgcttctgtgaagatgagctgcaaagccagcggctacgccttcagcagctactggatcaactggatgaagcagaaacccggccagggactcgaatggatcggccaaatctatcccggcgacggcgacaccaactacaacggcaagttcaagggcagagccacactgaccgccgatacctctagcagcacagcctacatgcagctgagcagcctgaccagcgaagatagcgccgtgtacttctgtgcccggtccatcacaacagtcgtgggctgcgctatggactattggggccagggaacaagcgtgaccgtgtctagtacgcgtgaggacctgaagaacgtgttcccacctgaggtggccgtgttcgagcctagcaaggccgagatcgcccacacccagaaagccaccctcgtgtgcctggctaccggcttctaccccgaccatgtggaactgtcttggtgggtcaacggcaaagaggtgcacagcggcgtgtgtaccgacccccagccactgaaagaacagcccgccctgaacgacagccggtactgcctgagcagcagactgagagtgtccgccaccttctggcagaacccccggaaccacttcagatgccaggtgcagttctacggcctgagcgagaacgacgagtggacccaggacagagccaagcccgtgacccagatcgtgtctgccgaagcctggggcagagccgattgcggcatcaccagcgccagctaccaccagggcgtgctgagcgccaccatcctgtacgagatcctgctgggcaaggccaccctgtacgccgtgctggtgtctgccctggtgctgatggctatggtcaagcggaaggacagccgggga

SEQ ID NO: 17492 - DNA, 2289 bp, synthetic construct
  source 1..2289: mol_type = other DNA
atggccttaccagtgaccgccttgctcctgccgctggccttgctgctccacgccgccaggccgctcgaggagctgggagagcctcagctgtgctatatcctggacgccatcctgtttctgtacggcatcgtgctgaccctgctgtactgccggctgaagatccaagtgcggaaggccgccatcaccagctacgagaaatccgacggcgtgtacaccggcctgagcaccagaaatcaagagacatacgagacactgaagcacgaaaagcctccacaaagggccaagcgatctggatctggagcaacaaacttctcactactcaaacaagcaggtgacgtggaggagaatcccgggcctactagcatggccttaccagtgaccgccttgctcctgccgctggccttgctgctccacgccgccaggccggacatccagatgacacagactacatcctccctgtctgcctctctgggagacagagtcaccatcagttgcagggcaagtcaggacattagtaaatatttaaattggtatcagcagaaaccagatggaactgttaaactcctgatctaccatacatcaagattacactcaggagtcccatcaaggttcagtggcagtgggtctggaacagattattctctcaccattagcaacctggagcaagaagatattgccacttacttttgccaacagggtaatacgcttccgtacacgttcggaggggggaccaagctggagatcacaggtggcggtggctcgggcggtggtgggtcgggtggcggcggatctgaggtgaaactgcaggagtcaggacctggcctggtggcgccctcacagagcctgtccgtcacatgcactgtctcaggggtctcattacccgactatggtgtaagctggattcgccagcctccacgaaagggtctggagtggctgggagtaatatggggtagtgaaaccacatactataattcagctctcaaatccagactgaccatcatcaaggacaactccaagagccaagttttcttaaaaatgaacagtctgcaaactgatgacacagccatttactactgtgccaaacattattactacggtggtagctatgctatggactactggggtcaaggaacctcagtcaccgtctcctcaacgcgtcagagttttgggttgttggaccctaaattgtgctatctgttggacggaatcctgttcatttacggagtgatcctgaccgcattgttcctgcgggttaagttttccagatccgcagacgcacccgcttaccaacaagggcagaaccaactctacaatgaacttaatttggggcggagggaagagtacgacgttctggacaaaaggaggggacgagatcccgagatgggcggaaagcctcagcgaaggaagaatccgcaagaggggctttataacgaactccagaaagataaaatggcagaagcctatagtgagattgggatgaagggagaaaggaggaggggtaaaggtcacgatgggttgtaccaaggattgagcacagccactaaagatacctatgatgcgctccacatgcaggccctgccgccaagacgcgccaagagaagcggatctggcgtgaagcagaccctgaatttcgacctgctgaagctggctggcgacgtggaatccaacccaggcccttctagaggccatatgaccgagtacaagcccacggtgcgcctcgccacccgcgacgacgtccccagggccgtacgcaccctcgccgccgcgttcgccgactaccccgccacgcgccacaccgtcgatccggaccgccacatcgagcgggtcaccgagctgcaagaactcttcctcacgcgcgtcgggctcgacatcggcaaggtgtgggtcgcggacgacggcgccgcggtggcggtctggaccacgccggagagcgtcgaagcgggggcggtgttcgccgagatcggcccgcgcatggccgagttgagcggttcccggctggccgcgcagcaacagatggaaggcctcctggcgccgcaccggcccaaggagcccgcgtggttcctggccaccgtcggcgtctcgcccgaccaccagggcaagggtctgggcagcgccgtcgtgctccccggagtggaggcggccgagcgcgccggggtgcccgccttcctggagacctccgcgccccgcaacctccccttctacgagcggctcggcttcaccgtcaccgccgacgtcgaggtgcccgaaggaccgcgcacctggtgcatgacccgcaagcccggtgcctga

SEQ ID NO: 17493 - DNA, 2292 bp, synthetic construct
  source 1..2292: mol_type = other DNA
atggccttaccagtgaccgccttgctcctgccgctggccttgctgctccacgccgccaggccgctcgaggagctgggagagcctcagctgtgctatatcctggacgccatcctgtttctgtacggcatcgtgctgaccctgctgtactgccggctgaagatccaagtgcggaaggccgccatcaccagctacgagaaatccgacggcgtgtacaccggcctgagcaccagaaatcaagagacatacgagacactgaagcacgaaaagcctccacaaagggccaagcgatctggatctggagcaacaaacttctcactactcaaacaagcaggtgacgtggaggagaatcccgggcctactagcaccatggccttaccagtgaccgccttgctcctgccgctggccttgctgctccacgccgccaggccggagatcgtgatgacccagagccctgccaccctgtctctgagccctggcgaaagagccaccctgagctgtagagccagccaggacatcagcaagtacctgaactggtatcagcagaagcccggccaggcccccagactgctgatctaccacaccagcagactgcacagcggcatccccgccagattttctggctctggcagcggcaccgactacaccctgacaatcagcagcctccagcccgaggacttcgccgtgtacttctgtcagcaaggcaacaccctgccctacaccttcggccagggcaccaagctggaaatcaagggcggaggcggaagtggaggcggaggatctggcggcggaggctctcaggtgcaactccaggaatctggccctggcctcgtgaagcccagcgagacactgagcctgacctgtaccgtgtccggcgtgtccctgcctgactatggcgtgtcctggatcagacagccccctggcaagggcctggaatggatcggagtgatttggggcagcgaaaccacctactacaacagctccctgaagtccagagtgaccatctccaaggacaactccaagaaccaggtgtccctgaagctgagcagcgtgacagccgccgacaccgccgtgtattactgcgccaagcactactactacggcggcagctacgctatggactactggggccagggaaccctcgtgaccgtgtctagtacgcgtcagagttttgggttgttggaccctaaattgtgctatctgttggacggaatcctgttcatttacggagtgatcctgaccgcattgttcctgcgggttaagttttccagatccgcagacgcacccgcttaccaacaagggcagaaccaactctacaatgaacttaatttggggcggagggaagagtacgacgttctggacaaaaggaggggacgagatcccgagatgggcggaaagcctcagcgaaggaagaatccgcaagaggggctttataacgaactccagaaagataaaatggcagaagcctatagtgagattgggatgaagggagaaaggaggaggggtaaaggtcacgatgggttgtaccaaggattgagcacagccactaaagatacctatgatgcgctccacatgcaggccctgccgccaagacgcgccaagagaagcggatctggcgtgaagcagaccctgaatttcgacctgctgaagctggctggcgacgtggaatccaacccaggcccttctagaggccatatgaccgagtacaagcccacggtgcgcctcgccacccgcgacgacgtccccagggccgtacgcaccctcgccgccgcgttcgccgactaccccgccacgcgccacaccgtcgatccggaccgccacatcgagcgggtcaccgagctgcaagaactcttcctcacgcgcgtcgggctcgacatcggcaaggtgtgggtcgcggacgacggcgccgcggtggcggtctggaccacgccggagagcgtcgaagcgggggcggtgttcgccgagatcggcccgcgcatggccgagttgagcggttcccggctggccgcgcagcaacagatggaaggcctcctggcgccgcaccggcccaaggagcccgcgtggttcctggccaccgtcggcgtctcgcccgaccaccagggcaagggtctgggcagcgccgtcgtgctccccggagtggaggcggccgagcgcgccggggtgcccgccttcctggagacctccgcgccccgcaacctccccttctacgagcggctcggcttcaccgtcaccgccgacgtcgaggtgcccgaaggaccgcgcacctggtgcatgacccgcaagcccggtgcctga

SEQ ID NO: 17494 - DNA, 2295 bp, synthetic construct
  source 1..2295: mol_type = other DNA
atggccttaccagtgaccgccttgctcctgccgctggccttgctgctccacgccgccaggccgctcgaggagctgggagagcctcagctgtgctatatcctggacgccatcctgtttctgtacggcatcgtgctgaccctgctgtactgccggctgaagatccaagtgcggaaggccgccatcaccagctacgagaaatccgacggcgtgtacaccggcctgagcaccagaaatcaagagacatacgagacactgaagcacgaaaagcctccacaaagggccaagcgatctggatctggagcaacaaacttctcactactcaaacaagcaggtgacgtggaggagaatcccgggcctactagcaccatggccttaccagtgaccgccttgctcctgccgctggccttgctgctccacgccgccaggccggacgagatcgtgctgacacagagccccgccaccctgtcactgtctccaggcgaaagagccaccctgagctgtagcgccagcagcagcgtgtcctacatgcactggtatcagcagaagcccggccaggcccccagactgctgatctacgataccagcaagctggcctccggcatccccgccagattttctggcagcggctccggcaccgacttcaccctgacaatcagcagcctggaacccgaggacgtggccgtgtactactgttttcaaggcagcgtgtaccccttcaccttcggccagggcaccaagctggaaatcaagagaggtggcggtggctcgggcggtggtgggtcgggtggcggcggatctcaggtgcagctccaggaatctggccctggcctcgtgaagcctagccagaccctgagcctgacctgtaccgtgtctggcggcagcatcagcacaagcggcatgggcgtgggctggatcagacagcaccctggcaagggcctggaatggatcggccacatttggtgggacgacgacaagcggtacaaccccgccctgaagtccagagtgaccatcagcgtggacaccagcaagaaccagttcagcctgaagctgagcagcgtgacagccgccgataccgccgtgtattattgcgcccggatggaactgtggtcctactacttcgactactggggccagggaaccctcgtgaccgtgtctagtacgcgtcagagttttgggttgttggaccctaaattgtgctatctgttggacggaatcctgttcatttacggagtgatcctgaccgcattgttcctgcgggttaagttttccagatccgcagacgcacccgcttaccaacaagggcagaaccaactctacaatgaacttaatttggggcggagggaagagtacgacgttctggacaaaaggaggggacgagatcccgagatgggcggaaagcctcagcgaaggaagaatccgcaagaggggctttataacgaactccagaaagataaaatggcagaagcctatagtgagattgggatgaagggagaaaggaggaggggtaaaggtcacgatgggttgtaccaaggattgagcacagccactaaagatacctatgatgcgctccacatgcaggccctgccgccaagacgcgccaagagaagcggatctggcgtgaagcagaccctgaatttcgacctgctgaagctggctggcgacgtggaatccaacccaggcccttctagaggccatatgaccgagtacaagcccacggtgcgcctcgccacccgcgacgacgtccccagggccgtacgcaccctcgccgccgcgttcgccgactaccccgccacgcgccacaccgtcgatccggaccgccacatcgagcgggtcaccgagctgcaagaactcttcctcacgcgcgtcgggctcgacatcggcaaggtgtgggtcgcggacgacggcgccgcggtggcggtctggaccacgccggagagcgtcgaagcgggggcggtgttcgccgagatcggcccgcgcatggccgagttgagcggttcccggctggccgcgcagcaacagatggaaggcctcctggcgccgcaccggcccaaggagcccgcgtggttcctggccaccgtcggcgtctcgcccgaccaccagggcaagggtctgggcagcgccgtcgtgctccccggagtggaggcggccgagcgcgccggggtgcccgccttcctggagacctccgcgccccgcaacctccccttctacgagcggctcggcttcaccgtcaccgccgacgtcgaggtgcccgaaggaccgcgcacctggtgcatgacccgcaagcccggtgcctga

SEQ ID NO: 17495 - DNA, 2283 bp, synthetic construct
  source 1..2283: mol_type = other DNA
atggccttaccagtgaccgccttgctcctgccgctggccttgctgctccacgccgccaggccgctcgaggagctgggagagcctcagctgtgctatatcctggacgccatcctgtttctgtacggcatcgtgctgaccctgctgtactgccggctgaagatccaagtgcggaaggccgccatcaccagctacgagaaatccgacggcgtgtacaccggcctgagcaccagaaatcaagagacatacgagacactgaagcacgaaaagcctccacaaagggccaagcgatctggatctggagcaacaaacttctcactactcaaacaagcaggtgacgtggaggagaatcccgggcctactagcatggccttaccagtgaccgccttgctcctgccgctggccttgctgctccacgccgccaggccggacatccagatgacacagagccctagcagcctgtctgccagcgtgggagacagagtgaccatcacctgtagagccagccaggacatcagcaactacctgaactggtatcagcagaagcccggcaaggcccctaagctgctgatctactacaccagcagactgcacagcggcgtgcccagcagattttctggctctggcagcggcaccgacttcaccctgacaatatctagcctccagcctgaggacttcgccacctactattgccagcagggcaacaccctgccttacacatttggacagggcaccaaggtggaaatcaagagaggcggaggcggaagtggaggcggaggatctggcggcggaggctctgaagtgcagctggttgaatcaggtggcggcctggttcaacctggcggatctctgagactgagctgtgccgccagcggcttcaccttcagcgactactttatgagctgggtccgacaggcccctggcaaaggacttgaatgggtcgccaccatcagcaatggcggcacctacacttactaccccgacagcgtgaagggcagattcaccatctccagagacaacagcaagaacaccctgtacctccagatgaactccctgagagccgaggacaccgccgtgtactactgcgccagattcgacggctacatcttcgactattggggccagggcaccctggtcacagtctcttctacgcgtcagagttttgggttgttggaccctaaattgtgctatctgttggacggaatcctgttcatttacggagtgatcctgaccgcattgttcctgcgggttaagttttccagatccgcagacgcacccgcttaccaacaagggcagaaccaactctacaatgaacttaatttggggcggagggaagagtacgacgttctggacaaaaggaggggacgagatcccgagatgggcggaaagcctcagcgaaggaagaatccgcaagaggggctttataacgaactccagaaagataaaatggcagaagcctatagtgagattgggatgaagggagaaaggaggaggggtaaaggtcacgatgggttgtaccaaggattgagcacagccactaaagatacctatgatgcgctccacatgcaggccctgccgccaagacgcgccaagagaagcggatctggcgtgaagcagaccctgaatttcgacctgctgaagctggctggcgacgtggaatccaacccaggcccttctagaggccatatgaccgagtacaagcccacggtgcgcctcgccacccgcgacgacgtccccagggccgtacgcaccctcgccgccgcgttcgccgactaccccgccacgcgccacaccgtcgatccggaccgccacatcgagcgggtcaccgagctgcaagaactcttcctcacgcgcgtcgggctcgacatcggcaaggtgtgggtcgcggacgacggcgccgcggtggcggtctggaccacgccggagagcgtcgaagcgggggcggtgttcgccgagatcggcccgcgcatggccgagttgagcggttcccggctggccgcgcagcaacagatggaaggcctcctggcgccgcaccggcccaaggagcccgcgtggttcctggccaccgtcggcgtctcgcccgaccaccagggcaagggtctgggcagcgccgtcgtgctccccggagtggaggcggccgagcgcgccggggtgcccgccttcctggagacctccgcgccccgcaacctccccttctacgagcggctcggcttcaccgtcaccgccgacgtcgaggtgcccgaaggaccgcgcacctggtgcatgacccgcaagcccggtgcctga

SEQ ID NO: 17496 - DNA, 2295 bp, synthetic construct
  source 1..2295: mol_type = other DNA
atggccttaccagtgaccgccttgctcctgccgctggccttgctgctccacgccgccaggccgctcgaggagctgggagagcctcagctgtgctatatcctggacgccatcctgtttctgtacggcatcgtgctgaccctgctgtactgccggctgaagatccaagtgcggaaggccgccatcaccagctacgagaaatccgacggcgtgtacaccggcctgagcaccagaaatcaagagacatacgagacactgaagcacgaaaagcctccacaaagggccaagcgatctggatctggagcaacaaacttctcactactcaaacaagcaggtgacgtggaggagaatcccgggcctactagcatggccttaccagtgaccgccttgctcctgccgctggccttgctgctccacgccgccaggccggacatccagatgacacagagccctagcagcctgtctgccagcgtgggagacagagtgaccatcacatgcaaggccagcgaccacatcaacaactggctggcctggtatcagcagaagcctggacaggcccctaagctgctgatctacggcgctaccacactggaaacaggcgtgcccagcagattttctggcagcggctctggcaccgactacaccctgacaatatccagcctccagcctgaggacttcgccacctactactgtcagcagagctggaacaccccttggacattcggccagggcaccaagctggaaatcaagagaggcggaggcggaagtggaggcggaggatctggcggcggaggctctcaagttcagcttcaacagcctggcgctgagctggtcaaacctggcgcttctgtgaagatgagctgcaaagccagcggctacgccttcagcagctactggatcaactggatgaagcagaaacccggccagggactcgaatggatcggccaaatctatcccggcgacggcgacaccaactacaacggcaagttcaagggcagagccacactgaccgccgatacctctagcagcacagcctacatgcagctgagcagcctgaccagcgaagatagcgccgtgtacttctgtgcccggtccatcacaacagtcgtgggctgcgctatggactattggggccagggaacaagcgtgaccgtgtctagtacgcgtcagagttttgggttgttggaccctaaattgtgctatctgttggacggaatcctgttcatttacggagtgatcctgaccgcattgttcctgcgggttaagttttccagatccgcagacgcacccgcttaccaacaagggcagaaccaactctacaatgaacttaatttggggcggagggaagagtacgacgttctggacaaaaggaggggacgagatcccgagatgggcggaaagcctcagcgaaggaagaatccgcaagaggggctttataacgaactccagaaagataaaatggcagaagcctatagtgagattgggatgaagggagaaaggaggaggggtaaaggtcacgatgggttgtaccaaggattgagcacagccactaaagatacctatgatgcgctccacatgcaggccctgccgccaagacgcgccaagagaagcggatctggcgtgaagcagaccctgaatttcgacctgctgaagctggctggcgacgtggaatccaacccaggcccttctagaggccatatgaccgagtacaagcccacggtgcgcctcgccacccgcgacgacgtccccagggccgtacgcaccctcgccgccgcgttcgccgactaccccgccacgcgccacaccgtcgatccggaccgccacatcgagcgggtcaccgagctgcaagaactcttcctcacgcgcgtcgggctcgacatcggcaaggtgtgggtcgcggacgacggcgccgcggtggcggtctggaccacgccggagagcgtcgaagcgggggcggtgttcgccgagatcggcccgcgcatggccgagttgagcggttcccggctggccgcgcagcaacagatggaaggcctcctggcgccgcaccggcccaaggagcccgcgtggttcctggccaccgtcggcgtctcgcccgaccaccagggcaagggtctgggcagcgccgtcgtgctccccggagtggaggcggccgagcgcgccggggtgcccgccttcctggagacctccgcgccccgcaacctccccttctacgagcggctcggcttcaccgtcaccgccgacgtcgaggtgcccgaaggaccgcgcacctggtgcatgacccgcaagcccggtgcctga

SEQ ID NO: 17497 - DNA, 2301 bp, synthetic construct
  source 1..2301: mol_type = other DNA
atggccttaccagtgaccgccttgctcctgccgctggccttgctgctccacgccgccaggccgctcgaggagctgggagagcctcagctgtgctatatcctggacgccatcctgtttctgtacggcatcgtgctgaccctgctgtactgccggctgaagatccaagtgcggaaggccgccatcaccagctacgagaaatccgacggcgtgtacaccggcctgagcaccagaaatcaagagacatacgagacactgaagcacgaaaagcctccacaaagggccaagcgatctggatctggagcaacaaacttctcactactcaaacaagcaggtgacgtggaggagaatcccgggcctactagcatggccttaccagtgaccgccttgctcctgccgctggccttgctgctccacgccgccaggccgcagatcgtgctgtctcagtctcctgccatcctgagcgcttccccaggcgagaaagtgaccatgacctgtagagccagcagcagcgtgtcctacatgcactggtatcagcagaagcccggcagcagccctaagccttggatctacgccaccagcaatctggcctctggcgtgccagccagattttctggctctggcagcggcaccagctacagcttcacaatcagcagagtggaagccgaggacgccgccacctactattgtcagcagtggaccttcaatcctcctaccttcggcggaggcacccggctggaaatcaaaagaacagtggctgctggcggaggcggaagtggaggcggaggatctggcggcggaggctctcaggcttatctgcaacagagcggagccgaactcgtcagacctggcgcttctgtgaagatgagctgcaaggccagcggctacaccttcaccagctataatatgcactgggtcaagcagacccctcggcagggactcgaatggatcggcggaatctatcccggcaacggcgacacctcctacaaccagaagttcaagggcaaagccacactgaccgtgggcaagagcagcagcaccgcctatatgcagctcagcagcctgaccagcgaggacagcgccgtgtacttctgcgccagatacgactacaactacgctatggactactggggccagggcaccagcgtgacagttagctctgccagcacgcgtcagagttttgggttgttggaccctaaattgtgctatctgttggacggaatcctgttcatttacggagtgatcctgaccgcattgttcctgcgggttaagttttccagatccgcagacgcacccgcttaccaacaagggcagaaccaactctacaatgaacttaatttggggcggagggaagagtacgacgttctggacaaaaggaggggacgagatcccgagatgggcggaaagcctcagcgaaggaagaatccgcaagaggggctttataacgaactccagaaagataaaatggcagaagcctatagtgagattgggatgaagggagaaaggaggaggggtaaaggtcacgatgggttgtaccaaggattgagcacagccactaaagatacctatgatgcgctccacatgcaggccctgccgccaagacgcgccaagagaagcggatctggcgtgaagcagaccctgaatttcgacctgctgaagctggctggcgacgtggaatccaacccaggcccttctagaggccatatgaccgagtacaagcccacggtgcgcctcgccacccgcgacgacgtccccagggccgtacgcaccctcgccgccgcgttcgccgactaccccgccacgcgccacaccgtcgatccggaccgccacatcgagcgggtcaccgagctgcaagaactcttcctcacgcgcgtcgggctcgacatcggcaaggtgtgggtcgcggacgacggcgccgcggtggcggtctggaccacgccggagagcgtcgaagcgggggcggtgttcgccgagatcggcccgcgcatggccgagttgagcggttcccggctggccgcgcagcaacagatggaaggcctcctggcgccgcaccggcccaaggagcccgcgtggttcctggccaccgtcggcgtctcgcccgaccaccagggcaagggtctgggcagcgccgtcgtgctccccggagtggaggcggccgagcgcgccggggtgcccgccttcctggagacctccgcgccccgcaacctccccttctacgagcggctcggcttcaccgtcaccgccgacgtcgaggtgcccgaaggaccgcgcacctggtgcatgacccgcaagcccggtgcctga

SEQ ID NO: 17498 - DNA, 2295 bp, synthetic construct
  source 1..2295: mol_type = other DNA
atggccttaccagtgaccgccttgctcctgccgctggccttgctgctccacgccgccaggccgctcgaggagctgggagagcctcagctgtgctatatcctggacgccatcctgtttctgtacggcatcgtgctgaccctgctgtactgccggctgaagatccaagtgcggaaggccgccatcaccagctacgagaaatccgacggcgtgtacaccggcctgagcaccagaaatcaagagacatacgagacactgaagcacgaaaagcctccacaaagggccaagcgatctggatctggagcaacaaacttctcactactcaaacaagcaggtgacgtggaggagaatcccgggcctactagcatggccttaccagtgaccgccttgctcctgccgctggccttgctgctccacgccgccaggccggagatcgtgctgacacagagccctgccaccctgtctctgagccctggcgaaagagccaccctgagctgtagagccagccagagcgtgtccagctacctggcctggtatcagcagaagcccggccaggctccccggctgctgatctacgatgccagcaatagagccaccggcatccccgccagattttccggctctggcagcggcaccgacttcaccctgaccatcagctccctggaacccgaggacttcgccgtgtactactgccagcagcggagcaactggcccatcacattcggccagggcacccggctggaaatcaaaggcggaggcggaagtggaggcggaggatctggcggcggaggctctgaggtgcagcttgttgagtctggcggaggactggtgcagcccgatagaagcctgagactgtcttgtgccgccagcggcttcaccttccacgattatgccatgcactgggtccgacaggcccctggcaaaggacttgaatgggtgtccaccatctcttggaacagcggcacaatcggctacgccgactctgtgaagggcagattcaccatcagccgggacaacgccaagaacagcctgtacctccagatgaactccctgagagccgaggacacagccctgtactactgcgccaaggacatccagtacggcaactactactacggcatggacgtgtggggccagggcacaacagtgacagtctcttctacgcgtcagagttttgggttgttggaccctaaattgtgctatctgttggacggaatcctgttcatttacggagtgatcctgaccgcattgttcctgcgggttaagttttccagatccgcagacgcacccgcttaccaacaagggcagaaccaactctacaatgaacttaatttggggcggagggaagagtacgacgttctggacaaaaggaggggacgagatcccgagatgggcggaaagcctcagcgaaggaagaatccgcaagaggggctttataacgaactccagaaagataaaatggcagaagcctatagtgagattgggatgaagggagaaaggaggaggggtaaaggtcacgatgggttgtaccaaggattgagcacagccactaaagatacctatgatgcgctccacatgcaggccctgccgccaagacgcgccaagagaagcggatctggcgtgaagcagaccctgaatttcgacctgctgaagctggctggcgacgtggaatccaacccaggcccttctagaggccatatgaccgagtacaagcccacggtgcgcctcgccacccgcgacgacgtccccagggccgtacgcaccctcgccgccgcgttcgccgactaccccgccacgcgccacaccgtcgatccggaccgccacatcgagcgggtcaccgagctgcaagaactcttcctcacgcgcgtcgggctcgacatcggcaaggtgtgggtcgcggacgacggcgccgcggtggcggtctggaccacgccggagagcgtcgaagcgggggcggtgttcgccgagatcggcccgcgcatggccgagttgagcggttcccggctggccgcgcagcaacagatggaaggcctcctggcgccgcaccggcccaaggagcccgcgtggttcctggccaccgtcggcgtctcgcccgaccaccagggcaagggtctgggcagcgccgtcgtgctccccggagtggaggcggccgagcgcgccggggtgcccgccttcctggagacctccgcgccccgcaacctccccttctacgagcggctcggcttcaccgtcaccgccgacgtcgaggtgcccgaaggaccgcgcacctggtgcatgacccgcaagcccggtgcctga

SEQ ID NO: 17499 - DNA, 2289 bp, synthetic construct
  source 1..2289: mol_type = other DNA
atggccttaccagtgaccgccttgctcctgccgctggccttgctgctccacgccgccaggccgctcgaggagctgggagagcctcagctgtgctatatcctggacgccatcctgtttctgtacggcatcgtgctgaccctgctgtactgccggctgaagatccaagtgcggaaggccgccatcaccagctacgagaaatccgacggcgtgtacaccggcctgagcaccagaaatcaagagacatacgagacactgaagcacgaaaagcctccacaaagggccaagcgatctggatctggagcaacaaacttctcactactcaaacaagcaggtgacgtggaggagaatcccgggcctactagcatggccttaccagtgaccgccttgctcctgccgctggccttgctgctccacgccgccaggccggacatccagatgacccagagccccagcagcctgtctgccagcgtgggcgacagagtgaccatcacctgtagagccagccaggacgtgaacaccgccgtggcctggtatcagcagaagcctggcaaggcccccaagctgctgatctacagcgccagcttcctggaaagcggcgtgcccagcagattcagcggaagcagaagcggcaccgacttcaccctgaccatcagctccctccagcccgaggacttcgccacctactactgccagcagcactacaccacccctcccaccttcggccagaccaaggtggaaatcaagagaggcggaggcggaagtggaggcggaggatctggcggcggaggctctgaagtgcaactggtggaatctggcggcggactggtgcagcctggcggatctctgagactgagctgtgccgccagcggcttcaacatcaaggacacctacatccactgggtgcgccaggcccctggaaagggactggaatgggtggcccggatctaccccaccaacggctacaccagatacgccgacagcgtgaagggccggttcaccatcagcgccgacaccagcaagaataccgcctacctccagatgaacagcctgcgggccgaggataccgccgtgtactactgctcaagatggggaggcgacggcttctacgctatggacgtgtggggccagggcacccttgtgaccgtgtcatctacgcgtcagagttttgggttgttggaccctaaattgtgctatctgttggacggaatcctgttcatttacggagtgatcctgaccgcattgttcctgcgggttaagttttccagatccgcagacgcacccgcttaccaacaagggcagaaccaactctacaatgaacttaatttggggcggagggaagagtacgacgttctggacaaaaggaggggacgagatcccgagatgggcggaaagcctcagcgaaggaagaatccgcaagaggggctttataacgaactccagaaagataaaatggcagaagcctatagtgagattgggatgaagggagaaaggaggaggggtaaaggtcacgatgggttgtaccaaggattgagcacagccactaaagatacctatgatgcgctccacatgcaggccctgccgccaagacgcgccaagagaagcggatctggcgtgaagcagaccctgaatttcgacctgctgaagctggctggcgacgtggaatccaacccaggcccttctagaggccatatgaccgagtacaagcccacggtgcgcctcgccacccgcgacgacgtccccagggccgtacgcaccctcgccgccgcgttcgccgactaccccgccacgcgccacaccgtcgatccggaccgccacatcgagcgggtcaccgagctgcaagaactcttcctcacgcgcgtcgggctcgacatcggcaaggtgtgggtcgcggacgacggcgccgcggtggcggtctggaccacgccggagagcgtcgaagcgggggcggtgttcgccgagatcggcccgcgcatggccgagttgagcggttcccggctggccgcgcagcaacagatggaaggcctcctggcgccgcaccggcccaaggagcccgcgtggttcctggccaccgtcggcgtctcgcccgaccaccagggcaagggtctgggcagcgccgtcgtgctccccggagtggaggcggccgagcgcgccggggtgcccgccttcctggagacctccgcgccccgcaacctccccttctacgagcggctcggcttcaccgtcaccgccgacgtcgaggtgcccgaaggaccgcgcacctggtgcatgacccgcaagcccggtgcctga

SEQ ID NO: 17500 - DNA, 1926 bp, synthetic construct
  source 1..1926: mol_type = other DNA
atggccttaccagtgaccgccttgctcctgccgctggccttgctgctccacgccgccaggccgctcgaggagctgggagagcctcagctgtgctatatcctggacgccatcctgtttctgtacggcatcgtgctgaccctgctgtactgccggctgaagatccaagtgcggaaggccgccatcaccagctacgagaaatccgacggcgtgtacaccggcctgagcaccagaaatcaagagacatacgagacactgaagcacgaaaagcctccacaaagggccaagcgatctggatctggagcaacaaacttctcactactcaaacaagcaggtgacgtggaggagaatcccgggcctactagcatggccctgcccgtgacagccctgctgctgcctctggctctgctgctgcacgccgccagacccgatgaattcgaggtgcaactggtggaaagcggcggaggcctggtgcaggctggcggatctctgagactgagctgtgccgccagcggcatcaccttcagcatcaacacaatgggctggtacagacaggcccctggcaagcagagggaactggtggccctgatctccagcatcggcgacacctactacgccgacagcgtgaagggccggttcaccatcagccgggacaacgccaagaacaccgtgtacctccagatgaacagcctgaagcccgaggacaccgccgtgtactactgcaagcggttcagaacagccgcccagggcaccgattattggggccagggaacacaagtgaccgtgtcctctacgcgtcagagttttgggttgttggaccctaaattgtgctatctgttggacggaatcctgttcatttacggagtgatcctgaccgcattgttcctgcgggttaagttttccagatccgcagacgcacccgcttaccaacaagggcagaaccaactctacaatgaacttaatttggggcggagggaagagtacgacgttctggacaaaaggaggggacgagatcccgagatgggcggaaagcctcagcgaaggaagaatccgcaagaggggctttataacgaactccagaaagataaaatggcagaagcctatagtgagattgggatgaagggagaaaggaggaggggtaaaggtcacgatgggttgtaccaaggattgagcacagccactaaagatacctatgatgcgctccacatgcaggccctgccgccaagacgcgccaagagaagcggatctggcgtgaagcagaccctgaatttcgacctgctgaagctggctggcgacgtggaatccaacccaggcccttctagaggccatatgaccgagtacaagcccacggtgcgcctcgccacccgcgacgacgtccccagggccgtacgcaccctcgccgccgcgttcgccgactaccccgccacgcgccacaccgtcgatccggaccgccacatcgagcgggtcaccgagctgcaagaactcttcctcacgcgcgtcgggctcgacatcggcaaggtgtgggtcgcggacgacggcgccgcggtggcggtctggaccacgccggagagcgtcgaagcgggggcggtgttcgccgagatcggcccgcgcatggccgagttgagcggttcccggctggccgcgcagcaacagatggaaggcctcctggcgccgcaccggcccaaggagcccgcgtggttcctggccaccgtcggcgtctcgcccgaccaccagggcaagggtctgggcagcgccgtcgtgctccccggagtggaggcggccgagcgcgccggggtgcccgccttcctggagacctccgcgccccgcaacctccccttctacgagcggctcggcttcaccgtcaccgccgacgtcgaggtgcccgaaggaccgcgcacctggtgcatgacccgcaagcccggtgcctga

SEQ ID NO: 17501 - DNA, 1926 bp, synthetic construct; identical to SEQ ID NO: 17500
  source 1..1926: mol_type = other DNA

SEQ ID NO: 17502 - DNA, 2721 bp, synthetic construct
  source 1..2721: mol_type = other DNA
atggccttaccagtgaccgccttgctcctgccgctggccttgctgctccacgccgccaggccgctcgaggagctgggagagcctcagctgtgctatatcctggacgccatcctgtttctgtacggcatcgtgctgaccctgctgtactgccggctgaagatccaagtgcggaaggccgccatcaccagctacgagaaatccgacggcgtgtacaccggcctgagcaccagaaatcaagagacatacgagacactgaagcacgaaaagcctccacaaagggccaagcgatctggatctggagcaacaaacttctcactactcaaacaagcaggtgacgtggaggagaatcccgggcctactagcatggccttaccagtgaccgccttgctcctgccgctggccttgctgctccacgccgccaggccgcaggtccagctcgtcgagtccggcggcggcctcgtccaggccggcgactccgtcaccctctcctgcaccgcctccggccgcaccttctcctcctacgccctcgcctggttccgccagcgccccggcaaggagcgcgagttcgtcgccggcctccgctggggcggccccaccaactacgccgactccgtcaaggaccgcttcaccatctccggcgactccgccaagcacaccatgtacctccagatgaactccctcaagcccgaggacaccgccgtctactactgcggctacaaccccggcggctgggccgtcccctcccagtacgagtacgactcctggggccagggcacccaggtcaccgtctcctccggtaccggcggaggcggatctggcggcggaggtagcggtggcggaggatctgaattcgacatccagatgacacagagccctagcagcctgtctgccagcgtgggagacagagtgaccatcacatgcaaggccagcgaccacatcaacaactggctggcctggtatcagcagaagcctggacaggcccctaagctgctgatctacggcgctaccacactggaaacaggcgtgcccagcagattttctggcagcggctctggcaccgactacaccctgacaatatccagcctccagcctgaggacttcgccacctactactgtcagcagagctggaacaccccttggacattcggccagggcaccaagctggaaatcaagagaggcggaggcggaagtggaggcggaggatctggcggcggaggctctcaagttcagcttcaacagcctggcgctgagctggtcaaacctggcgcttctgtgaagatgagctgcaaagccagcggctacgccttcagcagctactggatcaactggatgaagcagaaacccggccagggactcgaatggatcggccaaatctatcccggcgacggcgacaccaactacaacggcaagttcaagggcagagccacactgaccgccgatacctctagcagcacagcctacatgcagctgagcagcctgaccagcgaagatagcgccgtgtacttctgtgcccggtccatcacaacagtcgtgggctgcgctatggactattggggccagggaacaagcgtgaccgtgtctagtacgcgtcagagttttgggttgttggaccctaaattgtgctatctgttggacggaatcctgttcatttacggagtgatcctgaccgcattgttcctgcgggttaagttttccagatccgcagacgcacccgcttaccaacaagggcagaaccaactctacaatgaacttaatttggggcggagggaagagtacgacgttctggacaaaaggaggggacgagatcccgagatgggcggaaagcctcagcgaaggaagaatccgcaagaggggctttataacgaactccagaaagataaaatggcagaagcctatagtgagattgggatgaagggagaaaggaggaggggtaaaggtcacgatgggttgtaccaaggattgagcacagccactaaagatacctatgatgcgctccacatgcaggccctgccgccaagacgcgccaagagaagcggatctggcgtgaagcagaccctgaatttcgacctgctgaagctggctggcgacgtggaatccaacccaggcccttctagaggccatatgaccgagtacaagcccacggtgcgcctcgccacccgcgacgacgtccccagggccgtacgcaccctcgccgccgcgttcgccgactaccccgccacgcgccacaccgtcgatccggaccgccacatcgagcgggtcaccgagctgcaagaactcttcctcacgcgcgtcgggctcgacatcggcaaggtgtgggtcgcggacgacggcgccgcggtggcggtctggaccacgccggagagcgtcgaagcgggggcggtgttcgccgagatcggcccgcgcatggccgagttgagcggttcccggctggccgcgcagcaacagatggaaggcctcctggcgccgcaccggcccaaggagcccgcgtggttcctggccaccgtcggcgtctcgcccgaccaccagggcaagggtctgggcagcgccgtcgtgctccccggagtggaggcggccgagcgcgccggggtgcccgccttcctggagacctccgcgccccgcaacctccccttctacgagcggctcggcttcaccgtcaccgccgacgtcgaggtgcccgaaggaccgcgcacctggtgcatgacccgcaagcccggtgcctga

SEQ ID NO: 17503 - DNA, 3108 bp, synthetic construct
  source 1..3108: mol_type = other DNA
atggccttaccagtgaccgccttgctcctgccgctggccttgctgctccacgccgccaggccgctcgaggagctgggagagcctcagctgtgctatatcctggacgccatcctgtttctgtacggcatcgtgctgaccctgctgtactgccggctgaagatccaagtgcggaaggccgccatcaccagctacgagaaatccgacggcgtgtacaccggcctgagcaccagaaatcaagagacatacgagacactgaagcacgaaaagcctccacaaagggccaagcgatctggatctggagcaacaaacttctcactactcaaacaagcaggtgacgtggaggagaatcccgggcctactagcatggccttaccagtgaccgccttgctcctgccgctggccttgctgctccacgccgccaggccggaggttcagctgcttgagtctggcggaggactggttcaacctggcggaagcctgagactgtcttgtgccgccagcggcttcacctttagcagctacgccatgagctgggtccgacaggctcctggcaaaggactggaatgggtgtccagcatcagcggcagcggcgactacatctactacgccgatagcgtgaagggcagattcaccatcagccgggacatcagcaagaacaccctgtacctccagatgaacagcctgagagccgaggacaccgccgtgtactactgtgccaaagaaggcaccggcgctaacagcagcctggccgattatagaggccagggcacactggtcaccgtgtctagtggcggaggaagcggcggaggatctcaggtccagctcgtcgagtccggcggcggcctcgtccaggccggcgactccgtcaccctctcctgcaccgcctccggccgcaccttctcctcctacgccctcgcctggttccgccagcgccccggcaaggagcgcgagttcgtcgccggcctccgctggggcggccccaccaactacgccgactccgtcaaggaccgcttcaccatctccggcgactccgccaagcacaccatgtacctccagatgaactccctcaagcccgaggacaccgccgtctactactgcggctacaaccccggcggctgggccgtcccctcccagtacgagtacgactcctggggccagggcacccaggtcaccgtctcctccggtaccggcggaggcggatctggcggcggaggtagcggtggcggaggatctgaattcgacatccagatgacacagagccctagcagcctgtctgccagcgtgggagacagagtgaccatcacatgcaaggccagcgaccacatcaacaactggctggcctggtatcagcagaagcctggacaggcccctaagctgctgatctacggcgctaccacactggaaacaggcgtgcccagcagattttctggcagcggctctggcaccgactacaccctgacaatatccagcctccagcctgaggacttcgccacctactactgtcagcagagctggaacaccccttggacattcggccagggcaccaagctggaaatcaagagaggcggaggcggaagtggaggcggaggatctggcggcggaggctctcaagttcagcttcaacagcctggcgctgagctggtcaaacctggcgcttctgtgaagatgagctgcaaagccagcggctacgccttcagcagctactggatcaactggatgaagcagaaacccggccagggactcgaatggatcggccaaatctatcccggcgacggcgacaccaactacaacggcaagttcaagggcagagccacactgaccgccgatacctctagcagcacagcctacatgcagctgagcagcctgaccagcgaagatagcgccgtgtacttctgtgcccggtccatcacaacagtcgtgggctgcgctatggactattggggccagggaacaagcgtgaccgtgtctagtacgcgtcagagttttgggttgttggaccctaaattgtgctatctgttggacggaatcctgttcatttacggagtgatcctgaccgcattgttcctgcgggttaagttttccagatccgcagacgcacccgcttaccaacaagggcagaaccaactctacaatgaacttaatttggggcggagggaagagtacgacgttctggacaaaaggaggggacgagatcccgagatgggcggaaagcctcagcgaaggaagaatccgcaagaggggctttataacgaactccagaaagataaaatggcagaagcctatagtgagattgggatgaagggagaaaggaggaggggtaaaggtcacgatgggttgtaccaaggattgagcacagccactaaagatacctatgatgcgctccacatgcaggccctgccgccaagacgcgccaagagaagcggatctggcgtgaagcagaccctgaatttcgacctgctgaagctggctggcgacgtggaatccaacccaggcccttctagaggccatatgaccgagtacaagcccacggtgcgcctcgccacccgcgacgacgtccccagggccgtacgcaccctcgccgccgcgttcgccgactaccccgccacgcgccacaccgtcgatccggaccgccacatcgagcgggtcaccgagctgcaagaactcttcctcacgcgcgtcgggctcgacatcggcaaggtgtgggtcgcggacgacggcgccgcggtggcggtctggaccacgccggagagcgtcgaagcgggggcggtgttcgccgagatcggcccgcgcatggccgagttgagcggttcccggctggccgcgcagcaacagatggaaggcctcctggcgccgcaccggcccaaggagcccgcgtggttcctggccaccgtcggcgtctcgcccgaccaccagggcaagggtctgggcagcgccgtcgtgctccccggagtggaggcggccgagcgcgccggggtgcccgccttcctggagacctccgcgccccgcaacctccccttctacgagcggctcggcttcaccgtcaccgccgacgtcgaggtgcccgaaggaccgcgcacctggtgcatgacccgcaagcccggtgcctga

SEQ ID NO: 17504 - DNA, 3102 bp, synthetic construct
  source 1..3102: mol_type = other DNA
atggccttaccagtgaccgccttgctcctgccgctggccttgctgctccacgccgccaggccgctcgaggagctgggagagcctcagctgtgctatatcctggacgccatcctgtttctgtacggcatcgtgctgaccctgctgtactgccggctgaagatccaagtgcggaaggccgccatcaccagctacgagaaatccgacggcgtgtacaccggcctgagcaccagaaatcaagagacatacgagacactgaagcacgaaaagcctccacaaagggccaagcgatctggatctggagcaacaaacttctcactactcaaacaagcaggtgacgtggaggagaatcccgggcctactagcatggccttaccagtgaccgccttgctcctgccgctggccttgctgctccacgccgccaggccgggcgtgacacagagccccacacacctgattaagaccagaggccagcaggccacactgagatgcagccctatcagcggccacaccagcgtgtactggtatcagcaggctctcggactgggcctccagttcctgctttggtacgacgagggcgaagagagaaaccggggcaacttccctcctcggttttccggcagacagttccccaactacagcagcgagctgaacgtgaacgccctggaactggaagatagcgccctgtacctgtgtgcctcttctcttggtggacctcgcggactggctggactgagaggggatgagcagtttttcggccctggcaccagactgaccgtgctggaaggcggaggaagcggcggaggatctcaggtccagctcgtcgagtccggcggcggcctcgtccaggccggcgactccgtcaccctctcctgcaccgcctccggccgcaccttctcctcctacgccctcgcctggttccgccagcgccccggcaaggagcgcgagttcgtcgccggcctccgctggggcggccccaccaactacgccgactccgtcaaggaccgcttcaccatctccggcgactccgccaagcacaccatgtacctccagatgaactccctcaagcccgaggacaccgccgtctactactgcggctacaaccccggcggctgggccgtcccctcccagtacgagtacgactcctggggccagggcacccaggtcaccgtctcctccggtaccggcggaggcggatctggcggcggaggtagcggtggcggaggatctgaattcgacatccagatgacacagagccctagcagcctgtctgccagcgtgggagacagagtgaccatcacatgcaaggccagcgaccacatcaacaactggctggcctggtatcagcagaagcctggacaggcccctaagctgctgatctacggcgctaccacactggaaacaggcgtgcccagcagattttctggcagcggctctggcaccgactacaccctgacaatatccagcctccagcctgaggacttcgccacctactactgtcagcagagctggaacaccccttggacattcggccagggcaccaagctggaaatcaagagaggcggaggcggaagtggaggcggaggatctggcggcggaggctctcaagttcagcttcaacagcctggcgctgagctggtcaaacctggcgcttctgtgaagatgagctgcaaagccagcggctacgccttcagcagctactggatcaactggatgaagcagaaacccggccagggactcgaatggatcggccaaatctatcccggcgacggcgacaccaactacaacggcaagttcaagggcagagccacactgaccgccgatacctctagcagcacagcctacatgcagctgagcagcctgaccagcgaagatagcgccgtgtacttctgtgcccggtccatcacaacagtcgtgggctgcgctatggactattggggccagggaacaagcgtgaccgtgtctagtacgcgtcagagttttgggttgttggaccctaaattgtgctatctgttggacggaatcctgttcatttacggagtgatcctgaccgcattgttcctgcgggttaagttttccagatccgcagacgcacccgcttaccaacaagggcagaaccaactctacaatgaacttaatttggggcggagggaagagtacgacgttctggacaaaaggaggggacgagatcccgagatgggcggaaagcctcagcgaaggaagaatccgcaagaggggctttataacgaactccagaaagataaaatggcagaagcctatagtgagattgggatgaagggagaaaggaggaggggtaaaggtcacgatgggttgtaccaaggattgagcacagccactaaagatacctatgatgcgctccacatgcaggccctgccgccaagacgcgccaagagaagcggatctggcgtgaagcagaccctgaatttcgacctgctgaagctggctggcgacgtggaatccaacccaggcccttctagaggccatatgaccgagtacaagcccacggtgcgcctcgccacccgcgacgacgtccccagggccgtacgcaccctcgccgccgcgttcgccgactaccccgccacgcgccacaccgtcgatccggaccgccacatcgagcgggtcaccgagctgcaagaactcttcctcacgcgcgtcgggctcgacatcggcaaggtgtgggtcgcggacgacggcgccgcggtggcggtctggaccacgccggagagcgtcgaagcgggggcggtgttcgccgagatcggcccgcgcatggccgagttgagcggttcccggctggccgcgcagcaacagatggaaggcctcctggcgccgcaccggcccaaggagcccgcgtggttcctggccaccgtcggcgtctcgcccgaccaccagggcaagggtctgggcagcgccgtcgtgctccccggagtggaggcggccgagcgcgccggggtgcccgccttcctggagacctccgcgccccgcaacctccccttctacgagcggctcggcttcaccgtcaccgccgacgtcgaggtgcccgaaggaccgcgcacctggtgcatgacccgcaagcccggtgcctga

SEQ ID NO: 17505 - DNA, 3084 bp, synthetic construct
  source 1..3084: mol_type = other DNA
atggccttaccagtgaccgccttgctcctgccgctggccttgctgctccacgccgccaggccgctcgaggagctgggagagcctcagctgtgctatatcctggacgccatcctgtttctgtacggcatcgtgctgaccctgctgtactgccggctgaagatccaagtgcggaaggccgccatcaccagctacgagaaatccgacggcgtgtacaccggcctgagcaccagaaatcaagagacatacgagacactgaagcacgaaaagcctccacaaagggccaagcgatctggatctggagcaacaaacttctcactactcaaacaagcaggtgacgtggaggagaatcccgggcctactagcatggccttaccagtgaccgccttgctcctgccgctggccttgctgctccacgccgccaggccgggcgtgacacagagccccacacacctgattaagaccagaggccagcaggccacactgagatgcagccctatcagcggccacaccagcgtgtactggtatcagcaggctctcggactgggcctccagttcctgctttggtacgacgagggcgaagagagaaaccggggcaacttccctcctcggttttccggcagacagttccccaactacagcagcgagctgaacgtgaacgccctggaactggaagatagcgccctgtacctgtgtgcctcttctcttggtggacctcgcggactggctggactgagaggggatgagcagtttttcggccctggcaccagactgaccgtgctggaaggcggaggaagcggcggaggatctggcgtgacacagagccccacacacctgattaagaccagaggccagcaggccacactgagatgcagccctatcagcggccacaccagcgtgtactggtatcagcaggctctcggactgggcctccagttcctgctttggtacgacgagggcgaagagagaaaccggggcaacttccctcctcggttttccggcagacagttccccaactacagcagcgagctgaacgtgaacgccctggaactggaagatagcgccctgtacctgtgtgccagctctctcggcggagatgaactgggagccgatggcaacgagcagttctttggccctggcaccagactgaccgtgctggaaggtaccggcggaggcggatctggcggcggaggtagcggtggcggaggatctgaattcgacatccagatgacacagagccctagcagcctgtctgccagcgtgggagacagagtgaccatcacatgcaaggccagcgaccacatcaacaactggctggcctggtatcagcagaagcctggacaggcccctaagctgctgatctacggcgctaccacactggaaacaggcgtgcccagcagattttctggcagcggctctggcaccgactacaccctgacaatatccagcctccagcctgaggacttcgccacctactactgtcagcagagctggaacaccccttggacattcggccagggcaccaagctggaaatcaagagaggcggaggcggaagtggaggcggaggatctggcggcggaggctctcaagttcagcttcaacagcctggcgctgagctggtcaaacctggcgcttctgtgaagatgagctgcaaagccagcggctacgccttcagcagctactggatcaactggatgaagcagaaacccggccagggactcgaatggatcggccaaatctatcccggcgacggcgacaccaactacaacggcaagttcaagggcagagccacactgaccgccgatacctctagcagcacagcctacatgcagctgagcagcctgaccagcgaagatagcgccgtgtacttctgtgcccggtccatcacaacagtcgtgggctgcgctatggactattggggccagggaacaagcgtgaccgtgtctagtacgcgtcagagttttgggttgttggaccctaaattgtgctatctgttggacggaatcctgttcatttacggagtgatcctgaccgcattgttcctgcgggttaagttttccagatccgcagacgcacccgcttaccaacaagggcagaaccaactctacaatgaacttaatttggggcggagggaagagtacgacgttctggacaaaaggaggggacgagatcccgagatgggcggaaagcctcagcgaaggaagaatccgcaagaggggctttataacgaactccagaaagataaaatggcagaagcctatagtgagattgggatgaagggagaaaggaggaggggtaaaggtcacgatgggttgtaccaaggattgagcacagccactaaagatacctatgatgcgctccacatgcaggccctgccgccaagacgcgccaagagaagcggatctggcgtgaagcagaccctgaatttcgacctgctgaagctggctggcgacgtggaatccaacccaggcccttctagaggccatatgaccgagtacaagcccacggtgcgcctcgccacccgcgacgacgtccccagggccgtacgcaccctcgccgccgcgttcgccgactaccccgccacgcgccacaccgtcgatccggaccgccacatcgagcgggtcaccgagctgcaagaactcttcctcacgcgcgtcgggctcgacatcggcaaggtgtgggtcgcggacgacggcgccgcggtggcggtctggaccacgccggagagcgtcgaagcgggggcggtgttcgccgagatcggcccgcgcatggccgagttgagcggttcccggctggccgcgcagcaacagatggaaggcctcctggcgccgcaccggcccaaggagcccgcgtggttcctggccaccgtcggcgtctcgcccgaccaccagggcaagggtctgggcagcgccgtcgtgctccccggagtggaggcggccgagcgcgccggggtgcccgccttcctggagacctccgcgccccgcaacctccccttctacgagcggctcggcttcaccgtcaccgccgacgtcgaggtgcccgaaggaccgcgcacctggtgcatgacccgcaagcccggtgcctga

SEQ ID NO: 17506 - DNA, 1944 bp, synthetic construct
  source 1..1944: mol_type = other DNA
atggccttaccagtgaccgccttgctcctgccgctggccttgctgctccacgccgccaggccgctcgaggagctgggagagcctcagctgtgctatatcctggacgccatcctgtttctgtacggcatcgtgctgaccctgctgtactgccggctgaagatccaagtgcggaaggccgccatcaccagctacgagaaatccgacggcgtgtacaccggcctgagcaccagaaatcaagagacatacgagacactgaagcacgaaaagcctccacaaagggccaagcgatctggatctggagcaacaaacttctcactactcaaacaagcaggtgacgtggaggagaatcccgggcctactagcatggccctgcccgtgacagccctgctgctgcctctggctctgctgctgcacgccgccagacccgatgaattcggctctgacctgggcatcaagctgctgttcgccgctgccaagggccaggacgacgaagtgcggattctgctggctgctggggccgacgtgaacgccaaggatttcgagggctacacccccctgcacgtggccgcctatgatggacacctggaaatcgtggaagtgctgctgaaggctggcgctgatgtgaatgccaaagacagccagggccggacccctctgcatgaagccgcctacagcggccatctggaaattgtggaagtgctgctgaaagccggggcagacgtgaacgctcaggacgacgctggcgagacaccagccgatctggctgcagcttggggccacgaagatatcgccgaggtgctgcagaagacgcgtcagagttttgggttgttggaccctaaattgtgctatctgttggacggaatcctgttcatttacggagtgatcctgaccgcattgttcctgcgggttaagttttccagatccgcagacgcacccgcttaccaacaagggcagaaccaactctacaatgaacttaatttggggcggagggaagagtacgacgttctggacaaaaggaggggacgagatcccgagatgggcggaaagcctcagcgaaggaagaatccgcaagaggggctttataacgaactccagaaagataaaatggcagaagcctatagtgagattgggatgaagggagaaaggaggaggggtaaaggtcacgatgggttgtaccaaggattgagcacagccactaaagatacctatgatgcgctccacatgcaggccctgccgccaagacgcgccaagagaagcggatctggcgtgaagcagaccctgaatttcgacctgctgaagctggctggcgacgtggaatccaacccaggcccttctagaggccatatgaccgagtacaagcccacggtgcgcctcgccacccgcgacgacgtccccagggccgtacgcaccctcgccgccgcgttcgccgactaccccgccacgcgccacaccgtcgatccggaccgccacatcgagcgggtcaccgagctgcaagaactcttcctcacgcgcgtcgggctcgacatcggcaaggtgtgggtcgcggacgacggcgccgcggtggcggtctggaccacgccggagagcgtcgaagcgggggcggtgttcgccgagatcggcccgcgcatggccgagttgagcggttcccggctggccgcgcagcaacagatggaaggcctcctggcgccgcaccggcccaaggagcccgcgtggttcctggccaccgtcggcgtctcgcccgaccaccagggcaagggtctgggcagcgccgtcgtgctccccggagtggaggcggccgagcgcgccggggtgcccgccttcctggagacctccgcgccccgcaacctccccttctacgagcggctcggcttcaccgtcaccgccgacgtcgaggtgcccgaaggaccgcgcacctggtgcatgacccgcaagcccggtgcctga

SEQ ID NO: 17507 - DNA, 1731 bp, synthetic construct
  source 1..1731: mol_type = other DNA
atggccttaccagtgaccgccttgctcctgccgctggccttgctgctccacgccgccaggccgctcgaggagctgggagagcctcagctgtgctatatcctggacgccatcctgtttctgtacggcatcgtgctgaccctgctgtactgccggctgaagatccaagtgcggaaggccgccatcaccagctacgagaaatccgacggcgtgtacaccggcctgagcaccagaaatcaagagacatacgagacactgaagcacgaaaagcctccacaaagggccaagcgatctggatctggagcaacaaacttctcactactcaaacaagcaggtgacgtggaggagaatcccgggcctactagcatggactggatttggcgcatccttttccttgtcggcgctgctaccggcgcccattccttcgaaggcagcggattcgaatacgccaaagagatgcggaacgcctactgggagatcgccctgctgcccaatctgaccaaccagcagaagagagcccccatcagaaagctgtacgacgacccctcccagagcagcgagctgctgtctgaggctaaaaaactgaacgatagccagacgcgtcagagttttgggttgttggaccctaaattgtgctatctgttggacggaatcctgttcatttacggagtgatcctgaccgcattgttcctgcgggttaagttttccagatccgcagacgcacccgcttaccaacaagggcagaaccaactctacaatgaacttaatttggggcggagggaagagtacgacgttctggacaaaaggaggggacgagatcccgagatgggcggaaagcctcagcgaaggaagaatccgcaagaggggctttataacgaactccagaaagataaaatggcagaagcctatagtgagattgggatgaagggagaaaggaggaggggtaaaggtcacgatgggttgtaccaaggattgagcacagccactaaagatacctatgatgcgctccacatgcaggccctgccgccaagacgcgccaagagaagcggatctggcgtgaagcagaccctgaatttcgacctgctgaagctggctggcgacgtggaatccaacccaggcccttctagaggccatatgaccgagtacaagcccacggtgcgcctcgccacccgcgacgacgtccccagggccgtacgcaccctcgccgccgcgttcgccgactaccccgccacgcgccacaccgtcgatccggaccgccacatcgagcgggtcaccgagctgcaagaactcttcctcacgcgcgtcgggctcgacatcggcaaggtgtgggtcgcggacgacggcgccgcggtggcggtctggaccacgccggagagcgtcgaagcgggggcggtgttcgccgagatcggcccgcgcatggccgagttgagcggttcccggctggccgcgcagcaacagatggaaggcctcctggcgccgcaccggcccaaggagcccgcgtggttcctggccaccgtcggcgtctcgcccgaccaccagggcaagggtctgggcagcgccgtcgtgctccccggagtggaggcggccgagcgcgccggggtgcccgccttcctggagacctccgcgccccgcaacctccccttctacgagcggctcggcttcaccgtcaccgccgacgtcgaggtgcccgaaggaccgcgcacctggtgcatgacccgcaagcccggtgcctga

SEQ ID NO: 17508 - DNA, 2397 bp, synthetic construct
  source 1..2397: mol_type = other DNA
atggccttaccagtgaccgccttgctcctgccgctggccttgctgctccacgccgccaggccgctcgaggagctgggagagcctcagctgtgctatatcctggacgccatcctgtttctgtacggcatcgtgctgaccctgctgtactgccggctgaagatccaagtgcggaaggccgccatcaccagctacgagaaatccgacggcgtgtacaccggcctgagcaccagaaatcaagagacatacgagacactgaagcacgaaaagcctccacaaagggccaagcgatctggatctggagcaacaaacttctcactactcaaacaagcaggtgacgtggaggagaatcccgggcctactagcatggccctgcccgtgacagccctgctgctgcctctggctctgctgctgcacgccgccagacccgatgaattcgaggtgcaactggtggaaagcggcggaggcctggtgcaggctggcggatctctgagactgagctgtgccgccagcggcatcaccttcagcatcaacacaatgggctggtacagacaggcccctggcaagcagagggaactggtggccctgatctccagcatcggcgacacctactacgccgacagcgtgaagggccggttcaccatcagccgggacaacgccaagaacaccgtgtacctccagatgaacagcctgaagcccgaggacaccgccgtgtactactgcaagcggttcagaacagccgcccagggcaccgattattggggccagggaacacaagtgaccgtgtcctctctcgagggaggaggcggctccgggggaggcggaagtggaggcggaggatctgggtctggaggaagcggatctggaggctcagggtcagggggctcaggcagtggaggctctttcgaagtgcaactggtggaatctgggggcggactggtgcagccaggcggaagtctgaggctgtcttgtgccgcctccggcagcatcttcggcttcaacgacatggcctggtatcggcaggctcccggaaaacagcgcgagctggtggctctgattagcagagtgggcgtgaccagcagcgccgactctgtgaagggcagattcacaatctccagagtgaacgccaaggatacagtgtacctccagatgaactctctgaaacctgaggatacagcagtgtactattgctacatggaccagcggctggacggcagcacactggcctactggggacagggaactcaagtgacagtgtctagcacgcgtcagagttttgggttgttggaccctaaattgtgctatctgttggacggaatcctgttcatttacggagtgatcctgaccgcattgttcctgcgggttaagttttccagatccgcagacgcacccgcttaccaacaagggcagaaccaactctacaatgaacttaatttggggcggagggaagagtacgacgttctggacaaaaggaggggacgagatcccgagatgggcggaaagcctcagcgaaggaagaatccgcaagaggggctttataacgaactccagaaagataaaatggcagaagcctatagtgagattgggatgaagggagaaaggaggaggggtaaaggtcacgatgggttgtaccaaggattgagcacagccactaaagatacctatgatgcgctccacatgcaggccctgccgccaagacgcgccaagagaagcggatctggcgtgaagcagaccctgaatttcgacctgctgaagctggctggcgacgtggaatccaacccaggcccttctagaggccatatgaccgagtacaagcccacggtgcgcctcgccacccgcgacgacgtccccagggccgtacgcaccctcgccgccgcgttcgccgactaccccgccacgcgccacaccgtcgatccggaccgccacatcgagcgggtcaccgagctgcaagaactcttcctcacgcgcgtcgggctcgacatcggcaaggtgtgggtcgcggacgacggcgccgcggtggcggtctggaccacgccggagagcgtcgaagcgggggcggtgttcgccgagatcggcccgcgcatggccgagttgagcggttcccggctggccgcgcagcaacagatggaaggcctcctggcgccgcaccggcccaaggagcccgcgtggttcctggccaccgtcggcgtctcgcccgaccaccagggcaagggtctgggcagcgccgtcgtgctccccggagtggaggcggccgagcgcgccggggtgcccgccttcctggagacctccgcgccccgcaacctccccttctacgagcggctcggcttcaccgtcaccgccgacgtcgaggtgcccgaaggaccgcgcacctggtgcatgacccgcaagcccggtgcctga

SEQ ID NO: 17509 - DNA, 2139 bp, synthetic construct
  source 1..2139: mol_type = other DNA
atggccttaccagtgaccgccttgctcctgccgctggccttgctgctccacgccgccaggccgctcgaggagctgggagagcctcagctgtgctatatcctggacgccatcctgtttctgtacggcatcgtgctgaccctgctgtactgccggctgaagatccaagtgcggaaggccgccatcaccagctacgagaaatccgacggcgtgtacaccggcctgagcaccagaaatcaagagacatacgagacactgaagcacgaaaagcctccacaaagggccaagcgatctggatctggagcaacaaacttctcactactcaaacaagcaggtgacgtggaggagaatcccgggcctactagcatggcccttccagtcactgccttgctgttgcctctggcgctcctgctccacgccgctagaccgggcatgagaaccgaggacctgcctaaggccgtggtgttcctggaaccccagtggtacagagtgctggaaaaggacagcgtgaccctgaagtgccagggcgcctacagccccgaggacaatagcacccagtggttccacaacgagagcctgatctccagccaggccagcagctacttcatcgacgccgccaccgtggacgacagcggcgagtatagatgccagaccaacctgagcaccctgagcgaccccgtgcagctggaagtgcacatcggatggctgctgctgcaggcccccagatgggtgttcaaagaagaggaccccatccacctgagatgccactcttggaagaacaccgccctgcacaaagtgacctacctgcagaacggcaagggcagaaagtacttccaccacaacagcgacttctacatccccaaggccaccctgaaggactccggctcctacttctgcagaggcctcgtgggcagcaagaacgtgtccagcgagacagtgaacatcaccatcacccagggcctggccgtgtctaccatcagcagctttttcccacccggctaccagacgcgtcagagttttgggttgttggaccctaaattgtgctatctgttggacggaatcctgttcatttacggagtgatcctgaccgcattgttcctgcgggttaagttttccagatccgcagacgcacccgcttaccaacaagggcagaaccaactctacaatgaacttaatttggggcggagggaagagtacgacgttctggacaaaaggaggggacgagatcccgagatgggcggaaagcctcagcgaaggaagaatccgcaagaggggctttataacgaactccagaaagataaaatggcagaagcctatagtgagattgggatgaagggagaaaggaggaggggtaaaggtcacgatgggttgtaccaaggattgagcacagccactaaagatacctatgatgcgctccacatgcaggccctgccgccaagacgcgccaagagaagcggatctggcgtgaagcagaccctgaatttcgacctgctgaagctggctggcgacgtggaatccaacccaggcccttctagaggccatatgaccgagtacaagcccacggtgcgcctcgccacccgcgacgacgtccccagggccgtacgcaccctcgccgccgcgttcgccgactaccccgccacgcgccacaccgtcgatccggaccgccacatcgagcgggtcaccgagctgcaagaactcttcctcacgcgcgtcgggctcgacatcggcaaggtgtgggtcgcggacgacggcgccgcggtggcggtctggaccacgccggagagcgtcgaagcgggggcggtgttcgccgagatcggcccgcgcatggccgagttgagcggttcccggctggccgcgcagcaacagatggaaggcctcctggcgccgcaccggcccaaggagcccgcgtggttcctggccaccgtcggcgtctcgcccgaccaccagggcaagggtctgggcagcgccgtcgtgctccccggagtggaggcggccgagcgcgccggggtgcccgccttcctggagacctccgcgccccgcaacctccccttctacgagcggctcggcttcaccgtcaccgccgacgtcgaggtgcccgaaggaccgcgcacctggtgcatgacccgcaagcccggtgcctga

SEQ ID NO: 17510 - DNA, 1020 bp, synthetic construct
  source 1..1020: mol_type = other DNA
atggccttaccagtgaccgccttgctcctgccgctggccttgctgctccacgccgccaggccgctcgaggagctgggagagcctcagctgtgctatatcctggacgccatcctgtttctgtacggcatcgtgctgaccctgctgtactgccggctgaagatccaagtgcggaaggccgccatcaccagctacgagaaatccgacggcgtgtacaccggcctgagcaccagaaatcaagagacatacgagacactgaagcacgaaaagcctccacaaagggccaagcgatctggatctggagcaacaaacttctcactactcaaacaagcaggtgacgtggaggagaatcccgggcctactagcgccaccatggccttaccagtgaccgccttgctcctgccgctggccttgctgctccacgccgccaggccgatggaccccgacctggaaatcagagccgccttcctgcggcagagaaacacagccctgagaacagaggtggccgagctggaacaagaggtgcagcggctggaaaacgaggtgtcccagtacgagacaagatacggccctctcggaggcggaaaaacgcgtcagagttttgggttgttggaccctaaattgtgctatctgttggacggaatcctgttcatttacggagtgatcctgaccgcattgttcctgcgggttaagttttccagatccgcagacgcacccgcttaccaacaagggcagaaccaactctacaatgaacttaatttggggcggagggaagagtacgacgttctggacaaaaggaggggacgagatcccgagatgggcggaaagcctcagcgaaggaagaatccgcaagaggggctttataacgaactccagaaagataaaatggcagaagcctatagtgagattgggatgaagggagaaaggaggaggggtaaaggtcacgatgggttgtaccaaggattgagcacagccactaaagatacctatgatgcgctccacatgcaggccctgccgccaaga

SEQ ID NO: 17511 - DNA, 1020 bp, synthetic construct
  source 1..1020: mol_type = other DNA
atggccttaccagtgaccgccttgctcctgccgctggccttgctgctccacgccgccaggccgctcgaggagctgggagagcctcagctgtgctatatcctggacgccatcctgtttctgtacggcatcgtgctgaccctgctgtactgccggctgaagatccaagtgcggaaggccgccatcaccagctacgagaaatccgacggcgtgtacaccggcctgagcaccagaaatcaagagacatacgagacactgaagcacgaaaagcctccacaaagggccaagcgatctggatctggagcaacaaacttctcactactcaaacaagcaggtgacgtggaggagaatcccgggcctactagcgccaccatggccttaccagtgaccgccttgctcctgccgctggccttgctgctccacgccgccaggccgatggaccctgatctcgaaattgaggccgcctttctggaacgcgagaacactgccctggaaaccagggtcgcagagctgagacagagagtgcagagactgcggaacagagtgtctcagtaccgcaccagatatggcccactcggcggaggtaaaacgcgtcagagttttgggttgttggaccctaaattgtgctatctgttggacggaatcctgttcatttacggagtgatcctgaccgcattgttcctgcgggttaagttttccagatccgcagacgcacccgcttaccaacaagggcagaaccaactctacaatgaacttaatttggggcggagggaagagtacgacgttctggacaaaaggaggggacgagatcccgagatgggcggaaagcctcagcgaaggaagaatccgcaagaggggctttataacgaactccagaaagataaaatggcagaagcctatagtgagattgggatgaagggagaaaggaggaggggtaaaggtcacgatgggttgtaccaaggattgagcacagccactaaagatacctatgatgcgctccacatgcaggccctgccgccaaga

SEQ ID NO: 17512 - DNA, 951 bp, synthetic construct
  source 1..951: mol_type = other DNA
atggccttaccagtgaccgccttgctcctgccgctggccttgctgctccacgccgccaggccgctcgaggagctgggagagcctcagctgtgctatatcctggacgccatcctgtttctgtacggcatcgtgctgaccctgctgtactgccggctgaagatccaagtgcggaaggccgccatcaccagctacgagaaatccgacggcgtgtacaccggcctgagcaccagaaatcaagagacatacgagacactgaagcacgaaaagcctccacaaagggccaagcgatctggatctggagcaacaaacttctcactactcaaacaagcaggtgacgtggaggagaatcccgggcctactagcgccaccatggccttaccagtgaccgccttgctcctgccgctggccttgctgctccacgccgccaggccggaagttgctgccctcgagaaggaggtagcagctttggaaaaagaagtcgcagcccttgagaaagaagttgcggctctggagaagacgcgtcagagttttgggttgttggaccctaaattgtgctatctgttggacggaatcctgttcatttacggagtgatcctgaccgcattgttcctgcgggttaagttttccagatccgcagacgcacccgcttaccaacaagggcagaaccaactctacaatgaacttaatttggggcggagggaagagtacgacgttctggacaaaaggaggggacgagatcccgagatgggcggaaagcctcagcgaaggaagaatccgcaagaggggctttataacgaactccagaaagataaaatggcagaagcctatagtgagattgggatgaagggagaaaggaggaggggtaaaggtcacgatgggttgtaccaaggattgagcacagccactaaagatacctatgatgcgctccacatgcaggccctgccgccaaga

SEQ ID NO: 17513 - DNA, 1725 bp, synthetic construct
  source 1..1725: mol_type = other DNA
atggccttaccagtgaccgccttgctcctgccgctggccttgctgctccacgccgccaggccgctcgaggagctgggagagcctcagctgtgctatatcctggacgccatcctgtttctgtacggcatcgtgctgaccctgctgtactgccggctgaagatccaagtgcggaaggccgccatcaccagctacgagaaatccgacggcgtgtacaccggcctgagcaccagaaatcaagagacatacgagacactgaagcacgaaaagcctccacaaagggccaagcgatctggatctggagcaacaaacttctcactactcaaacaagcaggtgacgtggaggagaatcccgggcctactagcgccaccatggccttaccagtgaccgccttgctcctgccgctggccttgctgctccacgccgccaggccgctgttcaatcaagaggtgcagatccctctgaccgagagctactgtggcccctgtcctaagaactggatctgctacaagaacaactgctaccagttcttcgacgagagcaagaattggtacgagagccaggccagctgcatgagccagaatgccagcctgctgaaggtgtacagcaaagaggaccaggacctgctgaaactggtcaagagcgcccactggatgggccttgtgcacatccccaccaatggctcttggcagtgggaggacggcagcattctgagccctaacctgctgaccatcatcgagatgcagaagggcgactgcgccctgtacgccagcagctttaagggctacatcgagaattgcagcaccccgaacacctacatctgtatgcagagaaccgtttctggcggaggcggctctggaggaggcggaagtggcggcggaggcgacctctttaatcaagaagtccagattccactcaccgaatcctactgcggaccttgtccaaaaaattggatttgttataagaacaactgttatcaattctttgatgagtctaaaaattggtatgagtcccaggcttcctgcatgtctcagaacgcttctctgctgaaagtctactctaaagaagatcaggatctcctgaagctcgtcaagtctgcccattggatggggctcgtccacattcctaccaacggaagctggcaatgggaagatggctccatcctgtctccaaatctgctcacgattattgaaatgcagaaaggggattgtgctctctacgccagctccttcaagggatatattgagaactgtagcacgcccaatacttatatctgtatgcaacggaccgtgacgcgtcagagttttgggttgttggaccctaaattgtgctatctgttggacggaatcctgttcatttacggagtgatcctgaccgcattgttcctgcgggttaagttttccagatccgcagacgcacccgcttaccaacaagggcagaaccaactctacaatgaacttaatttggggcggagggaagagtacgacgttctggacaaaaggaggggacgagatcccgagatgggcggaaagcctcagcgaaggaagaatccgcaagaggggctttataacgaactccagaaagataaaatggcagaagcctatagtgagattgggatgaagggagaaaggaggaggggtaaaggtcacgatgggttgtaccaaggattgagcacagccactaaagatacctatgatgcgctccacatgcaggccctgccgccaaga

SEQ ID NO: 17514 - DNA, 1725 bp, synthetic construct
  source 1..1725: mol_type = other DNA
atggccttaccagtgaccgccttgctcctgccgctggccttgctgctccacgccgccaggccgctcgaggagctgggagagcctcagctgtgctatatcctggacgccatcctgtttctgtacggcatcgtgctgaccctgctgtactgccggctgaagatccaagtgcggaaggccgccatcaccagctacgagaaatccgacggcgtgtacaccggcctgagcaccagaaatcaagagacatacgagacactgaagcacgaaaagcctccacaaagggccaagcgatctggatctggagcaacaaacttctcactactcaaacaagcaggtgacgtggaggagaatcccgggcctactagcgccaccatggccttaccagtgaccgccttgctcctgccgctggccttgctgctccacgccgccaggccgctgttcaatcaagaggtgcagatccctctgaccgagagctactgtggcccctgtcctaagaactggatctgctacaagaacaactgctaccagttcttcgacgagagcaagaattggtacgagagccaggccagctgcatgagccagaatgccagcctgctgaaggtgtacagcaaagaggaccaggacctgctgaaactggtcaagagcgcccactggatgggccttgtgcacatccccaccaatggctcttggcagtgggaggacggcagcattctgagccctaacctgctgaccatcatcgagatgcagaagggcgactgcgccctgtacgccagcagctttaagggcttcatcgagaattgcagcaccccgaacacctacatctgtatgcagagaaccgttggcggaggcggaagtggaggcggaggatctggcggcggaggctctgacctctttaatcaagaagtccagattccactcaccgaatcctactgcggaccttgtccaaaaaattggatttgttataagaacaactgttatcaattctttgatgagtctaaaaattggtatgagtcccaggcttcctgcatgtctcagaacgcttctctgctgaaagtctactctaaagaagatcaggatctcctgaagctcgtcaagtctgcccattggatggggctcgtccacattcctaccaacggaagctggcaatgggaagatggctccatcctgtctccaaatctgctcacgattattgaaatgcagaaaggggattgtgctctctacgccagctccttcaagggatttattgagaactgtagcacgcccaatacttatatctgtatgcaacggaccgtgacgcgtcagagttttgggttgttggaccctaaattgtgctatctgttggacggaatcctgttcatttacggagtgatcctgaccgcattgttcctgcgggttaagttttccagatccgcagacgcacccgcttaccaacaagggcagaaccaactctacaatgaacttaatttggggcggagggaagagtacgacgttctggacaaaaggaggggacgagatcccgagatgggcggaaagcctcagcgaaggaagaatccgcaagaggggctttataacgaactccagaaagataaaatggcagaagcctatagtgagattgggatgaagggagaaaggaggaggggtaaaggtcacgatgggttgtaccaaggattgagcacagccactaaagatacctatgatgcgctccacatgcaggccctgccgccaaga

SEQ ID NO: 17515 - DNA, 1803 bp, synthetic construct
  source 1..1803: mol_type = other DNA
atggccttaccagtgaccgccttgctcctgccgctggccttgctgctccacgccgccaggccgctcgaggagctgggagagcctcagctgtgctatatcctggacgccatcctgtttctgtacggcatcgtgctgaccctgctgtactgccggctgaagatccaagtgcggaaggccgccatcaccagctacgagaaatccgacggcgtgtacaccggcctgagcaccagaaatcaagagacatacgagacactgaagcacgaaaagcctccacaaagggccaagcgatctggatctggagcaacaaacttctcactactcaaacaagcaggtgacgtggaggagaatcccgggcctactagcatggccttaccagtgaccgccttgctcctgccgctggccttgctgctccacgccgccaggccgatggaccccgacctggaaatcagagccgccttcctgcggcagagaaacacagccctgagaacagaggtggccgagctggaacaagaggtgcagcggctggaaaacgaggtgtcccagtacgagacaagatacggccctctcggaggcggaaaaggtaccggcggaggcggatctggcggcggaggtagcggtggcggaggatctgaattcgacatccagatgacacagagccctagcagcctgtctgccagcgtgggagacagagtgaccatcacatgcaaggccagcgaccacatcaacaactggctggcctggtatcagcagaagcctggacaggcccctaagctgctgatctacggcgctaccacactggaaacaggcgtgcccagcagattttctggcagcggctctggcaccgactacaccctgacaatatccagcctccagcctgaggacttcgccacctactactgtcagcagagctggaacaccccttggacattcggccagggcaccaagctggaaatcaagagaggcggaggcggaagtggaggcggaggatctggcggcggaggctctcaagttcagcttcaacagcctggcgctgagctggtcaaacctggcgcttctgtgaagatgagctgcaaagccagcggctacgccttcagcagctactggatcaactggatgaagcagaaacccggccagggactcgaatggatcggccaaatctatcccggcgacggcgacaccaactacaacggcaagttcaagggcagagccacactgaccgccgatacctctagcagcacagcctacatgcagctgagcagcctgaccagcgaagatagcgccgtgtacttctgtgcccggtccatcacaacagtcgtgggctgcgctatggactattggggccagggaacaagcgtgaccgtgtctagtacgcgtcagagttttgggttgttggaccctaaattgtgctatctgttggacggaatcctgttcatttacggagtgatcctgaccgcattgttcctgcgggttaagttttccagatccgcagacgcacccgcttaccaacaagggcagaaccaactctacaatgaacttaatttggggcggagggaagagtacgacgttctggacaaaaggaggggacgagatcccgagatgggcggaaagcctcagcgaaggaagaatccgcaagaggggctttataacgaactccagaaagataaaatggcagaagcctatagtgagattgggatgaagggagaaaggaggaggggtaaaggtcacgatgggttgtaccaaggattgagcacagccactaaagatacctatgatgcgctccacatgcaggccctgccgccaaga

SEQ ID NO: 17516 - DNA, 2508 bp, synthetic construct
  source 1..2508: mol_type = other DNA
atggccttaccagtgaccgccttgctcctgccgctggccttgctgctccacgccgccaggccgctcgaggagctgggagagcctcagctgtgctatatcctggacgccatcctgtttctgtacggcatcgtgctgaccctgctgtactgccggctgaagatccaagtgcggaaggccgccatcaccagctacgagaaatccgacggcgtgtacaccggcctgagcaccagaaatcaagagacatacgagacactgaagcacgaaaagcctccacaaagggccaagcgatctggatctggagcaacaaacttctcactactcaaacaagcaggtgacgtggaggagaatcccgggcctactagcatggccttaccagtgaccgccttgctcctgccgctggccttgctgctccacgccgccaggccgctgttcaatcaagaggtgcagatccctctgaccgagagctactgtggcccctgtcctaagaactggatctgctacaagaacaactgctaccagttcttcgacgagagcaagaattggtacgagagccaggccagctgcatgagccagaatgccagcctgctgaaggtgtacagcaaagaggaccaggacctgctgaaactggtcaagagcgcccactggatgggccttgtgcacatccccaccaatggctcttggcagtgggaggacggcagcattctgagccctaacctgctgaccatcatcgagatgcagaagggcgactgcgccctgtacgccagcagctttaagggcttcatcgagaattgcagcaccccgaacacctacatctgtatgcagagaaccgttggcggaggcggaagtggaggcggaggatctggcggcggaggctctgacctctttaatcaagaagtccagattccactcaccgaatcctactgcggaccttgtccaaaaaattggatttgttataagaacaactgttatcaattctttgatgagtctaaaaattggtatgagtcccaggcttcctgcatgtctcagaacgcttctctgctgaaagtctactctaaagaagatcaggatctcctgaagctcgtcaagtctgcccattggatggggctcgtccacattcctaccaacggaagctggcaatgggaagatggctccatcctgtctccaaatctgctcacgattattgaaatgcagaaaggggattgtgctctctacgccagctccttcaagggatttattgagaactgtagcacgcccaatacttatatctgtatgcaacggaccgtgggtaccggcggaggcggatctggcggcggaggtagcggtggcggaggatctgaattcgacatccagatgacacagagccctagcagcctgtctgccagcgtgggagacagagtgaccatcacatgcaaggccagcgaccacatcaacaactggctggcctggtatcagcagaagcctggacaggcccctaagctgctgatctacggcgctaccacactggaaacaggcgtgcccagcagattttctggcagcggctctggcaccgactacaccctgacaatatccagcctccagcctgaggacttcgccacctactactgtcagcagagctggaacaccccttggacattcggccagggcaccaagctggaaatcaagagaggcggaggcggaagtggaggcggaggatctggcggcggaggctctcaagttcagcttcaacagcctggcgctgagctggtcaaacctggcgcttctgtgaagatgagctgcaaagccagcggctacgccttcagcagctactggatcaactggatgaagcagaaacccggccagggactcgaatggatcggccaaatctatcccggcgacggcgacaccaactacaacggcaagttcaagggcagagccacactgaccgccgatacctctagcagcacagcctacatgcagctgagcagcctgaccagcgaagatagcgccgtgtacttctgtgcccggtccatcacaacagtcgtgggctgcgctatggactattggggccagggaacaagcgtgaccgtgtctagtacgcgtcagagttttgggttgttggaccctaaattgtgctatctgttggacggaatcctgttcatttacggagtgatcctgaccgcattgttcctgcgggttaagttttccagatccgcagacgcacccgcttaccaacaagggcagaaccaactctacaatgaacttaatttggggcggagggaagagtacgacgttctggacaaaaggaggggacgagatcccgagatgggcggaaagcctcagcgaaggaagaatccgcaagaggggctttataacgaactccagaaagataaaatggcagaagcctatagtgagattgggatgaagggagaaaggaggaggggtaaaggtcacgatgggttgtaccaaggattgagcacagccactaaagatacctatgatgcgctccacatgcaggccctgccgccaaga

SEQ ID NO: 17517 - DNA, 1623 bp, synthetic construct
  source 1..1623: mol_type = other DNA
atggccttaccagtgaccgccttgctcctgccgctggccttgctgctccacgccgccaggccgctcgaggagctgggagagcctcagctgtgctatatcctggacgccatcctgtttctgtacggcatcgtgctgaccctgctgtactgccggctgaagatccaagtgcggaaggccgccatcaccagctacgagaaatccgacggcgtgtacaccggcctgagcaccagaaatcaagagacatacgagacactgaagcacgaaaagcctccacaaagggccaagcgatctggatctggagcaacaaacttctcactactcaaacaagcaggtgacgtggaggagaatcccgggcctactagcatggccttaccagtgaccgccttgctcctgccgctggccttgctgctccacgccgccaggccgcagtctgtgctgacacagcctcctagtgtgtctggcgctcctggacagagagtgaccatctcttgtaccggcagcagcagcaatatcggagccggctatgacgtgcactggtatcagcagctccctggcacagcccctaaactgctgatcttcggcaacagcaacagacccagcggcgtgcccgatagattcagcggctttaagagcggcacaagcgccagcctggctatcactggactgcaagccgaggacgaggccgactacttctgccagagctacgatagcagcctgagcggcagcggagtgtttggcacaggcaccaaagtgacagtgcttggcggcggaggcggaagtggaggcggaggatctggcggcggaggctctcaaatgcaactggttcaaagcggcggtggcctggtgcaacctggaagaagtctgagactgagctgtgccgccagcggcttcaccttcgatgattacgccatgcactgggtccgacaggcccctggaaaaggactggaatgggtgtccggcatctcctggaatagcggctctatcggctacgccgacagcgtgaagggcagattcaccatcagccgggacaacgccaagaacagcctgtacctccagatgaactccctgagagccgaggatacagccctgtactactgcgccaaggacatccacagcggcagctactacggcctgctgtactacgctatggacgtgtggggccagggcacaaccgtgacagtttcttctacgcgtcagagttttgggttgttggaccctaaattgtgctatctgttggacggaatcctgttcatttacggagtgatcctgaccgcattgttcctgcgggttaagttttccagatccgcagacgcacccgcttaccaacaagggcagaaccaactctacaatgaacttaatttggggcggagggaagagtacgacgttctggacaaaaggaggggacgagatcccgagatgggcggaaagcctcagcgaaggaagaatccgcaagaggggctttataacgaactccagaaagataaaatggcagaagcctatagtgagattgggatgaagggagaaaggaggaggggtaaaggtcacgatgggttgtaccaaggattgagcacagccactaaagatacctatgatgcgctccacatgcaggccctgccgccaaga

SEQ ID NO: 17518 - DNA, 1134 bp, synthetic construct
  source 1..1134: mol_type = other DNA
atggccttaccagtgaccgccttgctcctgccgctggccttgctgctccacgccgccaggccgctcgaggagctgggagagcctcagctgtgctatatcctggacgccatcctgtttctgtacggcatcgtgctgaccctgctgtactgccggctgaagatccaagtgcggaaggccgccatcaccagctacgagaaatccgacggcgtgtacaccggcctgagcaccagaaatcaagagacatacgagacactgaagcacgaaaagcctccacaaagggccaagcgatctggatctggagcaacaaacttctcactactcaaacaagcaggtgacgtggaggagaatcccgggcctactagcatggccttaccagtgaccgccttgctcctgccgctggccttgctgctccacgccgccaggccgatgtgtatgccctgcttcaccaccgaccatcagatggcccggaagtgcgacgattgctgtggcggaaaaggcagaggcaagtgctacggccctcagtgcttgtgtagactcgagggcggaggcggaagtggaggcggaggatctggcggcggaggctctttcgaagtgtgtatgccttgttttaccacggatcaacaaatggctcgcaagtgttctgactgctgcggaggcaaaggccggggaaagtgttatggcccacagtgtctgtgccggacgcgtcagagttttgggttgttggaccctaaattgtgctatctgttggacggaatcctgttcatttacggagtgatcctgaccgcattgttcctgcgggttaagttttccagatccgcagacgcacccgcttaccaacaagggcagaaccaactctacaatgaacttaatttggggcggagggaagagtacgacgttctggacaaaaggaggggacgagatcccgagatgggcggaaagcctcagcgaaggaagaatccgcaagaggggctttataacgaactccagaaagataaaatggcagaagcctatagtgagattgggatgaagggagaaaggaggaggggtaaaggtcacgatgggttgtaccaaggattgagcacagccactaaagatacctatgatgcgctccacatgcaggccctgccgccaaga

SEQ ID NO: 17519 - DNA, 1923 bp, synthetic construct
  source 1..1923: mol_type = other DNA
atggccttaccagtgaccgccttgctcctgccgctggccttgctgctccacgccgccaggccgctcgaggagctgggagagcctcagctgtgctatatcctggacgccatcctgtttctgtacggcatcgtgctgaccctgctgtactgccggctgaagatccaagtgcggaaggccgccatcaccagctacgagaaatccgacggcgtgtacaccggcctgagcaccagaaatcaagagacatacgagacactgaagcacgaaaagcctccacaaagggccaagcgatctggatctggagcaacaaacttctcactactcaaacaagcaggtgacgtggaggagaatcccgggcctactagcatggccttaccagtgaccgccttgctcctgccgctggccttgctgctccacgccgccaggccgatgtgtatgccctgcttcaccaccgaccatcagatggcccggaagtgcgacgattgctgtggcggaaaaggcagaggcaagtgctacggccctcagtgcttgtgtagactcgagggcggaggcggaagtggaggcggaggatctggcggcggaggctctttcgaagtgtgtatgccttgttttaccacggatcaacaaatggctcgcaagtgttctgactgctgcggaggcaaaggccggggaaagtgttatggcccacagtgtctgtgccggggtaccggcggaggcggatctggcggcggaggtagcggtggcggaggatctgaattcgacatccagatgacacagagccctagcagcctgtctgccagcgtgggagacagagtgaccatcacatgcaaggccagcgaccacatcaacaactggctggcctggtatcagcagaagcctggacaggcccctaagctgctgatctacggcgctaccacactggaaacaggcgtgcccagcagattttctggcagcggctctggcaccgactacaccctgacaatatccagcctccagcctgaggacttcgccacctactactgtcagcagagctggaacaccccttggacattcggccagggcaccaagctggaaatcaagagaggcggaggcggaagtggaggcggaggatctggcggcggaggctctcaagttcagcttcaacagcctggcgctgagctggtcaaacctggcgcttctgtgaagatgagctgcaaagccagcggctacgccttcagcagctactggatcaactggatgaagcagaaacccggccagggactcgaatggatcggccaaatctatcccggcgacggcgacaccaactacaacggcaagttcaagggcagagccacactgaccgccgatacctctagcagcacagcctacatgcagctgagcagcctgaccagcgaagatagcgccgtgtacttctgtgcccggtccatcacaacagtcgtgggctgcgctatggactattggggccagggaacaagcgtgaccgtgtctagtacgcgtcagagttttgggttgttggaccctaaattgtgctatctgttggacggaatcctgttcatttacggagtgatcctgaccgcattgttcctgcgggttaagttttccagatccgcagacgcacccgcttaccaacaagggcagaaccaactctacaatgaacttaatttggggcggagggaagagtacgacgttctggacaaaaggaggggacgagatcccgagatgggcggaaagcctcagcgaaggaagaatccgcaagaggggctttataacgaactccagaaagataaaatggcagaagcctatagtgagattgggatgaagggagaaaggaggaggggtaaaggtcacgatgggttgtaccaaggattgagcacagccactaaagatacctatgatgcgctccacatgcaggccctgccgccaaga

SEQ ID NO: 17520 - DNA, 2148 bp, synthetic construct
  source 1..2148: mol_type = other DNA
atggccttaccagtgaccgccttgctcctgccgctggccttgctgctccacgccgccaggccgctcgaggagctgggagagcctcagctgtgctatatcctggacgccatcctgtttctgtacggcatcgtgctgaccctgctgtactgccggctgaagatccaagtgcggaaggccgccatcaccagctacgagaaatccgacggcgtgtacaccggcctgagcaccagaaatcaagagacatacgagacactgaagcacgaaaagcctccacaaagggccaagcgatctggatctggagcaacaaacttctcactactcaaacaagcaggtgacgtggaggagaatcccgggcctactagcatggccttaccagtgaccgccttgctcctgccgctggccttgctgctccacgccgccaggccgagccccgtagctcctgcctgtgaccccagactcctaaataaactgctgcgtgactcccacctccttcacagccgactgagtcagtgtcccgacgtggaccctttgtctatccctgttctgctgcctgctgtggactttagcctgggagaatggaaaacccagacggaacagagcaaggcacaggacattctaggggcagtgtcccttctactggagggagtgatggcagcacgaggacagttggaaccctcctgcctctcatccctcctgggacagctttctgggcaggttcgcctcctcttgggggccctgcagggcctcctaggaacccagcttcctctacagggcaggaccacagctcacaaggaccccaatgccctcttcttgagcttgcaacaactgcttcggggaaaggtgcgcttcctgcttctggtagaaggtcccaccctctgtgtcagacggaccctgccaaccacagctgtcccaagcagtacttctggtaccggcggaggcggatctggcggcggaggtagcggtggcggaggatctgaattcgacatccagatgacacagagccctagcagcctgtctgccagcgtgggagacagagtgaccatcacatgcaaggccagcgaccacatcaacaactggctggcctggtatcagcagaagcctggacaggcccctaagctgctgatctacggcgctaccacactggaaacaggcgtgcccagcagattttctggcagcggctctggcaccgactacaccctgacaatatccagcctccagcctgaggacttcgccacctactactgtcagcagagctggaacaccccttggacattcggccagggcaccaagctggaaatcaagagaggcggaggcggaagtggaggcggaggatctggcggcggaggctctcaagttcagcttcaacagcctggcgctgagctggtcaaacctggcgcttctgtgaagatgagctgcaaagccagcggctacgccttcagcagctactggatcaactggatgaagcagaaacccggccagggactcgaatggatcggccaaatctatcccggcgacggcgacaccaactacaacggcaagttcaagggcagagccacactgaccgccgatacctctagcagcacagcctacatgcagctgagcagcctgaccagcgaagatagcgccgtgtacttctgtgcccggtccatcacaacagtcgtgggctgcgctatggactattggggccagggaacaagcgtgaccgtgtctagtacgcgtcagagttttgggttgttggaccctaaattgtgctatctgttggacggaatcctgttcatttacggagtgatcctgaccgcattgttcctgcgggttaagttttccagatccgcagacgcacccgcttaccaacaagggcagaaccaactctacaatgaacttaatttggggcggagggaagagtacgacgttctggacaaaaggaggggacgagatcccgagatgggcggaaagcctcagcgaaggaagaatccgcaagaggggctttataacgaactccagaaagataaaatggcagaagcctatagtgagattgggatgaagggagaaaggaggaggggtaaaggtcacgatgggttgtaccaaggattgagcacagccactaaagatacctatgatgcgctccacatgcaggccctgccgccaaga

SEQ ID NO: 17521 - DNA, 1869 bp, synthetic construct
  source 1..1869: mol_type = other DNA
atggccttaccagtgaccgccttgctcctgccgctggccttgctgctccacgccgccaggccgctcgaggagctgggagagcctcagctgtgctatatcctggacgccatcctgtttctgtacggcatcgtgctgaccctgctgtactgccggctgaagatccaagtgcggaaggccgccatcaccagctacgagaaatccgacggcgtgtacaccggcctgagcaccagaaatcaagagacatacgagacactgaagcacgaaaagcctccacaaagggccaagcgatctggatctggagcaacaaacttctcactactcaaacaagcaggtgacgtggaggagaatcccgggcctactagcatggccttaccagtgaccgccttgctcctgccgctggccttgctgctccacgccgccaggccgatgggcagctgggaagagttcgagctgagactgaacgccatcgaggaacggctgtatgccctcggaggatctgaagccgagctggcctacttcgagtacgtgatcgccgacttcgagggcaacctgcagcggtacaaaggcaagggcaaccctgaagtggaagccctgtacttcgaggccgacgccatcttcgaggaactggtggcctacagacacaacggtaccggcggaggcggatctggcggcggaggtagcggtggcggaggatctgaattcgacatccagatgacacagagccctagcagcctgtctgccagcgtgggagacagagtgaccatcacatgcaaggccagcgaccacatcaacaactggctggcctggtatcagcagaagcctggacaggcccctaagctgctgatctacggcgctaccacactggaaacaggcgtgcccagcagattttctggcagcggctctggcaccgactacaccctgacaatatccagcctccagcctgaggacttcgccacctactactgtcagcagagctggaacaccccttggacattcggccagggcaccaagctggaaatcaagagaggcggaggcggaagtggaggcggaggatctggcggcggaggctctcaagttcagcttcaacagcctggcgctgagctggtcaaacctggcgcttctgtgaagatgagctgcaaagccagcggctacgccttcagcagctactggatcaactggatgaagcagaaacccggccagggactcgaatggatcggccaaatctatcccggcgacggcgacaccaactacaacggcaagttcaagggcagagccacactgaccgccgatacctctagcagcacagcctacatgcagctgagcagcctgaccagcgaagatagcgccgtgtacttctgtgcccggtccatcacaacagtcgtgggctgcgctatggactattggggccagggaacaagcgtgaccgtgtctagtacgcgtcagagttttgggttgttggaccctaaattgtgctatctgttggacggaatcctgttcatttacggagtgatcctgaccgcattgttcctgcgggttaagttttccagatccgcagacgcacccgcttaccaacaagggcagaaccaactctacaatgaacttaatttggggcggagggaagagtacgacgttctggacaaaaggaggggacgagatcccgagatgggcggaaagcctcagcgaaggaagaatccgcaagaggggctttataacgaactccagaaagataaaatggcagaagcctatagtgagattgggatgaagggagaaaggaggaggggtaaaggtcacgatgggttgtaccaaggattgagcacagccactaaagatacctatgatgcgctccacatgcaggccctgccgccaaga

SEQ ID NO: 17522 - DNA, 2289 bp, synthetic construct
  source 1..2289: mol_type = other DNA
atggccttaccagtgaccgccttgctcctgccgctggccttgctgctccacgccgccaggccgctcgagcagagttttgggttgttggaccctaaattgtgctatctgttggacggaatcctgttcatttacggagtgatcctgaccgcattgttcctgcgggttaagttttccagatccgcagacgcacccgcttaccaacaagggcagaaccaactctacaatgaacttaatttggggcggagggaagagtacgacgttctggacaaaaggaggggacgagatcccgagatgggcggaaagcctcagcgaaggaagaatccgcaagaggggctttataacgaactccagaaagataaaatggcagaagcctatagtgagattgggatgaagggagaaaggaggaggggtaaaggtcacgatgggttgtaccaaggattgagcacagccactaaagatacctatgatgcgctccacatgcaggccctgccgccaagaagggccaagcgatctggatctggagcaacaaacttctcactactcaaacaagcaggtgacgtggaggagaatcccgggcctactagcatggccttaccagtgaccgccttgctcctgccgctggccttgctgctccacgccgccaggccggacatccagatgacacagactacatcctccctgtctgcctctctgggagacagagtcaccatcagttgcagggcaagtcaggacattagtaaatatttaaattggtatcagcagaaaccagatggaactgttaaactcctgatctaccatacatcaagattacactcaggagtcccatcaaggttcagtggcagtgggtctggaacagattattctctcaccattagcaacctggagcaagaagatattgccacttacttttgccaacagggtaatacgcttccgtacacgttcggaggggggaccaagctggagatcacaggtggcggtggctcgggcggtggtgggtcgggtggcggcggatctgaggtgaaactgcaggagtcaggacctggcctggtggcgccctcacagagcctgtccgtcacatgcactgtctcaggggtctcattacccgactatggtgtaagctggattcgccagcctccacgaaagggtctggagtggctgggagtaatatggggtagtgaaaccacatactataattcagctctcaaatccagactgaccatcatcaaggacaactccaagagccaagttttcttaaaaatgaacagtctgcaaactgatgacacagccatttactactgtgccaaacattattactacggtggtagctatgctatggactactggggtcaaggaacctcagtcaccgtctcctcaacgcgtgagctgggagagcctcagctgtgctatatcctggacgccatcctgtttctgtacggcatcgtgctgaccctgctgtactgccggctgaagatccaagtgcggaaggccgccatcaccagctacgagaaatccgacggcgtgtacaccggcctgagcaccagaaatcaagagacatacgagacactgaagcacgaaaagcctccacaacgcgccaagagaagcggatctggcgtgaagcagaccctgaatttcgacctgctgaagctggctggcgacgtggaatccaacccaggcccttctagaggccatatgaccgagtacaagcccacggtgcgcctcgccacccgcgacgacgtccccagggccgtacgcaccctcgccgccgcgttcgccgactaccccgccacgcgccacaccgtcgatccggaccgccacatcgagcgggtcaccgagctgcaagaactcttcctcacgcgcgtcgggctcgacatcggcaaggtgtgggtcgcggacgacggcgccgcggtggcggtctggaccacgccggagagcgtcgaagcgggggcggtgttcgccgagatcggcccgcgcatggccgagttgagcggttcccggctggccgcgcagcaacagatggaaggcctcctggcgccgcaccggcccaaggagcccgcgtggttcctggccaccgtcggcgtctcgcccgaccaccagggcaagggtctgggcagcgccgtcgtgctccccggagtggaggcggccgagcgcgccggggtgcccgccttcctggagacctccgcgccccgcaacctccccttctacgagcggctcggcttcaccgtcaccgccgacgtcgaggtgcccgaaggaccgcgcacctggtgcatgacccgcaagcccggtgcctga

SEQ ID NO: 17523 - DNA, 2292 bp, synthetic construct
  source 1..2292: mol_type = other DNA
atggccttaccagtgaccgccttgctcctgccgctggccttgctgctccacgccgccaggccgctcgagcagagttttgggttgttggaccctaaattgtgctatctgttggacggaatcctgttcatttacggagtgatcctgaccgcattgttcctgcgggttaagttttccagatccgcagacgcacccgcttaccaacaagggcagaaccaactctacaatgaacttaatttggggcggagggaagagtacgacgttctggacaaaaggaggggacgagatcccgagatgggcggaaagcctcagcgaaggaagaatccgcaagaggggctttataacgaactccagaaagataaaatggcagaagcctatagtgagattgggatgaagggagaaaggaggaggggtaaaggtcacgatgggttgtaccaaggattgagcacagccactaaagatacctatgatgcgctccacatgcaggccctgccgccaagaagggccaagcgatctggatctggagcaacaaacttctcactactcaaacaagcaggtgacgtggaggagaatcccgggcctactagcaccatggccttaccagtgaccgccttgctcctgccgctggccttgctgctccacgccgccaggccggagatcgtgatgacccagagccctgccaccctgtctctgagccctggcgaaagagccaccctgagctgtagagccagccaggacatcagcaagtacctgaactggtatcagcagaagcccggccaggcccccagactgctgatctaccacaccagcagactgcacagcggcatccccgccagattttctggctctggcagcggcaccgactacaccctgacaatcagcagcctccagcccgaggacttcgccgtgtacttctgtcagcaaggcaacaccctgccctacaccttcggccagggcaccaagctggaaatcaagggcggaggcggaagtggaggcggaggatctggcggcggaggctctcaggtgcaactccaggaatctggccctggcctcgtgaagcccagcgagacactgagcctgacctgtaccgtgtccggcgtgtccctgcctgactatggcgtgtcctggatcagacagccccctggcaagggcctggaatggatcggagtgatttggggcagcgaaaccacctactacaacagctccctgaagtccagagtgaccatctccaaggacaactccaagaaccaggtgtccctgaagctgagcagcgtgacagccgccgacaccgccgtgtattactgcgccaagcactactactacggcggcagctacgctatggactactggggccagggaaccctcgtgaccgtgtctagtacgcgtgagctgggagagcctcagctgtgctatatcctggacgccatcctgtttctgtacggcatcgtgctgaccctgctgtactgccggctgaagatccaagtgcggaaggccgccatcaccagctacgagaaatccgacggcgtgtacaccggcctgagcaccagaaatcaagagacatacgagacactgaagcacgaaaagcctccacaacgcgccaagagaagcggatctggcgtgaagcagaccctgaatttcgacctgctgaagctggctggcgacgtggaatccaacccaggcccttctagaggccatatgaccgagtacaagcccacggtgcgcctcgccacccgcgacgacgtccccagggccgtacgcaccctcgccgccgcgttcgccgactaccccgccacgcgccacaccgtcgatccggaccgccacatcgagcgggtcaccgagctgcaagaactcttcctcacgcgcgtcgggctcgacatcggcaaggtgtgggtcgcggacgacggcgccgcggtggcggtctggaccacgccggagagcgtcgaagcgggggcggtgttcgccgagatcggcccgcgcatggccgagttgagcggttcccggctggccgcgcagcaacagatggaaggcctcctggcgccgcaccggcccaaggagcccgcgtggttcctggccaccgtcggcgtctcgcccgaccaccagggcaagggtctgggcagcgccgtcgtgctccccggagtggaggcggccgagcgcgccggggtgcccgccttcctggagacctccgcgccccgcaacctccccttctacgagcggctcggcttcaccgtcaccgccgacgtcgaggtgcccgaaggaccgcgcacctggtgcatgacccgcaagcccggtgcctga

SEQ ID NO: 17524 - DNA, 2295 bp, synthetic construct
  source 1..2295: mol_type = other DNA
atggccttaccagtgaccgccttgctcctgccgctggccttgctgctccacgccgccaggccgctcgagcagagttttgggttgttggaccctaaattgtgctatctgttggacggaatcctgttcatttacggagtgatcctgaccgcattgttcctgcgggttaagttttccagatccgcagacgcacccgcttaccaacaagggcagaaccaactctacaatgaacttaatttggggcggagggaagagtacgacgttctggacaaaaggaggggacgagatcccgagatgggcggaaagcctcagcgaaggaagaatccgcaagaggggctttataacgaactccagaaagataaaatggcagaagcctatagtgagattgggatgaagggagaaaggaggaggggtaaaggtcacgatgggttgtaccaaggattgagcacagccactaaagatacctatgatgcgctccacatgcaggccctgccgccaagaagggccaagcgatctggatctggagcaacaaacttctcactactcaaacaagcaggtgacgtggaggagaatcccgggcctactagcaccatggccttaccagtgaccgccttgctcctgccgctggccttgctgctccacgccgccaggccggacgagatcgtgctgacacagagccccgccaccctgtcactgtctccaggcgaaagagccaccctgagctgtagcgccagcagcagcgtgtcctacatgcactggtatcagcagaagcccggccaggcccccagactgctgatctacgataccagcaagctggcctccggcatccccgccagattttctggcagcggctccggcaccgacttcaccctgacaatcagcagcctggaacccgaggacgtggccgtgtactactgttttcaaggcagcgtgtaccccttcaccttcggccagggcaccaagctggaaatcaagagaggtggcggtggctcgggcggtggtgggtcgggtggcggcggatctcaggtgcagctccaggaatctggccctggcctcgtgaagcctagccagaccctgagcctgacctgtaccgtgtctggcggcagcatcagcacaagcggcatgggcgtgggctggatcagacagcaccctggcaagggcctggaatggatcggccacatttggtgggacgacgacaagcggtacaaccccgccctgaagtccagagtgaccatcagcgtggacaccagcaagaaccagttcagcctgaagctgagcagcgtgacagccgccgataccgccgtgtattattgcgcccggatggaactgtggtcctactacttcgactactggggccagggaaccctcgtgaccgtgtctagtacgcgtgagctgggagagcctcagctgtgctatatcctggacgccatcctgtttctgtacggcatcgtgctgaccctgctgtactgccggctgaagatccaagtgcggaaggccgccatcaccagctacgagaaatccgacggcgtgtacaccggcctgagcaccagaaatcaagagacatacgagacactgaagcacgaaaagcctccacaacgcgccaagagaagcggatctggcgtgaagcagaccctgaatttcgacctgctgaagctggctggcgacgtggaatccaacccaggcccttctagaggccatatgaccgagtacaagcccacggtgcgcctcgccacccgcgacgacgtccccagggccgtacgcaccctcgccgccgcgttcgccgactaccccgccacgcgccacaccgtcgatccggaccgccacatcgagcgggtcaccgagctgcaagaactcttcctcacgcgcgtcgggctcgacatcggcaaggtgtgggtcgcggacgacggcgccgcggtggcggtctggaccacgccggagagcgtcgaagcgggggcggtgttcgccgagatcggcccgcgcatggccgagttgagcggttcccggctggccgcgcagcaacagatggaaggcctcctggcgccgcaccggcccaaggagcccgcgtggttcctggccaccgtcggcgtctcgcccgaccaccagggcaagggtctgggcagcgccgtcgtgctccccggagtggaggcggccgagcgcgccggggtgcccgccttcctggagacctccgcgccccgcaacctccccttctacgagcggctcggcttcaccgtcaccgccgacgtcgaggtgcccgaaggaccgcgcacctggtgcatgacccgcaagcccggtgcctga

SEQ ID NO: 17525 - DNA, 2283 bp, synthetic construct
  source 1..2283: mol_type = other DNA
atggccttaccagtgaccgccttgctcctgccgctggccttgctgctccacgccgccaggccgctcgagcagagttttgggttgttggaccctaaattgtgctatctgttggacggaatcctgttcatttacggagtgatcctgaccgcattgttcctgcgggttaagttttccagatccgcagacgcacccgcttaccaacaagggcagaaccaactctacaatgaacttaatttggggcggagggaagagtacgacgttctggacaaaaggaggggacgagatcccgagatgggcggaaagcctcagcgaaggaagaatccgcaagaggggctttataacgaactccagaaagataaaatggcagaagcctatagtgagattgggatgaagggagaaaggaggaggggtaaaggtcacgatgggttgtaccaaggattgagcacagccactaaagatacctatgatgcgctccacatgcaggccctgccgccaagaagggccaagcgatctggatctggagcaacaaacttctcactactcaaacaagcaggtgacgtggaggagaatcccgggcctactagcatggccttaccagtgaccgccttgctcctgccgctggccttgctgctccacgccgccaggccggacatccagatgacacagagccctagcagcctgtctgccagcgtgggagacagagtgaccatcacctgtagagccagccaggacatcagcaactacctgaactggtatcagcagaagcccggcaaggcccctaagctgctgatctactacaccagcagactgcacagcggcgtgcccagcagattttctggctctggcagcggcaccgacttcaccctgacaatatctagcctccagcctgaggacttcgccacctactattgccagcagggcaacaccctgccttacacatttggacagggcaccaaggtggaaatcaagagaggcggaggcggaagtggaggcggaggatctggcggcggaggctctgaagtgcagctggttgaatcaggtggcggcctggttcaacctggcggatctctgagactgagctgtgccgccagcggcttcaccttcagcgactactttatgagctgggtccgacaggcccctggcaaaggacttgaatgggtcgccaccatcagcaatggcggcacctacacttactaccccgacagcgtgaagggcagattcaccatctccagagacaacagcaagaacaccctgtacctccagatgaactccctgagagccgaggacaccgccgtgtactactgcgccagattcgacggctacatcttcgactattggggccagggcaccctggtcacagtctcttctacgcgtgagctgggagagcctcagctgtgctatatcctggacgccatcctgtttctgtacggcatcgtgctgaccctgctgtactgccggctgaagatccaagtgcggaaggccgccatcaccagctacgagaaatccgacggcgtgtacaccggcctgagcaccagaaatcaagagacatacgagacactgaagcacgaaaagcctccacaacgcgccaagagaagcggatctggcgtgaagcagaccctgaatttcgacctgctgaagctggctggcgacgtggaatccaacccaggcccttctagaggccatatgaccgagtacaagcccacggtgcgcctcgccacccgcgacgacgtccccagggccgtacgcaccctcgccgccgcgttcgccgactaccccgccacgcgccacaccgtcgatccggaccgccacatcgagcgggtcaccgagctgcaagaactcttcctcacgcgcgtcgggctcgacatcggcaaggtgtgggtcgcggacgacggcgccgcggtggcggtctggaccacgccggagagcgtcgaagcgggggcggtgttcgccgagatcggcccgcgcatggccgagttgagcggttcccggctggccgcgcagcaacagatggaaggcctcctggcgccgcaccggcccaaggagcccgcgtggttcctggccaccgtcggcgtctcgcccgaccaccagggcaagggtctgggcagcgccgtcgtgctccccggagtggaggcggccgagcgcgccggggtgcccgccttcctggagacctccgcgccccgcaacctccccttctacgagcggctcggcttcaccgtcaccgccgacgtcgaggtgcccgaaggaccgcgcacctggtgcatgacccgcaagcccggtgcctga

SEQ ID NO: 17526 - DNA, 2295 bp, synthetic construct
  source 1..2295: mol_type = other DNA
atggccttaccagtgaccgccttgctcctgccgctggccttgctgctccacgccgccaggccgctcgagcagagttttgggttgttggaccctaaattgtgctatctgttggacggaatcctgttcatttacggagtgatcctgaccgcattgttcctgcgggttaagttttccagatccgcagacgcacccgcttaccaacaagggcagaaccaactctacaatgaacttaatttggggcggagggaagagtacgacgttctggacaaaaggaggggacgagatcccgagatgggcggaaagcctcagcgaaggaagaatccgcaagaggggctttataacgaactccagaaagataaaatggcagaagcctatagtgagattgggatgaagggagaaaggaggaggggtaaaggtcacgatgggttgtaccaaggattgagcacagccactaaagatacctatgatgcgctccacatgcaggccctgccgccaagaagggccaagcgatctggatctggagcaacaaacttctcactactcaaacaagcaggtgacgtggaggagaatcccgggcctactagcatggccttaccagtgaccgccttgctcctgccgctggccttgctgctccacgccgccaggccggacatccagatgacacagagccctagcagcctgtctgccagcgtgggagacagagtgaccatcacatgcaaggccagcgaccacatcaacaactggctggcctggtatcagcagaagcctggacaggcccctaagctgctgatctacggcgctaccacactggaaacaggcgtgcccagcagattttctggcagcggctctggcaccgactacaccctgacaatatccagcctccagcctgaggacttcgccacctactactgtcagcagagctggaacaccccttggacattcggccagggcaccaagctggaaatcaagagaggcggaggcggaagtggaggcggaggatctggcggcggaggctctcaagttcagcttcaacagcctggcgctgagctggtcaaacctggcgcttctgtgaagatgagctgcaaagccagcggctacgccttcagcagctactggatcaactggatgaagcagaaacccggccagggactcgaatggatcggccaaatctatcccggcgacggcgacaccaactacaacggcaagttcaagggcagagccacactgaccgccgatacctctagcagcacagcctacatgcagctgagcagcctgaccagcgaagatagcgccgtgtacttctgtgcccggtccatcacaacagtcgtgggctgcgctatggactattggggccagggaacaagcgtgaccgtgtctagtacgcgtgagctgggagagcctcagctgtgctatatcctggacgccatcctgtttctgtacggcatcgtgctgaccctgctgtactgccggctgaagatccaagtgcggaaggccgccatcaccagctacgagaaatccgacggcgtgtacaccggcctgagcaccagaaatcaagagacatacgagacactgaagcacgaaaagcctccacaacgcgccaagagaagcggatctggcgtgaagcagaccctgaatttcgacctgctgaagctggctggcgacgtggaatccaacccaggcccttctagaggccatatgaccgagtacaagcccacggtgcgcctcgccacccgcgacgacgtccccagggccgtacgcaccctcgccgccgcgttcgccgactaccccgccacgcgccacaccgtcgatccggaccgccacatcgagcgggtcaccgagctgcaagaactcttcctcacgcgcgtcgggctcgacatcggcaaggtgtgggtcgcggacgacggcgccgcggtggcggtctggaccacgccggagagcgtcgaagcgggggcggtgttcgccgagatcggcccgcgcatggccgagttgagcggttcccggctggccgcgcagcaacagatggaaggcctcctggcgccgcaccggcccaaggagcccgcgtggttcctggccaccgtcggcgtctcgcccgaccaccagggcaagggtctgggcagcgccgtcgtgctccccggagtggaggcggccgagcgcgccggggtgcccgccttcctggagacctccgcgccccgcaacctccccttctacgagcggctcggcttcaccgtcaccgccgacgtcgaggtgcccgaaggaccgcgcacctggtgcatgacccgcaagcccggtgcctga

SEQ ID NO: 17527 - DNA, 2301 bp, synthetic construct
  source 1..2301: mol_type = other DNA
atggccttaccagtgaccgccttgctcctgccgctggccttgctgctccacgccgccaggccgctcgagcagagttttgggttgttggaccctaaattgtgctatctgttggacggaatcctgttcatttacggagtgatcctgaccgcattgttcctgcgggttaagttttccagatccgcagacgcacccgcttaccaacaagggcagaaccaactctacaatgaacttaatttggggcggagggaagagtacgacgttctggacaaaaggaggggacgagatcccgagatgggcggaaagcctcagcgaaggaagaatccgcaagaggggctttataacgaactccagaaagataaaatggcagaagcctatagtgagattgggatgaagggagaaaggaggaggggtaaaggtcacgatgggttgtaccaaggattgagcacagccactaaagatacctatgatgcgctccacatgcaggccctgccgccaagaagggccaagcgatctggatctggagcaacaaacttctcactactcaaacaagcaggtgacgtggaggagaatcccgggcctactagcatggccttaccagtgaccgccttgctcctgccgctggccttgctgctccacgccgccaggccgcagatcgtgctgtctcagtctcctgccatcctgagcgcttccccaggcgagaaagtgaccatgacctgtagagccagcagcagcgtgtcctacatgcactggtatcagcagaagcccggcagcagccctaagccttggatctacgccaccagcaatctggcctctggcgtgccagccagattttctggctctggcagcggcaccagctacagcttcacaatcagcagagtggaagccgaggacgccgccacctactattgtcagcagtggaccttcaatcctcctaccttcggcggaggcacccggctggaaatcaaaagaacagtggctgctggcggaggcggaagtggaggcggaggatctggcggcggaggctctcaggcttatctgcaacagagcggagccgaactcgtcagacctggcgcttctgtgaagatgagctgcaaggccagcggctacaccttcaccagctataatatgcactgggtcaagcagacccctcggcagggactcgaatggatcggcggaatctatcccggcaacggcgacacctcctacaaccagaagttcaagggcaaagccacactgaccgtgggcaagagcagcagcaccgcctatatgcagctcagcagcctgaccagcgaggacagcgccgtgtacttctgcgccagatacgactacaactacgctatggactactggggccagggcaccagcgtgacagttagctctgccagcacgcgtgagctgggagagcctcagctgtgctatatcctggacgccatcctgtttctgtacggcatcgtgctgaccctgctgtactgccggctgaagatccaagtgcggaaggccgccatcaccagctacgagaaatccgacggcgtgtacaccggcctgagcaccagaaatcaagagacatacgagacactgaagcacgaaaagcctccacaacgcgccaagagaagcggatctggcgtgaagcagaccctgaatttcgacctgctgaagctggctggcgacgtggaatccaacccaggcccttctagaggccatatgaccgagtacaagcccacggtgcgcctcgccacccgcgacgacgtccccagggccgtacgcaccctcgccgccgcgttcgccgactaccccgccacgcgccacaccgtcgatccggaccgccacatcgagcgggtcaccgagctgcaagaactcttcctcacgcgcgtcgggctcgacatcggcaaggtgtgggtcgcggacgacggcgccgcggtggcggtctggaccacgccggagagcgtcgaagcgggggcggtgttcgccgagatcggcccgcgcatggccgagttgagcggttcccggctggccgcgcagcaacagatggaaggcctcctggcgccgcaccggcccaaggagcccgcgtggttcctggccaccgtcggcgtctcgcccgaccaccagggcaagggtctgggcagcgccgtcgtgctccccggagtggaggcggccgagcgcgccggggtgcccgccttcctggagacctccgcgccccgcaacctccccttctacgagcggctcggcttcaccgtcaccgccgacgtcgaggtgcccgaaggaccgcgcacctggtgcatgacccgcaagcccggtgcctga

SEQ ID NO: 17528 - DNA, 2295 bp, synthetic construct
  source 1..2295: mol_type = other DNA
atggccttaccagtgaccgccttgctcctgccgctggccttgctgctccacgccgccaggccgctcgagcagagttttgggttgttggaccctaaattgtgctatctgttggacggaatcctgttcatttacggagtgatcctgaccgcattgttcctgcgggttaagttttccagatccgcagacgcacccgcttaccaacaagggcagaaccaactctacaatgaacttaatttggggcggagggaagagtacgacgttctggacaaaaggaggggacgagatcccgagatgggcggaaagcctcagcgaaggaagaatccgcaagaggggctttataacgaactccagaaagataaaatggcagaagcctatagtgagattgggatgaagggagaaaggaggaggggtaaaggtcacgatgggttgtaccaaggattgagcacagccactaaagatacctatgatgcgctccacatgcaggccctgccgccaagaagggccaagcgatctggatctggagcaacaaacttctcactactcaaacaagcaggtgacgtggaggagaatcccgggcctactagcatggccttaccagtgaccgccttgctcctgccgctggccttgctgctccacgccgccaggccggagatcgtgctgacacagagccctgccaccctgtctctgagccctggcgaaagagccaccctgagctgtagagccagccagagcgtgtccagctacctggcctggtatcagcagaagcccggccaggctccccggctgctgatctacgatgccagcaatagagccaccggcatccccgccagattttccggctctggcagcggcaccgacttcaccctgaccatcagctccctggaacccgaggacttcgccgtgtactactgccagcagcggagcaactggcccatcacattcggccagggcacccggctggaaatcaaaggcggaggcggaagtggaggcggaggatctggcggcggaggctctgaggtgcagcttgttgagtctggcggaggactggtgcagcccgatagaagcctgagactgtcttgtgccgccagcggcttcaccttccacgattatgccatgcactgggtccgacaggcccctggcaaaggacttgaatgggtgtccaccatctcttggaacagcggcacaatcggctacgccgactctgtgaagggcagattcaccatcagccgggacaacgccaagaacagcctgtacctccagatgaactccctgagagccgaggacacagccctgtactactgcgccaaggacatccagtacggcaactactactacggcatggacgtgtggggccagggcacaacagtgacagtctcttctacgcgtgagctgggagagcctcagctgtgctatatcctggacgccatcctgtttctgtacggcatcgtgctgaccctgctgtactgccggctgaagatccaagtgcggaaggccgccatcaccagctacgagaaatccgacggcgtgtacaccggcctgagcaccagaaatcaagagacatacgagacactgaagcacgaaaagcctccacaacgcgccaagagaagcggatctggcgtgaagcagaccctgaatttcgacctgctgaagctggctggcgacgtggaatccaacccaggcccttctagaggccatatgaccgagtacaagcccacggtgcgcctcgccacccgcgacgacgtccccagggccgtacgcaccctcgccgccgcgttcgccgactaccccgccacgcgccacaccgtcgatccggaccgccacatcgagcgggtcaccgagctgcaagaactcttcctcacgcgcgtcgggctcgacatcggcaaggtgtgggtcgcggacgacggcgccgcggtggcggtctggaccacgccggagagcgtcgaagcgggggcggtgttcgccgagatcggcccgcgcatggccgagttgagcggttcccggctggccgcgcagcaacagatggaaggcctcctggcgccgcaccggcccaaggagcccgcgtggttcctggccaccgtcggcgtctcgcccgaccaccagggcaagggtctgggcagcgccgtcgtgctccccggagtggaggcggccgagcgcgccggggtgcccgccttcctggagacctccgcgccccgcaacctccccttctacgagcggctcggcttcaccgtcaccgccgacgtcgaggtgcccgaaggaccgcgcacctggtgcatgacccgcaagcccggtgcctga

SEQ ID NO: 17529 - DNA, 2289 bp, synthetic construct
  source 1..2289: mol_type = other DNA
atggccttaccagtgaccgccttgctcctgccgctggccttgctgctccacgccgccaggccgctcgagcagagttttgggttgttggaccctaaattgtgctatctgttggacggaatcctgttcatttacggagtgatcctgaccgcattgttcctgcgggttaagttttccagatccgcagacgcacccgcttaccaacaagggcagaaccaactctacaatgaacttaatttggggcggagggaagagtacgacgttctggacaaaaggaggggacgagatcccgagatgggcggaaagcctcagcgaaggaagaatccgcaagaggggctttataacgaactccagaaagataaaatggcagaagcctatagtgagattgggatgaagggagaaaggaggaggggtaaaggtcacgatgggttgtaccaaggattgagcacagccactaaagatacctatgatgcgctccacatgcaggccctgccgccaagaagggccaagcgatctggatctggagcaacaaacttctcactactcaaacaagcaggtgacgtggaggagaatcccgggcctactagcatggccttaccagtgaccgccttgctcctgccgctggccttgctgctccacgccgccaggccggacatccagatgacccagagccccagcagcctgtctgccagcgtgggcgacagagtgaccatcacctgtagagccagccaggacgtgaacaccgccgtggcctggtatcagcagaagcctggcaaggcccccaagctgctgatctacagcgccagcttcctggaaagcggcgtgcccagcagattcagcggaagcagaagcggcaccgacttcaccctgaccatcagctccctccagcccgaggacttcgccacctactactgccagcagcactacaccacccctcccaccttcggccagaccaaggtggaaatcaagagaggcggaggcggaagtggaggcggaggatctggcggcggaggctctgaagtgcaactggtggaatctggcggcggactggtgcagcctggcggatctctgagactgagctgtgccgccagcggcttcaacatcaaggacacctacatccactgggtgcgccaggcccctggaaagggactggaatgggtggcccggatctaccccaccaacggctacaccagatacgccgacagcgtgaagggccggttcaccatcagcgccgacaccagcaagaataccgcctacctccagatgaacagcctgcgggccgaggataccgccgtgtactactgctcaagatggggaggcgacggcttctacgctatggacgtgtggggccagggcacccttgtgaccgtgtcatctacgcgtgagctgggagagcctcagctgtgctatatcctggacgccatcctgtttctgtacggcatcgtgctgaccctgctgtactgccggctgaagatccaagtgcggaaggccgccatcaccagctacgagaaatccgacggcgtgtacaccggcctgagcaccagaaatcaagagacatacgagacactgaagcacgaaaagcctccacaacgcgccaagagaagcggatctggcgtgaagcagaccctgaatttcgacctgctgaagctggctggcgacgtggaatccaacccaggcccttctagaggccatatgaccgagtacaagcccacggtgcgcctcgccacccgcgacgacgtccccagggccgtacgcaccctcgccgccgcgttcgccgactaccccgccacgcgccacaccgtcgatccggaccgccacatcgagcgggtcaccgagctgcaagaactcttcctcacgcgcgtcgggctcgacatcggcaaggtgtgggtcgcggacgacggcgccgcggtggcggtctggaccacgccggagagcgtcgaagcgggggcggtgttcgccgagatcggcccgcgcatggccgagttgagcggttcccggctggccgcgcagcaacagatggaaggcctcctggcgccgcaccggcccaaggagcccgcgtggttcctggccaccgtcggcgtctcgcccgaccaccagggcaagggtctgggcagcgccgtcgtgctccccggagtggaggcggccgagcgcgccggggtgcccgccttcctggagacctccgcgccccgcaacctccccttctacgagcggctcggcttcaccgtcaccgccgacgtcgaggtgcccgaaggaccgcgcacctggtgcatgacccgcaagcccggtgcctga

SEQ ID NO: 17530 - DNA, 1926 bp, synthetic construct
  source 1..1926: mol_type = other DNA
atggccttaccagtgaccgccttgctcctgccgctggccttgctgctccacgccgccaggccgctcgagcagagttttgggttgttggaccctaaattgtgctatctgttggacggaatcctgttcatttacggagtgatcctgaccgcattgttcctgcgggttaagttttccagatccgcagacgcacccgcttaccaacaagggcagaaccaactctacaatgaacttaatttggggcggagggaagagtacgacgttctggacaaaaggaggggacgagatcccgagatgggcggaaagcctcagcgaaggaagaatccgcaagaggggctttataacgaactccagaaagataaaatggcagaagcctatagtgagattgggatgaagggagaaaggaggaggggtaaaggtcacgatgggttgtaccaaggattgagcacagccactaaagatacctatgatgcgctccacatgcaggccctgccgccaagaagggccaagcgatctggatctggagcaacaaacttctcactactcaaacaagcaggtgacgtggaggagaatcccgggcctactagcatggccctgcccgtgacagccctgctgctgcctctggctctgctgctgcacgccgccagacccgatgaattcgaggtgcaactggtggaaagcggcggaggcctggtgcaggctggcggatctctgagactgagctgtgccgccagcggcatcaccttcagcatcaacacaatgggctggtacagacaggcccctggcaagcagagggaactggtggccctgatctccagcatcggcgacacctactacgccgacagcgtgaagggccggttcaccatcagccgggacaacgccaagaacaccgtgtacctccagatgaacagcctgaagcccgaggacaccgccgtgtactactgcaagcggttcagaacagccgcccagggcaccgattattggggccagggaacacaagtgaccgtgtcctctacgcgtgagctgggagagcctcagctgtgctatatcctggacgccatcctgtttctgtacggcatcgtgctgaccctgctgtactgccggctgaagatccaagtgcggaaggccgccatcaccagctacgagaaatccgacggcgtgtacaccggcctgagcaccagaaatcaagagacatacgagacactgaagcacgaaaagcctccacaacgcgccaagagaagcggatctggcgtgaagcagaccctgaatttcgacctgctgaagctggctggcgacgtggaatccaacccaggcccttctagaggccatatgaccgagtacaagcccacggtgcgcctcgccacccgcgacgacgtccccagggccgtacgcaccctcgccgccgcgttcgccgactaccccgccacgcgccacaccgtcgatccggaccgccacatcgagcgggtcaccgagctgcaagaactcttcctcacgcgcgtcgggctcgacatcggcaaggtgtgggtcgcggacgacggcgccgcggtggcggtctggaccacgccggagagcgtcgaagcgggggcggtgttcgccgagatcggcccgcgcatggccgagttgagcggttcccggctggccgcgcagcaacagatggaaggcctcctggcgccgcaccggcccaaggagcccgcgtggttcctggccaccgtcggcgtctcgcccgaccaccagggcaagggtctgggcagcgccgtcgtgctccccggagtggaggcggccgagcgcgccggggtgcccgccttcctggagacctccgcgccccgcaacctccccttctacgagcggctcggcttcaccgtcaccgccgacgtcgaggtgcccgaaggaccgcgcacctggtgcatgacccgcaagcccggtgcctga

SEQ ID NO: 17531 - DNA, 1926 bp, synthetic construct; identical to SEQ ID NO: 17530
  source 1..1926: mol_type = other DNA

SEQ ID NO: 17532 - DNA, 2721 bp, synthetic construct
  source 1..2721: mol_type = other DNA
atggccttaccagtgaccgccttgctcctgccgctggccttgctgctccacgccgccaggccgctcgagcagagttttgggttgttggaccctaaattgtgctatctgttggacggaatcctgttcatttacggagtgatcctgaccgcattgttcctgcgggttaagttttccagatccgcagacgcacccgcttaccaacaagggcagaaccaactctacaatgaacttaatttggggcggagggaagagtacgacgttctggacaaaaggaggggacgagatcccgagatgggcggaaagcctcagcgaaggaagaatccgcaagaggggctttataacgaactccagaaagataaaatggcagaagcctatagtgagattgggatgaagggagaaaggaggaggggtaaaggtcacgatgggttgtaccaaggattgagcacagccactaaagatacctatgatgcgctccacatgcaggccctgccgccaagaagggccaagcgatctggatctggagcaacaaacttctcactactcaaacaagcaggtgacgtggaggagaatcccgggcctactagcatggccttaccagtgaccgccttgctcctgccgctggccttgctgctccacgccgccaggccgcaggtccagctcgtcgagtccggcggcggcctcgtccaggccggcgactccgtcaccctctcctgcaccgcctccggccgcaccttctcctcctacgccctcgcctggttccgccagcgccccggcaaggagcgcgagttcgtcgccggcctccgctggggcggccccaccaactacgccgactccgtcaaggaccgcttcaccatctccggcgactccgccaagcacaccatgtacctccagatgaactccctcaagcccgaggacaccgccgtctactactgcggctacaaccccggcggctgggccgtcccctcccagtacgagtacgactcctggggccagggcacccaggtcaccgtctcctccggtaccggcggaggcggatctggcggcggaggtagcggtggcggaggatctgaattcgacatccagatgacacagagccctagcagcctgtctgccagcgtgggagacagagtgaccatcacatgcaaggccagcgaccacatcaacaactggctggcctggtatcagcagaagcctggacaggcccctaagctgctgatctacggcgctaccacactggaaacaggcgtgcccagcagattttctggcagcggctctggcaccgactacaccctgacaatatccagcctccagcctgaggacttcgccacctactactgtcagcagagctggaacaccccttggacattcggccagggcaccaagctggaaatcaagagaggcggaggcggaagtggaggcggaggatctggcggcggaggctctcaagttcagcttcaacagcctggcgctgagctggtcaaacctggcgcttctgtgaagatgagctgcaaagccagcggctacgccttcagcagctactggatcaactggatgaagcagaaacccggccagggactcgaatggatcggccaaatctatcccggcgacggcgacaccaactacaacggcaagttcaagggcagagccacactgaccgccgatacctctagcagcacagcctacatgcagctgagcagcctgaccagcgaagatagcgccgtgtacttctgtgcccggtccatcacaacagtcgtgggctgcgctatggactattggggccagggaacaagcgtgaccgtgtctagtacgcgtgagctgggagagcctcagctgtgctatatcctggacgccatcctgtttctgtacggcatcgtgctgaccctgctgtactgccggctgaagatccaagtgcggaaggccgccatcaccagctacgagaaatccgacggcgtgtacaccggcctgagcaccagaaatcaagagacatacgagacactgaagcacgaaaagcctccacaacgcgccaagagaagcggatctggcgtgaagcagaccctgaatttcgacctgctgaagctggctggcgacgtggaatccaacccaggcccttctagaggccatatgaccgagtacaagcccacggtgcgcctcgccacccgcgacgacgtccccagggccgtacgcaccctcgccgccgcgttcgccgactaccccgccacgcgccacaccgtcgatccggaccgccacatcgagcgggtcaccgagctgcaagaactcttcctcacgcgcgtcgggctcgacatcggcaaggtgtgggtcgcggacgacggcgccgcggtggcggtctggaccacgccggagagcgtcgaagcgggggcggtgttcgccgagatcggcccgcgcatggccgagttgagcggttcccggctggccgcgcagcaacagatggaaggcctcctggcgccgcaccggcccaaggagcccgcgtggttcctggccaccgtcggcgtctcgcccgaccaccagggcaagggtctgggcagcgccgtcgtgctccccggagtggaggcggccgagcgcgccggggtgcccgccttcctggagacctccgcgccccgcaacctccccttctacgagcggctcggcttcaccgtcaccgccgacgtcgaggtgcccgaaggaccgcgcacctggtgcatgacccgcaagcccggtgcctga

SEQ ID NO: 17533 - DNA, 3108 bp, synthetic construct
  source 1..3108: mol_type = other DNA
atggccttaccagtgaccgccttgctcctgccgctggccttgctgctccacgccgccaggccgctcgagcagagttttgggttgttggaccctaaattgtgctatctgttggacggaatcctgttcatttacggagtgatcctgaccgcattgttcctgcgggttaagttttccagatccgcagacgcacccgcttaccaacaagggcagaaccaactctacaatgaacttaatttggggcggagggaagagtacgacgttctggacaaaaggaggggacgagatcccgagatgggcggaaagcctcagcgaaggaagaatccgcaagaggggctttataacgaactccagaaagataaaatggcagaagcctatagtgagattgggatgaagggagaaaggaggaggggtaaaggtcacgatgggttgtaccaaggattgagcacagccactaaagatacctatgatgcgctccacatgcaggccctgccgccaagaagggccaagcgatctggatctggagcaacaaacttctcactactcaaacaagcaggtgacgtggaggagaatcccgggcctactagcatggccttaccagtgaccgccttgctcctgccgctggccttgctgctccacgccgccaggccggaggttcagctgcttgagtctggcggaggactggttcaacctggcggaagcctgagactgtcttgtgccgccagcggcttcacctttagcagctacgccatgagctgggtccgacaggctcctggcaaaggactggaatgggtgtccagcatcagcggcagcggcgactacatctactacgccgatagcgtgaagggcagattcaccatcagccgggacatcagcaagaacaccctgtacctccagatgaacagcctgagagccgaggacaccgccgtgtactactgtgccaaagaaggcaccggcgctaacagcagcctggccgattatagaggccagggcacactggtcaccgtgtctagtggcggaggaagcggcggaggatctcaggtccagctcgtcgagtccggcggcggcctcgtccaggccggcgactccgtcaccctctcctgcaccgcctccggccgcaccttctcctcctacgccctcgcctggttccgccagcgccccggcaaggagcgcgagttcgtcgccggcctccgctggggcggccccaccaactacgccgactccgtcaaggaccgcttcaccatctccggcgactccgccaagcacaccatgtacctccagatgaactccctcaagcccgaggacaccgccgtctactactgcggctacaaccccggcggctgggccgtcccctcccagtacgagtacgactcctggggccagggcacccaggtcaccgtctcctccggtaccggcggaggcggatctggcggcggaggtagcggtggcggaggatctgaattcgacatccagatgacacagagccctagcagcctgtctgccagcgtgggagacagagtgaccatcacatgcaaggccagcgaccacatcaacaactggctggcctggtatcagcagaagcctggacaggcccctaagctgctgatctacggcgctaccacactggaaacaggcgtgcccagcagattttctggcagcggctctggcaccgactacaccctgacaatatccagcctccagcctgaggacttcgccacctactactgtcagcagagctggaacaccccttggacattcggccagggcaccaagctggaaatcaagagaggcggaggcggaagtggaggcggaggatctggcggcggaggctctcaagttcagcttcaacagcctggcgctgagctggtcaaacctggcgcttctgtgaagatgagctgcaaagccagcggctacgccttcagcagctactggatcaactggatgaagcagaaacccggccagggactcgaatggatcggccaaatctatcccggcgacggcgacaccaactacaacggcaagttcaagggcagagccacactgaccgccgatacctctagcagcacagcctacatgcagctgagcagcctgaccagcgaagatagcgccgtgtacttctgtgcccggtccatcacaacagtcgtgggctgcgctatggactattggggccagggaacaagcgtgaccgtgtctagtacgcgtgagctgggagagcctcagctgtgctatatcctggacgccatcctgtttctgtacggcatcgtgctgaccctgctgtactgccggctgaagatccaagtgcggaaggccgccatcaccagctacgagaaatccgacggcgtgtacaccggcctgagcaccagaaatcaagagacatacgagacactgaagcacgaaaagcctccacaacgcgccaagagaagcggatctggcgtgaagcagaccctgaatttcgacctgctgaagctggctggcgacgtggaatccaacccaggcccttctagaggccatatgaccgagtacaagcccacggtgcgcctcgccacccgcgacgacgtccccagggccgtacgcaccctcgccgccgcgttcgccgactaccccgccacgcgccacaccgtcgatccggaccgccacatcgagcgggtcaccgagctgcaagaactcttcctcacgcgcgtcgggctcgacatcggcaaggtgtgggtcgcggacgacggcgccgcggtggcggtctggaccacgccggagagcgtcgaagcgggggcggtgttcgccgagatcggcccgcgcatggccgagttgagcggttcccggctggccgcgcagcaacagatggaaggcctcctggcgccgcaccggcccaaggagcccgcgtggttcctggccaccgtcggcgtctcgcccgaccaccagggcaagggtctgggcagcgccgtcgtgctccccggagtggaggcggccgagcgcgccggggtgcccgccttcctggagacctccgcgccccgcaacctccccttctacgagcggctcggcttcaccgtcaccgccgacgtcgaggtgcccgaaggaccgcgcacctggtgcatgacccgcaagcccggtgcctga

SEQ ID NO: 17534 - DNA, 3102 bp, synthetic construct
  source 1..3102: mol_type = other DNA
atggccttaccagtgaccgccttgctcctgccgctggccttgctgctccacgccgccaggccgctcgagcagagttttgggttgttggaccctaaattgtgctatctgttggacggaatcctgttcatttacggagtgatcctgaccgcattgttcctgcgggttaagttttccagatccgcagacgcacccgcttaccaacaagggcagaaccaactctacaatgaacttaatttggggcggagggaagagtacgacgttctggacaaaaggaggggacgagatcccgagatgggcggaaagcctcagcgaaggaagaatccgcaagaggggctttataacgaactccagaaagataaaatggcagaagcctatagtgagattgggatgaagggagaaaggaggaggggtaaaggtcacgatgggttgtaccaaggattgagcacagccactaaagatacctatgatgcgctccacatgcaggccctgccgccaagaagggccaagcgatctggatctggagcaacaaacttctcactactcaaacaagcaggtgacgtggaggagaatcccgggcctactagcatggccttaccagtgaccgccttgctcctgccgctggccttgctgctccacgccgccaggccgggcgtgacacagagccccacacacctgattaagaccagaggccagcaggccacactgagatgcagccctatcagcggccacaccagcgtgtactggtatcagcaggctctcggactgggcctccagttcctgctttggtacgacgagggcgaagagagaaaccggggcaacttccctcctcggttttccggcagacagttccccaactacagcagcgagctgaacgtgaacgccctggaactggaagatagcgccctgtacctgtgtgcctcttctcttggtggacctcgcggactggctggactgagaggggatgagcagtttttcggccctggcaccagactgaccgtgctggaaggcggaggaagcggcggaggatctcaggtccagctcgtcgagtccggcggcggcctcgtccaggccggcgactccgtcaccctctcctgcaccgcctccggccgcaccttctcctcctacgccctcgcctggttccgccagcgccccggcaaggagcgcgagttcgtcgccggcctccgctggggcggccccaccaactacgccgactccgtcaaggaccgcttcaccatctccggcgactccgccaagcacaccatgtacctccagatgaactccctcaagcccgaggacaccgccgtctactactgcggctacaaccccggcggctgggccgtcccctcccagtacgagtacgactcctggggccagggcacccaggtcaccgtctcctccggtaccggcggaggcggatctggcggcggaggtagcggtggcggaggatctgaattcgacatccagatgacacagagccctagcagcctgtctgccagcgtgggagacagagtgaccatcacatgcaaggccagcgaccacatcaacaactggctggcctggtatcagcagaagcctggacaggcccctaagctgctgatctacggcgctaccacactggaaacaggcgtgcccagcagattttctggcagcggctctggcaccgactacaccctgacaatatccagcctccagcctgaggacttcgccacctactactgtcagcagagctggaacaccccttggacattcggccagggcaccaagctggaaatcaagagaggcggaggcggaagtggaggcggaggatctggcggcggaggctctcaagttcagcttcaacagcctggcgctgagctggtcaaacctggcgcttctgtgaagatgagctgcaaagccagcggctacgccttcagcagctactggatcaactggatgaagcagaaacccggccagggactcgaatggatcggccaaatctatcccggcgacggcgacaccaactacaacggcaagttcaagggcagagccacactgaccgccgatacctctagcagcacagcctacatgcagctgagcagcctgaccagcgaagatagcgccgtgtacttctgtgcccggtccatcacaacagtcgtgggctgcgctatggactattggggccagggaacaagcgtgaccgtgtctagtacgcgtgagctgggagagcctcagctgtgctatatcctggacgccatcctgtttctgtacggcatcgtgctgaccctgctgtactgccggctgaagatccaagtgcggaaggccgccatcaccagctacgagaaatccgacggcgtgtacaccggcctgagcaccagaaatcaagagacatacgagacactgaagcacgaaaagcctccacaacgcgccaagagaagcggatctggcgtgaagcagaccctgaatttcgacctgctgaagctggctggcgacgtggaatccaacccaggcccttctagaggccatatgaccgagtacaagcccacggtgcgcctcgccacccgcgacgacgtccccagggccgtacgcaccctcgccgccgcgttcgccgactaccccgccacgcgccacaccgtcgatccggaccgccacatcgagcgggtcaccgagctgcaagaactcttcctcacgcgcgtcgggctcgacatcggcaaggtgtgggtcgcggacgacggcgccgcggtggcggtctggaccacgccggagagcgtcgaagcgggggcggtgttcgccgagatcggcccgcgcatggccgagttgagcggttcccggctggccgcgcagcaacagatggaaggcctcctggcgccgcaccggcccaaggagcccgcgtggttcctggccaccgtcggcgtctcgcccgaccaccagggcaagggtctgggcagcgccgtcgtgctccccggagtggaggcggccgagcgcgccggggtgcccgccttcctggagacctccgcgccccgcaacctccccttctacgagcggctcggcttcaccgtcaccgccgacgtcgaggtgcccgaaggaccgcgcacctggtgcatgacccgcaagcccggtgcctga

SEQ ID NO: 17535 - DNA, 2382 bp, synthetic construct
  source 1..2382: mol_type = other DNA
atggccttaccagtgaccgccttgctcctgccgctggccttgctgctccacgccgccaggccgctcgagcagagttttgggttgttggaccctaaattgtgctatctgttggacggaatcctgttcatttacggagtgatcctgaccgcattgttcctgcgggttaagttttccagatccgcagacgcacccgcttaccaacaagggcagaaccaactctacaatgaacttaatttggggcggagggaagagtacgacgttctggacaaaaggaggggacgagatcccgagatgggcggaaagcctcagcgaaggaagaatccgcaagaggggctttataacgaactccagaaagataaaatggcagaagcctatagtgagattgggatgaagggagaaaggaggaggggtaaaggtcacgatgggttgtaccaaggattgagcacagccactaaagatacctatgatgcgctccacatgcaggccctgccgccaagaagggccaagcgatctggatctggagcaacaaacttctcactactcaaacaagcaggtgacgtggaggagaatcccgggcctactagcatggccttaccagtgaccgccttgctcctgccgctggccttgctgctccacgccgccaggccgggcgtgacacagagccccacacacctgattaagaccagaggccagcaggccacactgagatgcagccctatcagcggccacaccagcgtgtactggtatcagcaggctctcggactgggcctccagttcctgctttggtacgacgagggcgaagagagaaaccggggcaacttccctcctcggttttccggcagacagttccccaactacagcagcgagctgaacgtgaacgccctggaactggaagatagcgccctgtacctgtgtgcctcttctcttggtggacctcgcggactggctggactgagaggggatgagcagtttttcggccctggcaccagactgaccgtgctggaaggcggaggaagcggcggaggatctggcgtgacacagagccccacacacctgattaagaccagaggccagcaggccacactgagatgcagccctatcagcggccacaccagcgtgtactggtatcagcaggctctcggactgggcctccagttcctgctttggtacgacgagggcgaagagagaaaccggggcaacttccctcctcggttttccggcagacagttccccaactacagcagcgagctgaacgtgaacgccctggaactggaagatagcgccctgtacctgtgtgccagctctctcggcggagatgaactgggagccgatggcaacgagcagttctttggccctggcaccagactgaccgtgctggaaggtaccggcggaggcggatctggcggcggaggtagcggtggcggaggatctgaattcgacatccagatgacacagagccctagcagcctgtctgccagcgtgggagacagagtgaccatcacatgcaaggccagcgaccacatcaacaactggctggcctggtatcagcagaagcctggacaggcccctaagctgctgatctacggcgctaccacactggaaacaggcgtgcccagcagattttctggcagcggctctggcaccgactacaccctgacaatatccagcctccagcctgaggacttcgccacctactactgtcagcagagctggaacaccccttggacattcggccagggcaccaagctggaaatcaagagaggcggaggcggaagtggaggcggaggatctggcggcggaggctctcaagttcagcttcaacagcctggcgctgagctggtcaaacctggcgcttctgtgaagatgagctgcaaagccagcggctacgccttcagcagctactggatcaactggatgaagcagaaacccggccagggactcgaatggatcggccaaatctatcccggcgacggcgacaccaactacaacggcaagttcaagggcagagccacactgaccgccgatacctctagcagcacagcctacatgcagctgagcagcctgaccagcgaagatagcgccgtgtacttctgtgcccggtccatcacaacagtcgtgggctgcgctatggactattggggccagggaacaagcgtgaccgtgtctagtacgcgtgagctgggagagcctcagctgtgctatatcctggacgccatcctgtttctgtacggcatcgtgctgaccctgctgtactgccggctgaagatccaagtgcggaaggccgccatcaccagctacgagaaatccgacggcgtgtacaccggcctgagcaccagaaatcaagagacatacgagacactgaagcacgaaaagcctccacaa

SEQ ID NO: 17536 - DNA, 1944 bp, synthetic construct
  source 1..1944: mol_type = other DNA
atggccttaccagtgaccgccttgctcctgccgctggccttgctgctccacgccgccaggccgctcgagcagagttttgggttgttggaccctaaattgtgctatctgttggacggaatcctgttcatttacggagtgatcctgaccgcattgttcctgcgggttaagttttccagatccgcagacgcacccgcttaccaacaagggcagaaccaactctacaatgaacttaatttggggcggagggaagagtacgacgttctggacaaaaggaggggacgagatcccgagatgggcggaaagcctcagcgaaggaagaatccgcaagaggggctttataacgaactccagaaagataaaatggcagaagcctatagtgagattgggatgaagggagaaaggaggaggggtaaaggtcacgatgggttgtaccaaggattgagcacagccactaaagatacctatgatgcgctccacatgcaggccctgccgccaagaagggccaagcgatctggatctggagcaacaaacttctcactactcaaacaagcaggtgacgtggaggagaatcccgggcctactagcatggccctgcccgtgacagccctgctgctgcctctggctctgctgctgcacgccgccagacccgatgaattcggctctgacctgggcatcaagctgctgttcgccgctgccaagggccaggacgacgaagtgcggattctgctggctgctggggccgacgtgaacgccaaggatttcgagggctacacccccctgcacgtggccgcctatgatggacacctggaaatcgtggaagtgctgctgaaggctggcgctgatgtgaatgccaaagacagccagggccggacccctctgcatgaagccgcctacagcggccatctggaaattgtggaagtgctgctgaaagccggggcagacgtgaacgctcaggacgacgctggcgagacaccagccgatctggctgcagcttggggccacgaagatatcgccgaggtgctgcagaagacgcgtgagctgggagagcctcagctgtgctatatcctggacgccatcctgtttctgtacggcatcgtgctgaccctgctgtactgccggctgaagatccaagtgcggaaggccgccatcaccagctacgagaaatccgacggcgtgtacaccggcctgagcaccagaaatcaagagacatacgagacactgaagcacgaaaagcctccacaacgcgccaagagaagcggatctggcgtgaagcagaccctgaatttcgacctgctgaagctggctggcgacgtggaatccaacccaggcccttctagaggccatatgaccgagtacaagcccacggtgcgcctcgccacccgcgacgacgtccccagggccgtacgcaccctcgccgccgcgttcgccgactaccccgccacgcgccacaccgtcgatccggaccgccacatcgagcgggtcaccgagctgcaagaactcttcctcacgcgcgtcgggctcgacatcggcaaggtgtgggtcgcggacgacggcgccgcggtggcggtctggaccacgccggagagcgtcgaagcgggggcggtgttcgccgagatcggcccgcgcatggccgagttgagcggttcccggctggccgcgcagcaacagatggaaggcctcctggcgccgcaccggcccaaggagcccgcgtggttcctggccaccgtcggcgtctcgcccgaccaccagggcaagggtctgggcagcgccgtcgtgctccccggagtggaggcggccgagcgcgccggggtgcccgccttcctggagacctccgcgccccgcaacctccccttctacgagcggctcggcttcaccgtcaccgccgacgtcgaggtgcccgaaggaccgcgcacctggtgcatgacccgcaagcccggtgcctga

SEQ ID NO: 17537 - DNA, 1731 bp, synthetic construct
  source 1..1731: mol_type = other DNA
atggccttaccagtgaccgccttgctcctgccgctggccttgctgctccacgccgccaggccgctcgagcagagttttgggttgttggaccctaaattgtgctatctgttggacggaatcctgttcatttacggagtgatcctgaccgcattgttcctgcgggttaagttttccagatccgcagacgcacccgcttaccaacaagggcagaaccaactctacaatgaacttaatttggggcggagggaagagtacgacgttctggacaaaaggaggggacgagatcccgagatgggcggaaagcctcagcgaaggaagaatccgcaagaggggctttataacgaactccagaaagataaaatggcagaagcctatagtgagattgggatgaagggagaaaggaggaggggtaaaggtcacgatgggttgtaccaaggattgagcacagccactaaagatacctatgatgcgctccacatgcaggccctgccgccaagaagggccaagcgatctggatctggagcaacaaacttctcactactcaaacaagcaggtgacgtggaggagaatcccgggcctactagcatggactggatttggcgcatccttttccttgtcggcgctgctaccggcgcccattccttcgaaggcagcggattcgaatacgccaaagagatgcggaacgcctactgggagatcgccctgctgcccaatctgaccaaccagcagaagagagcccccatcagaaagctgtacgacgacccctcccagagcagcgagctgctgtctgaggctaaaaaactgaacgatagccagacgcgtgagctgggagagcctcagctgtgctatatcctggacgccatcctgtttctgtacggcatcgtgctgaccctgctgtactgccggctgaagatccaagtgcggaaggccgccatcaccagctacgagaaatccgacggcgtgtacaccggcctgagcaccagaaatcaagagacatacgagacactgaagcacgaaaagcctccacaacgcgccaagagaagcggatctggcgtgaagcagaccctgaatttcgacctgctgaagctggctggcgacgtggaatccaacccaggcccttctagaggccatatgaccgagtacaagcccacggtgcgcctcgccacccgcgacgacgtccccagggccgtacgcaccctcgccgccgcgttcgccgactaccccgccacgcgccacaccgtcgatccggaccgccacatcgagcgggtcaccgagctgcaagaactcttcctcacgcgcgtcgggctcgacatcggcaaggtgtgggtcgcggacgacggcgccgcggtggcggtctggaccacgccggagagcgtcgaagcgggggcggtgttcgccgagatcggcccgcgcatggccgagttgagcggttcccggctggccgcgcagcaacagatggaaggcctcctggcgccgcaccggcccaaggagcccgcgtggttcctggccaccgtcggcgtctcgcccgaccaccagggcaagggtctgggcagcgccgtcgtgctccccggagtggaggcggccgagcgcgccggggtgcccgccttcctggagacctccgcgccccgcaacctccccttctacgagcggctcggcttcaccgtcaccgccgacgtcgaggtgcccgaaggaccgcgcacctggtgcatgacccgcaagcccggtgcctga

SEQ ID NO: 17538 - DNA, 2397 bp, synthetic construct
  source 1..2397: mol_type = other DNA
atggccttaccagtgaccgccttgctcctgccgctggccttgctgctccacgccgccaggccgctcgagcagagttttgggttgttggaccctaaattgtgctatctgttggacggaatcctgttcatttacggagtgatcctgaccgcattgttcctgcgggttaagttttccagatccgcagacgcacccgcttaccaacaagggcagaaccaactctacaatgaacttaatttggggcggagggaagagtacgacgttctggacaaaaggaggggacgagatcccgagatgggcggaaagcctcagcgaaggaagaatccgcaagaggggctttataacgaactccagaaagataaaatggcagaagcctatagtgagattgggatgaagggagaaaggaggaggggtaaaggtcacgatgggttgtaccaaggattgagcacagccactaaagatacctatgatgcgctccacatgcaggccctgccgccaagaagggccaagcgatctggatctggagcaacaaacttctcactactcaaacaagcaggtgacgtggaggagaatcccgggcctactagcatggccctgcccgtgacagccctgctgctgcctctggctctgctgctgcacgccgccagacccgatgaattcgaggtgcaactggtggaaagcggcggaggcctggtgcaggctggcggatctctgagactgagctgtgccgccagcggcatcaccttcagcatcaacacaatgggctggtacagacaggcccctggcaagcagagggaactggtggccctgatctccagcatcggcgacacctactacgccgacagcgtgaagggccggttcaccatcagccgggacaacgccaagaacaccgtgtacctccagatgaacagcctgaagcccgaggacaccgccgtgtactactgcaagcggttcagaacagccgcccagggcaccgattattggggccagggaacacaagtgaccgtgtcctctctcgagggaggaggcggctccgggggaggcggaagtggaggcggaggatctgggtctggaggaagcggatctggaggctcagggtcagggggctcaggcagtggaggctctttcgaagtgcaactggtggaatctgggggcggactggtgcagccaggcggaagtctgaggctgtcttgtgccgcctccggcagcatcttcggcttcaacgacatggcctggtatcggcaggctcccggaaaacagcgcgagctggtggctctgattagcagagtgggcgtgaccagcagcgccgactctgtgaagggcagattcacaatctccagagtgaacgccaaggatacagtgtacctccagatgaactctctgaaacctgaggatacagcagtgtactattgctacatggaccagcggctggacggcagcacactggcctactggggacagggaactcaagtgacagtgtctagcacgcgtgagctgggagagcctcagctgtgctatatcctggacgccatcctgtttctgtacggcatcgtgctgaccctgctgtactgccggctgaagatccaagtgcggaaggccgccatcaccagctacgagaaatccgacggcgtgtacaccggcctgagcaccagaaatcaagagacatacgagacactgaagcacgaaaagcctccacaacgcgccaagagaagcggatctggcgtgaagcagaccctgaatttcgacctgctgaagctggctggcgacgtggaatccaacccaggcccttctagaggccatatgaccgagtacaagcccacggtgcgcctcgccacccgcgacgacgtccccagggccgtacgcaccctcgccgccgcgttcgccgactaccccgccacgcgccacaccgtcgatccggaccgccacatcgagcgggtcaccgagctgcaagaactcttcctcacgcgcgtcgggctcgacatcggcaaggtgtgggtcgcggacgacggcgccgcggtggcggtctggaccacgccggagagcgtcgaagcgggggcggtgttcgccgagatcggcccgcgcatggccgagttgagcggttcccggctggccgcgcagcaacagatggaaggcctcctggcgccgcaccggcccaaggagcccgcgtggttcctggccaccgtcggcgtctcgcccgaccaccagggcaagggtctgggcagcgccgtcgtgctccccggagtggaggcggccgagcgcgccggggtgcccgccttcctggagacctccgcgccccgcaacctccccttctacgagcggctcggcttcaccgtcaccgccgacgtcgaggtgcccgaaggaccgcgcacctggtgcatgacccgcaagcccggtgcctga

SEQ ID NO: 17539 - DNA, 2139 bp, synthetic construct
  source 1..2139: mol_type = other DNA
atggccttaccagtgaccgccttgctcctgccgctggccttgctgctccacgccgccaggccgctcgagcagagttttgggttgttggaccctaaattgtgctatctgttggacggaatcctgttcatttacggagtgatcctgaccgcattgttcctgcgggttaagttttccagatccgcagacgcacccgcttaccaacaagggcagaaccaactctacaatgaacttaatttggggcggagggaagagtacgacgttctggacaaaaggaggggacgagatcccgagatgggcggaaagcctcagcgaaggaagaatccgcaagaggggctttataacgaactccagaaagataaaatggcagaagcctatagtgagattgggatgaagggagaaaggaggaggggtaaaggtcacgatgggttgtaccaaggattgagcacagccactaaagatacctatgatgcgctccacatgcaggccctgccgccaagaagggccaagcgatctggatctggagcaacaaacttctcactactcaaacaagcaggtgacgtggaggagaatcccgggcctactagcatggcccttccagtcactgccttgctgttgcctctggcgctcctgctccacgccgctagaccgggcatgagaaccgaggacctgcctaaggccgtggtgttcctggaaccccagtggtacagagtgctggaaaaggacagcgtgaccctgaagtgccagggcgcctacagccccgaggacaatagcacccagtggttccacaacgagagcctgatctccagccaggccagcagctacttcatcgacgccgccaccgtggacgacagcggcgagtatagatgccagaccaacctgagcaccctgagcgaccccgtgcagctggaagtgcacatcggatggctgctgctgcaggcccccagatgggtgttcaaagaagaggaccccatccacctgagatgccactcttggaagaacaccgccctgcacaaagtgacctacctgcagaacggcaagggcagaaagtacttccaccacaacagcgacttctacatccccaaggccaccctgaaggactccggctcctacttctgcagaggcctcgtgggcagcaagaacgtgtccagcgagacagtgaacatcaccatcacccagggcctggccgtgtctaccatcagcagctttttcccacccggctaccagacgcgtgagctgggagagcctcagctgtgctatatcctggacgccatcctgtttctgtacggcatcgtgctgaccctgctgtactgccggctgaagatccaagtgcggaaggccgccatcaccagctacgagaaatccgacggcgtgtacaccggcctgagcaccagaaatcaagagacatacgagacactgaagcacgaaaagcctccacaacgcgccaagagaagcggatctggcgtgaagcagaccctgaatttcgacctgctgaagctggctggcgacgtggaatccaacccaggcccttctagaggccatatgaccgagtacaagcccacggtgcgcctcgccacccgcgacgacgtccccagggccgtacgcaccctcgccgccgcgttcgccgactaccccgccacgcgccacaccgtcgatccggaccgccacatcgagcgggtcaccgagctgcaagaactcttcctcacgcgcgtcgggctcgacatcggcaaggtgtgggtcgcggacgacggcgccgcggtggcggtctggaccacgccggagagcgtcgaagcgggggcggtgttcgccgagatcggcccgcgcatggccgagttgagcggttcccggctggccgcgcagcaacagatggaaggcctcctggcgccgcaccggcccaaggagcccgcgtggttcctggccaccgtcggcgtctcgcccgaccaccagggcaagggtctgggcagcgccgtcgtgctccccggagtggaggcggccgagcgcgccggggtgcccgccttcctggagacctccgcgccccgcaacctccccttctacgagcggctcggcttcaccgtcaccgccgacgtcgaggtgcccgaaggaccgcgcacctggtgcatgacccgcaagcccggtgcctga

SEQ ID NO: 17540 - DNA, 1020 bp, synthetic construct
  source 1..1020: mol_type = other DNA
atggccttaccagtgaccgccttgctcctgccgctggccttgctgctccacgccgccaggccgctcgagcagagttttgggttgttggaccctaaattgtgctatctgttggacggaatcctgttcatttacggagtgatcctgaccgcattgttcctgcgggttaagttttccagatccgcagacgcacccgcttaccaacaagggcagaaccaactctacaatgaacttaatttggggcggagggaagagtacgacgttctggacaaaaggaggggacgagatcccgagatgggcggaaagcctcagcgaaggaagaatccgcaagaggggctttataacgaactccagaaagataaaatggcagaagcctatagtgagattgggatgaagggagaaaggaggaggggtaaaggtcacgatgggttgtaccaaggattgagcacagccactaaagatacctatgatgcgctccacatgcaggccctgccgccaagaagggccaagcgatctggatctggagcaacaaacttctcactactcaaacaagcaggtgacgtggaggagaatcccgggcctactagcgccaccatggccttaccagtgaccgccttgctcctgccgctggccttgctgctccacgccgccaggccgatggaccccgacctggaaatcagagccgccttcctgcggcagagaaacacagccctgagaacagaggtggccgagctggaacaagaggtgcagcggctggaaaacgaggtgtcccagtacgagacaagatacggccctctcggaggcggaaaaacgcgtgagctgggagagcctcagctgtgctatatcctggacgccatcctgtttctgtacggcatcgtgctgaccctgctgtactgccggctgaagatccaagtgcggaaggccgccatcaccagctacgagaaatccgacggcgtgtacaccggcctgagcaccagaaatcaagagacatacgagacactgaagcacgaaaagcctccacaa

SEQ ID NO: 17541 - DNA, 1020 bp, synthetic construct
  source 1..1020: mol_type = other DNA
atggccttaccagtgaccgccttgctcctgccgctggccttgctgctccacgccgccaggccgctcgagcagagttttgggttgttggaccctaaattgtgctatctgttggacggaatcctgttcatttacggagtgatcctgaccgcattgttcctgcgggttaagttttccagatccgcagacgcacccgcttaccaacaagggcagaaccaactctacaatgaacttaatttggggcggagggaagagtacgacgttctggacaaaaggaggggacgagatcccgagatgggcggaaagcctcagcgaaggaagaatccgcaagaggggctttataacgaactccagaaagataaaatggcagaagcctatagtgagattgggatgaagggagaaaggaggaggggtaaaggtcacgatgggttgtaccaaggattgagcacagccactaaagatacctatgatgcgctccacatgcaggccctgccgccaagaagggccaagcgatctggatctggagcaacaaacttctcactactcaaacaagcaggtgacgtggaggagaatcccgggcctactagcgccaccatggccttaccagtgaccgccttgctcctgccgctggccttgctgctccacgccgccaggccgatggaccctgatctcgaaattgaggccgcctttctggaacgcgagaacactgccctggaaaccagggtcgcagagctgagacagagagtgcagagactgcggaacagagtgtctcagtaccgcaccagatatggcccactcggcggaggtaaaacgcgtgagctgggagagcctcagctgtgctatatcctggacgccatcctgtttctgtacggcatcgtgctgaccctgctgtactgccggctgaagatccaagtgcggaaggccgccatcaccagctacgagaaatccgacggcgtgtacaccggcctgagcaccagaaatcaagagacatacgagacactgaagcacgaaaagcctccacaa

SEQ ID NO: 17542 - DNA, 1725 bp, synthetic construct
  source 1..1725: mol_type = other DNA
atggccttaccagtgaccgccttgctcctgccgctggccttgctgctccacgccgccaggccgctcgagcagagttttgggttgttggaccctaaattgtgctatctgttggacggaatcctgttcatttacggagtgatcctgaccgcattgttcctgcgggttaagttttccagatccgcagacgcacccgcttaccaacaagggcagaaccaactctacaatgaacttaatttggggcggagggaagagtacgacgttctggacaaaaggaggggacgagatcccgagatgggcggaaagcctcagcgaaggaagaatccgcaagaggggctttataacgaactccagaaagataaaatggcagaagcctatagtgagattgggatgaagggagaaaggaggaggggtaaaggtcacgatgggttgtaccaaggattgagcacagccactaaagatacctatgatgcgctccacatgcaggccctgccgccaagaagggccaagcgatctggatctggagcaacaaacttctcactactcaaacaagcaggtgacgtggaggagaatcccgggcctactagcgccaccatggccttaccagtgaccgccttgctcctgccgctggccttgctgctccacgccgccaggccgctgttcaatcaagaggtgcagatccctctgaccgagagctactgtggcccctgtcctaagaactggatctgctacaagaacaactgctaccagttcttcgacgagagcaagaattggtacgagagccaggccagctgcatgagccagaatgccagcctgctgaaggtgtacagcaaagaggaccaggacctgctgaaactggtcaagagcgcccactggatgggccttgtgcacatccccaccaatggctcttggcagtgggaggacggcagcattctgagccctaacctgctgaccatcatcgagatgcagaagggcgactgcgccctgtacgccagcagctttaagggctacatcgagaattgcagcaccccgaacacctacatctgtatgcagagaaccgtttctggcggaggcggctctggaggaggcggaagtggcggcggaggcgacctctttaatcaagaagtccagattccactcaccgaatcctactgcggaccttgtccaaaaaattggatttgttataagaacaactgttatcaattctttgatgagtctaaaaattggtatgagtcccaggcttcctgcatgtctcagaacgcttctctgctgaaagtctactctaaagaagatcaggatctcctgaagctcgtcaagtctgcccattggatggggctcgtccacattcctaccaacggaagctggcaatgggaagatggctccatcctgtctccaaatctgctcacgattattgaaatgcagaaaggggattgtgctctctacgccagctccttcaagggatatattgagaactgtagcacgcccaatacttatatctgtatgcaacggaccgtgacgcgtgagctgggagagcctcagctgtgctatatcctggacgccatcctgtttctgtacggcatcgtgctgaccctgctgtactgccggctgaagatccaagtgcggaaggccgccatcaccagctacgagaaatccgacggcgtgtacaccggcctgagcaccagaaatcaagagacatacgagacactgaagcacgaaaagcctccacaa

SEQ ID NO: 17543 - DNA, 1725 bp, synthetic construct
  source 1..1725: mol_type = other DNA
atggccttaccagtgaccgccttgctcctgccgctggccttgctgctccacgccgccaggccgctcgagcagagttttgggttgttggaccctaaattgtgctatctgttggacggaatcctgttcatttacggagtgatcctgaccgcattgttcctgcgggttaagttttccagatccgcagacgcacccgcttaccaacaagggcagaaccaactctacaatgaacttaatttggggcggagggaagagtacgacgttctggacaaaaggaggggacgagatcccgagatgggcggaaagcctcagcgaaggaagaatccgcaagaggggctttataacgaactccagaaagataaaatggcagaagcctatagtgagattgggatgaagggagaaaggaggaggggtaaaggtcacgatgggttgtaccaaggattgagcacagccactaaagatacctatgatgcgctccacatgcaggccctgccgccaagaagggccaagcgatctggatctggagcaacaaacttctcactactcaaacaagcaggtgacgtggaggagaatcccgggcctactagcgccaccatggccttaccagtgaccgccttgctcctgccgctggccttgctgctccacgccgccaggccgctgttcaatcaagaggtgcagatccctctgaccgagagctactgtggcccctgtcctaagaactggatctgctacaagaacaactgctaccagttcttcgacgagagcaagaattggtacgagagccaggccagctgcatgagccagaatgccagcctgctgaaggtgtacagcaaagaggaccaggacctgctgaaactggtcaagagcgcccactggatgggccttgtgcacatccccaccaatggctcttggcagtgggaggacggcagcattctgagccctaacctgctgaccatcatcgagatgcagaagggcgactgcgccctgtacgccagcagctttaagggcttcatcgagaattgcagcaccccgaacacctacatctgtatgcagagaaccgttggcggaggcggaagtggaggcggaggatctggcggcggaggctctgacctctttaatcaagaagtccagattccactcaccgaatcctactgcggaccttgtccaaaaaattggatttgttataagaacaactgttatcaattctttgatgagtctaaaaattggtatgagtcccaggcttcctgcatgtctcagaacgcttctctgctgaaagtctactctaaagaagatcaggatctcctgaagctcgtcaagtctgcccattggatggggctcgtccacattcctaccaacggaagctggcaatgggaagatggctccatcctgtctccaaatctgctcacgattattgaaatgcagaaaggggattgtgctctctacgccagctccttcaagggatttattgagaactgtagcacgcccaatacttatatctgtatgcaacggaccgtgacgcgtgagctgggagagcctcagctgtgctatatcctggacgccatcctgtttctgtacggcatcgtgctgaccctgctgtactgccggctgaagatccaagtgcggaaggccgccatcaccagctacgagaaatccgacggcgtgtacaccggcctgagcaccagaaatcaagagacatacgagacactgaagcacgaaaagcctccacaa

SEQ ID NO: 17544 - DNA, 1803 bp, synthetic construct
  source 1..1803: mol_type = other DNA
atggccttaccagtgaccgccttgctcctgccgctggccttgctgctccacgccgccaggccgctcgagcagagttttgggttgttggaccctaaattgtgctatctgttggacggaatcctgttcatttacggagtgatcctgaccgcattgttcctgcgggttaagttttccagatccgcagacgcacccgcttaccaacaagggcagaaccaactctacaatgaacttaatttggggcggagggaagagtacgacgttctggacaaaaggaggggacgagatcccgagatgggcggaaagcctcagcgaaggaagaatccgcaagaggggctttataacgaactccagaaagataaaatggcagaagcctatagtgagattgggatgaagggagaaaggaggaggggtaaaggtcacgatgggttgtaccaaggattgagcacagccactaaagatacctatgatgcgctccacatgcaggccctgccgccaagaagggccaagcgatctggatctggagcaacaaacttctcactactcaaacaagcaggtgacgtggaggagaatcccgggcctactagcatggccttaccagtgaccgccttgctcctgccgctggccttgctgctccacgccgccaggccgatggaccccgacctggaaatcagagccgccttcctgcggcagagaaacacagccctgagaacagaggtggccgagctggaacaagaggtgcagcggctggaaaacgaggtgtcccagtacgagacaagatacggccctctcggaggcggaaaaggtaccggcggaggcggatctggcggcggaggtagcggtggcggaggatctgaattcgacatccagatgacacagagccctagcagcctgtctgccagcgtgggagacagagtgaccatcacatgcaaggccagcgaccacatcaacaactggctggcctggtatcagcagaagcctggacaggcccctaagctgctgatctacggcgctaccacactggaaacaggcgtgcccagcagattttctggcagcggctctggcaccgactacaccctgacaatatccagcctccagcctgaggacttcgccacctactactgtcagcagagctggaacaccccttggacattcggccagggcaccaagctggaaatcaagagaggcggaggcggaagtggaggcggaggatctggcggcggaggctctcaagttcagcttcaacagcctggcgctgagctggtcaaacctggcgcttctgtgaagatgagctgcaaagccagcggctacgccttcagcagctactggatcaactggatgaagcagaaacccggccagggactcgaatggatcggccaaatctatcccggcgacggcgacaccaactacaacggcaagttcaagggcagagccacactgaccgccgatacctctagcagcacagcctacatgcagctgagcagcctgaccagcgaagatagcgccgtgtacttctgtgcccggtccatcacaacagtcgtgggctgcgctatggactattggggccagggaacaagcgtgaccgtgtctagtacgcgtgagctgggagagcctcagctgtgctatatcctggacgccatcctgtttctgtacggcatcgtgctgaccctgctgtactgccggctgaagatccaagtgcggaaggccgccatcaccagctacgagaaatccgacggcgtgtacaccggcctgagcaccagaaatcaagagacatacgagacactgaagcacgaaaagcctccacaa

SEQ ID NO: 17545 - DNA, 2508 bp, synthetic construct
  source 1..2508: mol_type = other DNA
atggccttaccagtgaccgccttgctcctgccgctggccttgctgctccacgccgccaggccgctcgagcagagttttgggttgttggaccctaaattgtgctatctgttggacggaatcctgttcatttacggagtgatcctgaccgcattgttcctgcgggttaagttttccagatccgcagacgcacccgcttaccaacaagggcagaaccaactctacaatgaacttaatttggggcggagggaagagtacgacgttctggacaaaaggaggggacgagatcccgagatgggcggaaagcctcagcgaaggaagaatccgcaagaggggctttataacgaactccagaaagataaaatggcagaagcctatagtgagattgggatgaagggagaaaggaggaggggtaaaggtcacgatgggttgtaccaaggattgagcacagccactaaagatacctatgatgcgctccacatgcaggccctgccgccaagaagggccaagcgatctggatctggagcaacaaacttctcactactcaaacaagcaggtgacgtggaggagaatcccgggcctactagcatggccttaccagtgaccgccttgctcctgccgctggccttgctgctccacgccgccaggccgctgttcaatcaagaggtgcagatccctctgaccgagagctactgtggcccctgtcctaagaactggatctgctacaagaacaactgctaccagttcttcgacgagagcaagaattggtacgagagccaggccagctgcatgagccagaatgccagcctgctgaaggtgtacagcaaagaggaccaggacctgctgaaactggtcaagagcgcccactggatgggccttgtgcacatccccaccaatggctcttggcagtgggaggacggcagcattctgagccctaacctgctgaccatcatcgagatgcagaagggcgactgcgccctgtacgccagcagctttaagggcttcatcgagaattgcagcaccccgaacacctacatctgtatgcagagaaccgttggcggaggcggaagtggaggcggaggatctggcggcggaggctctgacctctttaatcaagaagtccagattccactcaccgaatcctactgcggaccttgtccaaaaaattggatttgttataagaacaactgttatcaattctttgatgagtctaaaaattggtatgagtcccaggcttcctgcatgtctcagaacgcttctctgctgaaagtctactctaaagaagatcaggatctcctgaagctcgtcaagtctgcccattggatggggctcgtccacattcctaccaacggaagctggcaatgggaagatggctccatcctgtctccaaatctgctcacgattattgaaatgcagaaaggggattgtgctctctacgccagctccttcaagggatttattgagaactgtagcacgcccaatacttatatctgtatgcaacggaccgtgggtaccggcggaggcggatctggcggcggaggtagcggtggcggaggatctgaattcgacatccagatgacacagagccctagcagcctgtctgccagcgtgggagacagagtgaccatcacatgcaaggccagcgaccacatcaacaactggctggcctggtatcagcagaagcctggacaggcccctaagctgctgatctacggcgctaccacactggaaacaggcgtgcccagcagattttctggcagcggctctggcaccgactacaccctgacaatatccagcctccagcctgaggacttcgccacctactactgtcagcagagctggaacaccccttggacattcggccagggcaccaagctggaaatcaagagaggcggaggcggaagtggaggcggaggatctggcggcggaggctctcaagttcagcttcaacagcctggcgctgagctggtcaaacctggcgcttctgtgaagatgagctgcaaagccagcggctacgccttcagcagctactggatcaactggatgaagcagaaacccggccagggactcgaatggatcggccaaatctatcccggcgacggcgacaccaactacaacggcaagttcaagggcagagccacactgaccgccgatacctctagcagcacagcctacatgcagctgagcagcctgaccagcgaagatagcgccgtgtacttctgtgcccggtccatcacaacagtcgtgggctgcgctatggactattggggccagggaacaagcgtgaccgtgtctagtacgcgtgagctgggagagcctcagctgtgctatatcctggacgccatcctgtttctgtacggcatcgtgctgaccctgctgtactgccggctgaagatccaagtgcggaaggccgccatcaccagctacgagaaatccgacggcgtgtacaccggcctgagcaccagaaatcaagagacatacgagacactgaagcacgaaaagcctccacaa

SEQ ID NO: 17546 - DNA, 1623 bp, synthetic construct
  source 1..1623: mol_type = other DNA
atggccttaccagtgaccgccttgctcctgccgctggccttgctgctccacgccgccaggccgctcgagcagagttttgggttgttggaccctaaattgtgctatctgttggacggaatcctgttcatttacggagtgatcctgaccgcattgttcctgcgggttaagttttccagatccgcagacgcacccgcttaccaacaagggcagaaccaactctacaatgaacttaatttggggcggagggaagagtacgacgttctggacaaaaggaggggacgagatcccgagatgggcggaaagcctcagcgaaggaagaatccgcaagaggggctttataacgaactccagaaagataaaatggcagaagcctatagtgagattgggatgaagggagaaaggaggaggggtaaaggtcacgatgggttgtaccaaggattgagcacagccactaaagatacctatgatgcgctccacatgcaggccctgccgccaagaagggccaagcgatctggatctggagcaacaaacttctcactactcaaacaagcaggtgacgtggaggagaatcccgggcctactagcatggccttaccagtgaccgccttgctcctgccgctggccttgctgctccacgccgccaggccgcagtctgtgctgacacagcctcctagtgtgtctggcgctcctggacagagagtgaccatctcttgtaccggcagcagcagcaatatcggagccggctatgacgtgcactggtatcagcagctccctggcacagcccctaaactgctgatcttcggcaacagcaacagacccagcggcgtgcccgatagattcagcggctttaagagcggcacaagcgccagcctggctatcactggactgcaagccgaggacgaggccgactacttctgccagagctacgatagcagcctgagcggcagcggagtgtttggcacaggcaccaaagtgacagtgcttggcggcggaggcggaagtggaggcggaggatctggcggcggaggctctcaaatgcaactggttcaaagcggcggtggcctggtgcaacctggaagaagtctgagactgagctgtgccgccagcggcttcaccttcgatgattacgccatgcactgggtccgacaggcccctggaaaaggactggaatgggtgtccggcatctcctggaatagcggctctatcggctacgccgacagcgtgaagggcagattcaccatcagccgggacaacgccaagaacagcctgtacctccagatgaactccctgagagccgaggatacagccctgtactactgcgccaaggacatccacagcggcagctactacggcctgctgtactacgctatggacgtgtggggccagggcacaaccgtgacagtttcttctacgcgtgagctgggagagcctcagctgtgctatatcctggacgccatcctgtttctgtacggcatcgtgctgaccctgctgtactgccggctgaagatccaagtgcggaaggccgccatcaccagctacgagaaatccgacggcgtgtacaccggcctgagcaccagaaatcaagagacatacgagacactgaagcacgaaaagcctccacaa

SEQ ID NO: 17547 - DNA, 1134 bp, synthetic construct
  source 1..1134: mol_type = other DNA
atggccttaccagtgaccgccttgctcctgccgctggccttgctgctccacgccgccaggccgctcgagcagagttttgggttgttggaccctaaattgtgctatctgttggacggaatcctgttcatttacggagtgatcctgaccgcattgttcctgcgggttaagttttccagatccgcagacgcacccgcttaccaacaagggcagaaccaactctacaatgaacttaatttggggcggagggaagagtacgacgttctggacaaaaggaggggacgagatcccgagatgggcggaaagcctcagcgaaggaagaatccgcaagaggggctttataacgaactccagaaagataaaatggcagaagcctatagtgagattgggatgaagggagaaaggaggaggggtaaaggtcacgatgggttgtaccaaggattgagcacagccactaaagatacctatgatgcgctccacatgcaggccctgccgccaagaagggccaagcgatctggatctggagcaacaaacttctcactactcaaacaagcaggtgacgtggaggagaatcccgggcctactagcatggccttaccagtgaccgccttgctcctgccgctggccttgctgctccacgccgccaggccgatgtgtatgccctgcttcaccaccgaccatcagatggcccggaagtgcgacgattgctgtggcggaaaaggcagaggcaagtgctacggccctcagtgcttgtgtagactcgagggcggaggcggaagtggaggcggaggatctggcggcggaggctctttcgaagtgtgtatgccttgttttaccacggatcaacaaatggctcgcaagtgttctgactgctgcggaggcaaaggccggggaaagtgttatggcccacagtgtctgtgccggacgcgtgagctgggagagcctcagctgtgctatatcctggacgccatcctgtttctgtacggcatcgtgctgaccctgctgtactgccggctgaagatccaagtgcggaaggccgccatcaccagctacgagaaatccgacggcgtgtacaccggcctgagcaccagaaatcaagagacatacgagacactgaagcacgaaaagcctccacaa

SEQ ID NO: 17548 - DNA, 1764 bp, synthetic construct
  source 1..1764: mol_type = other DNA
atggccttaccagtgaccgccttgctcctgccgctggccttgctgctccacgccgccaggccgctcgagcagagttttgggttgttggaccctaaattgtgctatctgttggacggaatcctgttcatttacggagtgatcctgaccgcattgttcctgcgggttaagttttccagatccgcagacgcacccgcttaccaacaagggcagaaccaactctacaatgaacttaatttggggcggagggaagagtacgacgttctggacaaaaggaggggacgagatcccgagatgggcggaaagcctcagcgaaggaagaatccgcaagaggggctttataacgaactccagaaagataaaatggcagaagcctatagtgagattgggatgaagggagaaaggaggaggggtaaaggtcacgatgggttgtaccaaggattgagcacagccactaaagatacctatgatgcgctccacatgcaggccctgccgccaagaagggccaagcgatctggatctggagcaacaaacttctcactactcaaacaagcaggtgacgtggaggagaatcccgggcctactagcatggccttaccagtgaccgccttgctcctgccgctggccttgctgctccacgccgccaggccgttcgaagtgtgtatgccttgttttaccacggatcaacaaatggctcgcaagtgttctgactgctgcggaggcaaaggccggggaaagtgttatggcccacagtgtctgtgccggggtaccggcggaggcggatctggcggcggaggtagcggtggcggaggatctgaattcgacatccagatgacacagagccctagcagcctgtctgccagcgtgggagacagagtgaccatcacatgcaaggccagcgaccacatcaacaactggctggcctggtatcagcagaagcctggacaggcccctaagctgctgatctacggcgctaccacactggaaacaggcgtgcccagcagattttctggcagcggctctggcaccgactacaccctgacaatatccagcctccagcctgaggacttcgccacctactactgtcagcagagctggaacaccccttggacattcggccagggcaccaagctggaaatcaagagaggcggaggcggaagtggaggcggaggatctggcggcggaggctctcaagttcagcttcaacagcctggcgctgagctggtcaaacctggcgcttctgtgaagatgagctgcaaagccagcggctacgccttcagcagctactggatcaactggatgaagcagaaacccggccagggactcgaatggatcggccaaatctatcccggcgacggcgacaccaactacaacggcaagttcaagggcagagccacactgaccgccgatacctctagcagcacagcctacatgcagctgagcagcctgaccagcgaagatagcgccgtgtacttctgtgcccggtccatcacaacagtcgtgggctgcgctatggactattggggccagggaacaagcgtgaccgtgtctagtacgcgtgagctgggagagcctcagctgtgctatatcctggacgccatcctgtttctgtacggcatcgtgctgaccctgctgtactgccggctgaagatccaagtgcggaaggccgccatcaccagctacgagaaatccgacggcgtgtacaccggcctgagcaccagaaatcaagagacatacgagacactgaagcacgaaaagcctccacaa

SEQ ID NO: 17549 - DNA, 2154 bp, synthetic construct
  source 1..2154: mol_type = other DNA
atggccttaccagtgaccgccttgctcctgccgctggccttgctgctccacgccgccaggccgctcgagcagagttttgggttgttggaccctaaattgtgctatctgttggacggaatcctgttcatttacggagtgatcctgaccgcattgttcctgcgggttaagttttccagatccgcagacgcacccgcttaccaacaagggcagaaccaactctacaatgaacttaatttggggcggagggaagagtacgacgttctggacaaaaggaggggacgagatcccgagatgggcggaaagcctcagcgaaggaagaatccgcaagaggggctttataacgaactccagaaagataaaatggcagaagcctatagtgagattgggatgaagggagaaaggaggaggggtaaaggtcacgatgggttgtaccaaggattgagcacagccactaaagatacctatgatgcgctccacatgcaggccctgccgccaagaagggccaagcgatctggatctggagcaacaaacttctcactactcaaacaagcaggtgacgtggaggagaatcccgggcctactagcatggccttaccagtgaccgccttgctcctgccgctggccttgctgctccacgccgccaggccgttcgaaagccccgtagctcctgcctgtgaccccagactcctaaataaactgctgcgtgactcccacctccttcacagccgactgagtcagtgtcccgacgtggaccctttgtctatccctgttctgctgcctgctgtggactttagcctgggagaatggaaaacccagacggaacagagcaaggcacaggacattctaggggcagtgtcccttctactggagggagtgatggcagcacgaggacagttggaaccctcctgcctctcatccctcctgggacagctttctgggcaggttcgcctcctcttgggggccctgcagggcctcctaggaacccagcttcctctacagggcaggaccacagctcacaaggaccccaatgccctcttcttgagcttgcaacaactgcttcggggaaaggtgcgcttcctgcttctggtagaaggtcccaccctctgtgtcagacggaccctgccaaccacagctgtcccaagcagtacttctggtaccggcggaggcggatctggcggcggaggtagcggtggcggaggatctgaattcgacatccagatgacacagagccctagcagcctgtctgccagcgtgggagacagagtgaccatcacatgcaaggccagcgaccacatcaacaactggctggcctggtatcagcagaagcctggacaggcccctaagctgctgatctacggcgctaccacactggaaacaggcgtgcccagcagattttctggcagcggctctggcaccgactacaccctgacaatatccagcctccagcctgaggacttcgccacctactactgtcagcagagctggaacaccccttggacattcggccagggcaccaagctggaaatcaagagaggcggaggcggaagtggaggcggaggatctggcggcggaggctctcaagttcagcttcaacagcctggcgctgagctggtcaaacctggcgcttctgtgaagatgagctgcaaagccagcggctacgccttcagcagctactggatcaactggatgaagcagaaacccggccagggactcgaatggatcggccaaatctatcccggcgacggcgacaccaactacaacggcaagttcaagggcagagccacactgaccgccgatacctctagcagcacagcctacatgcagctgagcagcctgaccagcgaagatagcgccgtgtacttctgtgcccggtccatcacaacagtcgtgggctgcgctatggactattggggccagggaacaagcgtgaccgtgtctagtacgcgtgagctgggagagcctcagctgtgctatatcctggacgccatcctgtttctgtacggcatcgtgctgaccctgctgtactgccggctgaagatccaagtgcggaaggccgccatcaccagctacgagaaatccgacggcgtgtacaccggcctgagcaccagaaatcaagagacatacgagacactgaagcacgaaaagcctccacaa

SEQ ID NO: 17550 - DNA, 1875 bp, synthetic construct
  source 1..1875: mol_type = other DNA
atggccttaccagtgaccgccttgctcctgccgctggccttgctgctccacgccgccaggccgctcgagcagagttttgggttgttggaccctaaattgtgctatctgttggacggaatcctgttcatttacggagtgatcctgaccgcattgttcctgcgggttaagttttccagatccgcagacgcacccgcttaccaacaagggcagaaccaactctacaatgaacttaatttggggcggagggaagagtacgacgttctggacaaaaggaggggacgagatcccgagatgggcggaaagcctcagcgaaggaagaatccgcaagaggggctttataacgaactccagaaagataaaatggcagaagcctatagtgagattgggatgaagggagaaaggaggaggggtaaaggtcacgatgggttgtaccaaggattgagcacagccactaaagatacctatgatgcgctccacatgcaggccctgccgccaagaagggccaagcgatctggatctggagcaacaaacttctcactactcaaacaagcaggtgacgtggaggagaatcccgggcctactagcatggccttaccagtgaccgccttgctcctgccgctggccttgctgctccacgccgccaggccgttcgaaatgggcagctgggaagagttcgagctgagactgaacgccatcgaggaacggctgtatgccctcggaggatctgaagccgagctggcctacttcgagtacgtgatcgccgacttcgagggcaacctgcagcggtacaaaggcaagggcaaccctgaagtggaagccctgtacttcgaggccgacgccatcttcgaggaactggtggcctacagacacaacggtaccggcggaggcggatctggcggcggaggtagcggtggcggaggatctgaattcgacatccagatgacacagagccctagcagcctgtctgccagcgtgggagacagagtgaccatcacatgcaaggccagcgaccacatcaacaactggctggcctggtatcagcagaagcctggacaggcccctaagctgctgatctacggcgctaccacactggaaacaggcgtgcccagcagattttctggcagcggctctggcaccgactacaccctgacaatatccagcctccagcctgaggacttcgccacctactactgtcagcagagctggaacaccccttggacattcggccagggcaccaagctggaaatcaagagaggcggaggcggaagtggaggcggaggatctggcggcggaggctctcaagttcagcttcaacagcctggcgctgagctggtcaaacctggcgcttctgtgaagatgagctgcaaagccagcggctacgccttcagcagctactggatcaactggatgaagcagaaacccggccagggactcgaatggatcggccaaatctatcccggcgacggcgacaccaactacaacggcaagttcaagggcagagccacactgaccgccgatacctctagcagcacagcctacatgcagctgagcagcctgaccagcgaagatagcgccgtgtacttctgtgcccggtccatcacaacagtcgtgggctgcgctatggactattggggccagggaacaagcgtgaccgtgtctagtacgcgtgagctgggagagcctcagctgtgctatatcctggacgccatcctgtttctgtacggcatcgtgctgaccctgctgtactgccggctgaagatccaagtgcggaaggccgccatcaccagctacgagaaatccgacggcgtgtacaccggcctgagcaccagaaatcaagagacatacgagacactgaagcacgaaaagcctccacaa

SEQ ID NO: 17551 - DNA, 2922 bp, synthetic construct; identical to SEQ ID NO: 8286
  source 1..2922: mol_type = other DNA

SEQ ID NO: 17552 - DNA, 2925 bp, synthetic construct; identical to SEQ ID NO: 8287
  source 1..2925: mol_type = other DNA

SEQ ID NO: 17553 - DNA, 2928 bp, synthetic construct; identical to SEQ ID NO: 8288
  source 1..2928: mol_type = other DNA

SEQ ID NO: 17554 - DNA, 2916 bp, synthetic construct; identical to SEQ ID NO: 8289
  source 1..2916: mol_type = other DNA

SEQ ID NO: 17555 - DNA, 2928 bp, synthetic construct; identical to SEQ ID NO: 8290
  source 1..2928: mol_type = other DNA

SEQ ID NO: 17556 - DNA, 2934 bp, synthetic construct; identical to SEQ ID NO: 8291
  source 1..2934: mol_type = other DNA

SEQ ID NO: 17557 - DNA, 2928 bp, synthetic construct; identical to SEQ ID NO: 8292
  source 1..2928: mol_type = other DNA

SEQ ID NO: 17558 - DNA, 2922 bp, synthetic construct; identical to SEQ ID NO: 8293
  source 1..2922: mol_type = other DNA

SEQ ID NO: 17559 - DNA, 2559 bp, synthetic construct; identical to SEQ ID NO: 8294
  source 1..2559: mol_type = other DNA

SEQ ID NO: 17560 - DNA, 2559 bp, synthetic construct; identical to SEQ ID NO: 8294
  source 1..2559: mol_type = other DNA

SEQ ID NO: 17561 - DNA, 3354 bp, synthetic construct; identical to SEQ ID NO: 8296
  source 1..3354: mol_type = other DNA

SEQ ID NO: 17562 - DNA, 3741 bp, synthetic construct; identical to SEQ ID NO: 8297
  source 1..3741: mol_type = other DNA

SEQ ID NO: 17563 - DNA, 3735 bp, synthetic construct
  source 1..3735: mol_type = other DNA
atggccttaccagtgaccgccttgctcctgccgctggccttgctgctccacgccgccaggccgctcgaggaggacctgaagaacgtgttcccacctgaggtggccgtgttcgagcctagcgaggccgagatcagccacacccagaaagccaccctcgtgtgcctggctaccggcttctaccccgaccatgtggaactgtcttggtgggtcaacggcaaagaggtgcacagcggcgtgtctaccgacccccagccactgaaagaacagcccgccctgaacgacagccggtactgcctgagcagcagactgagagtgtccgccaccttctggcagaacccccggaaccacttcagatgccaggtgcagttctacggcctgagcgagaacgacgagtggacccaggacagagccaagcccgtgacccagatcgtgtctgccgaagcctggggcagagccgatgatgtgattaagatccactggcaggaaaagaagtccaacaccatcctgggcagccaggaaggcaacaccatgaagaccaacgacacctacatgaagttcagctggctgaccgtgcccgagaagtccctggacaaagaacacagatgcatcgtgcggcacgaaaacaacaagaacggcgtggaccaggaaatcatcttcccacccatcaagaccgatgtgattacaatggaccccaaggacaactgctccaaggacgccaacgataccctgctgctccagctgaccaacaccagcgcctactacatgtacttgttgctgctgctgaagtccgtggtgtacttcgccatcatcacatgctgcctgctgatggctatggtcaagcggaaggacagccggggaagggccaagcgatctggatctggagcaacaaacttctcactactcaaacaagcaggtgacgtggaggagaatcccgggcctactagcatggccttaccagtgaccgccttgctcctgccgctggccttgctgctccacgccgccaggccgggcgtgacacagagccccacacacctgattaagaccagaggccagcaggccacactgagatgcagccctatcagcggccacaccagcgtgtactggtatcagcaggctctcggactgggcctccagttcctgctttggtacgacgagggcgaagagagaaaccggggcaacttccctcctcggttttccggcagacagttccccaactacagcagcgagctgaacgtgaacgccctggaactggaagatagcgccctgtacctgtgtgcctcttctcttggtggacctcgcggactggctggactgagaggggatgagcagtttttcggccctggcaccagactgaccgtgctggaaggcggaggaagcggcggaggatctcaggtccagctcgtcgagtccggcggcggcctcgtccaggccggcgactccgtcaccctctcctgcaccgcctccggccgcaccttctcctcctacgccctcgcctggttccgccagcgccccggcaaggagcgcgagttcgtcgccggcctccgctggggcggccccaccaactacgccgactccgtcaaggaccgcttcaccatctccggcgactccgccaagcacaccatgtacctccagatgaactccctcaagcccgaggacaccgccgtctactactgcggctacaaccccggcggctgggccgtcccctcccagtacgagtacgactcctggggccagggcacccaggtcaccgtctcctccggtaccggcggaggcggatctggcggcggaggtagcggtggcggaggatctgaattcgacatccagatgacacagagccctagcagcctgtctgccagcgtgggagacagagtgaccatcacatgcaaggccagcgaccacatcaacaactggctggcctggtatcagcagaagcctggacaggcccctaagctgctgatctacggcgctaccacactggaaacaggcgtgcccagcagattttctggcagcggctctggcaccgactacaccctgacaatatccagcctccagcctgaggacttcgccacctactactgtcagcagagctggaacaccccttggacattcggccagggcaccaagctggaaatcaagagaggcggaggcggaagtggaggcggaggatctggcggcggaggctctcaagttcagcttcaacagcctggcgctgagctggtcaaacctggcgcttctgtgaagatgagctgcaaagccagcggctacgccttcagcagctactggatcaactggatgaagcagaaacccggccagggactcgaatggatcggccaaatctatcccggcgacggcgacaccaactacaacggcaagttcaagggcagagccacactgaccgccgatacctctagcagcacagcctacatgcagctgagcagcctgaccagcgaagatagcgccgtgtacttctgtgcccggtccatcacaacagtcgtgggctgcgctatggactattggggccagggaacaagcgtgaccgtgtctagtacgcgtatccagaaccctgatcctgccgtgtaccagctgcgggatagcaagagcagcgacaagagcgtgtgtctgttcaccgacttcgacagccagaccaacgtgtcccagagcaaggactccgacgtgtacatcaccgataagaccgtgctggacatgcggagcatggacttcaagagcaactccgccgtggcctggtccaacaagtccgatttcgcctgcgccaacgccttcaacaacagcattatccccgaggacacattcttcccaagccccgagagcagcgactccaccgaccacgtgaagcccaaagagacagagaacaccaagcagcccagcaagagctgccacaagcccaaggccatcgtgcacaccgagaaagtgaacatgatgagcctgaccgtgctgggcctgcggatgctgttcgccaaaaccgtggccgtgaacttcctgctgaccgccaagctgttcttcctcctcaccgcccgcgccaagagaagcggatctggcgtgaagcagaccctgaatttcgacctgctgaagctggctggcgacgtggaatccaacccaggcccttctagaggccatatgaccgagtacaagcccacggtgcgcctcgccacccgcgacgacgtccccagggccgtacgcaccctcgccgccgcgttcgccgactaccccgccacgcgccacaccgtcgatccggaccgccacatcgagcgggtcaccgagctgcaagaactcttcctcacgcgcgtcgggctcgacatcggcaaggtgtgggtcgcggacgacggcgccgcggtggcggtctggaccacgccggagagcgtcgaagcgggggcggtgttcgccgagatcggcccgcgcatggccgagttgagcggttcccggctggccgcgcagcaacagatggaaggcctcctggcgccgcaccggcccaaggagcccgcgtggttcctggccaccgtcggcgtctcgcccgaccaccagggcaagggtctgggcagcgccgtcgtgctccccggagtggaggcggccgagcgcgccggggtgcccgccttcctggagacctccgcgccccgcaacctccccttctacgagcggctcggcttcaccgtcaccgccgacgtcgaggtgcccgaaggaccgcgcacctggtgcatgacccgcaagcccggtgcctga

SEQ ID NO: 17564 - DNA, 3717 bp, synthetic construct
  source 1..3717: mol_type = other DNA
atggccttaccagtgaccgccttgctcctgccgctggccttgctgctccacgccgccaggccgctcgaggaggacctgaagaacgtgttcccacctgaggtggccgtgttcgagcctagcgaggccgagatcagccacacccagaaagccaccctcgtgtgcctggctaccggcttctaccccgaccatgtggaactgtcttggtgggtcaacggcaaagaggtgcacagcggcgtgtctaccgacccccagccactgaaagaacagcccgccctgaacgacagccggtactgcctgagcagcagactgagagtgtccgccaccttctggcagaacccccggaaccacttcagatgccaggtgcagttctacggcctgagcgagaacgacgagtggacccaggacagagccaagcccgtgacccagatcgtgtctgccgaagcctggggcagagccgatgatgtgattaagatccactggcaggaaaagaagtccaacaccatcctgggcagccaggaaggcaacaccatgaagaccaacgacacctacatgaagttcagctggctgaccgtgcccgagaagtccctggacaaagaacacagatgcatcgtgcggcacgaaaacaacaagaacggcgtggaccaggaaatcatcttcccacccatcaagaccgatgtgattacaatggaccccaaggacaactgctccaaggacgccaacgataccctgctgctccagctgaccaacaccagcgcctactacatgtacttgttgctgctgctgaagtccgtggtgtacttcgccatcatcacatgctgcctgctgatggctatggtcaagcggaaggacagccggggaagggccaagcgatctggatctggagcaacaaacttctcactactcaaacaagcaggtgacgtggaggagaatcccgggcctactagcatggccttaccagtgaccgccttgctcctgccgctggccttgctgctccacgccgccaggccgggcgtgacacagagccccacacacctgattaagaccagaggccagcaggccacactgagatgcagccctatcagcggccacaccagcgtgtactggtatcagcaggctctcggactgggcctccagttcctgctttggtacgacgagggcgaagagagaaaccggggcaacttccctcctcggttttccggcagacagttccccaactacagcagcgagctgaacgtgaacgccctggaactggaagatagcgccctgtacctgtgtgcctcttctcttggtggacctcgcggactggctggactgagaggggatgagcagtttttcggccctggcaccagactgaccgtgctggaaggcggaggaagcggcggaggatctggcgtgacacagagccccacacacctgattaagaccagaggccagcaggccacactgagatgcagccctatcagcggccacaccagcgtgtactggtatcagcaggctctcggactgggcctccagttcctgctttggtacgacgagggcgaagagagaaaccggggcaacttccctcctcggttttccggcagacagttccccaactacagcagcgagctgaacgtgaacgccctggaactggaagatagcgccctgtacctgtgtgccagctctctcggcggagatgaactgggagccgatggcaacgagcagttctttggccctggcaccagactgaccgtgctggaaggtaccggcggaggcggatctggcggcggaggtagcggtggcggaggatctgaattcgacatccagatgacacagagccctagcagcctgtctgccagcgtgggagacagagtgaccatcacatgcaaggccagcgaccacatcaacaactggctggcctggtatcagcagaagcctggacaggcccctaagctgctgatctacggcgctaccacactggaaacaggcgtgcccagcagattttctggcagcggctctggcaccgactacaccctgacaatatccagcctccagcctgaggacttcgccacctactactgtcagcagagctggaacaccccttggacattcggccagggcaccaagctggaaatcaagagaggcggaggcggaagtggaggcggaggatctggcggcggaggctctcaagttcagcttcaacagcctggcgctgagctggtcaaacctggcgcttctgtgaagatgagctgcaaagccagcggctacgccttcagcagctactggatcaactggatgaagcagaaacccggccagggactcgaatggatcggccaaatctatcccggcgacggcgacaccaactacaacggcaagttcaagggcagagccacactgaccgccgatacctctagcagcacagcctacatgcagctgagcagcctgaccagcgaagatagcgccgtgtacttctgtgcccggtccatcacaacagtcgtgggctgcgctatggactattggggccagggaacaagcgtgaccgtgtctagtacgcgtatccagaaccctgatcctgccgtgtaccagctgcgggatagcaagagcagcgacaagagcgtgtgtctgttcaccgacttcgacagccagaccaacgtgtcccagagcaaggactccgacgtgtacatcaccgataagaccgtgctggacatgcggagcatggacttcaagagcaactccgccgtggcctggtccaacaagtccgatttcgcctgcgccaacgccttcaacaacagcattatccccgaggacacattcttcccaagccccgagagcagcgactccaccgaccacgtgaagcccaaagagacagagaacaccaagcagcccagcaagagctgccacaagcccaaggccatcgtgcacaccgagaaagtgaacatgatgagcctgaccgtgctgggcctgcggatgctgttcgccaaaaccgtggccgtgaacttcctgctgaccgccaagctgttcttcctcctcaccgcccgcgccaagagaagcggatctggcgtgaagcagaccctgaatttcgacctgctgaagctggctggcgacgtggaatccaacccaggcccttctagaggccatatgaccgagtacaagcccacggtgcgcctcgccacccgcgacgacgtccccagggccgtacgcaccctcgccgccgcgttcgccgactaccccgccacgcgccacaccgtcgatccggaccgccacatcgagcgggtcaccgagctgcaagaactcttcctcacgcgcgtcgggctcgacatcggcaaggtgtgggtcgcggacgacggcgccgcggtggcggtctggaccacgccggagagcgtcgaagcgggggcggtgttcgccgagatcggcccgcgcatggccgagttgagcggttcccggctggccgcgcagcaacagatggaaggcctcctggcgccgcaccggcccaaggagcccgcgtggttcctggccaccgtcggcgtctcgcccgaccaccagggcaagggtctgggcagcgccgtcgtgctccccggagtggaggcggccgagcgcgccggggtgcccgccttcctggagacctccgcgccccgcaacctccccttctacgagcggctcggcttcaccgtcaccgccgacgtcgaggtgcccgaaggaccgcgcacctggtgcatgacccgcaagcccggtgcctga

SEQ ID NO: 17565 - DNA, 2577 bp, synthetic construct; identical to SEQ ID NO: 8299
  source 1..2577: mol_type = other DNA

SEQ ID NO: 17566 - DNA, 2364 bp, synthetic construct; identical to SEQ ID NO: 8300
  source 1..2364: mol_type = other DNA

SEQ ID NO: 17567 - DNA, 3030 bp, synthetic construct; identical to SEQ ID NO: 8301
  source 1..3030: mol_type = other DNA

SEQ ID NO: 17568 - DNA, 2772 bp, synthetic construct; identical to SEQ ID NO: 8302
  source 1..2772: mol_type = other DNA

SEQ ID NO: 17569 - DNA, 1653 bp, synthetic construct
  source 1..1653: mol_type = other DNA
atggccttaccagtgaccgccttgctcctgccgctggccttgctgctccacgccgccaggccgctcgaggaggacctgaagaacgtgttcccacctgaggtggccgtgttcgagcctagcgaggccgagatcagccacacccagaaagccaccctcgtgtgcctggctaccggcttctaccccgaccatgtggaactgtcttggtgggtcaacggcaaagaggtgcacagcggcgtgtctaccgacccccagccactgaaagaacagcccgccctgaacgacagccggtactgcctgagcagcagactgagagtgtccgccaccttctggcagaacccccggaaccacttcagatgccaggtgcagttctacggcctgagcgagaacgacgagtggacccaggacagagccaagcccgtgacccagatcgtgtctgccgaagcctggggcagagccgatgatgtgattaagatccactggcaggaaaagaagtccaacaccatcctgggcagccaggaaggcaacaccatgaagaccaacgacacctacatgaagttcagctggctgaccgtgcccgagaagtccctggacaaagaacacagatgcatcgtgcggcacgaaaacaacaagaacggcgtggaccaggaaatcatcttcccacccatcaagaccgatgtgattacaatggaccccaaggacaactgctccaaggacgccaacgataccctgctgctccagctgaccaacaccagcgcctactacatgtacttgttgctgctgctgaagtccgtggtgtacttcgccatcatcacatgctgcctgctgatggctatggtcaagcggaaggacagccggggaagggccaagcgatctggatctggagcaacaaacttctcactactcaaacaagcaggtgacgtggaggagaatcccgggcctactagcgccaccatggccttaccagtgaccgccttgctcctgccgctggccttgctgctccacgccgccaggccgatggaccccgacctggaaatcagagccgccttcctgcggcagagaaacacagccctgagaacagaggtggccgagctggaacaagaggtgcagcggctggaaaacgaggtgtcccagtacgagacaagatacggccctctcggaggcggaaaaacgcgtatccagaaccctgatcctgccgtgtaccagctgcgggatagcaagagcagcgacaagagcgtgtgtctgttcaccgacttcgacagccagaccaacgtgtcccagagcaaggactccgacgtgtacatcaccgataagaccgtgctggacatgcggagcatggacttcaagagcaactccgccgtggcctggtccaacaagtccgatttcgcctgcgccaacgccttcaacaacagcattatccccgaggacacattcttcccaagccccgagagcagcgactccaccgaccacgtgaagcccaaagagacagagaacaccaagcagcccagcaagagctgccacaagcccaaggccatcgtgcacaccgagaaagtgaacatgatgagcctgaccgtgctgggcctgcggatgctgttcgccaaaaccgtggccgtgaacttcctgctgaccgccaagctgttcttcctcctcaccgcc

SEQ ID NO: 17570 - DNA, 1653 bp, synthetic construct
  source 1..1653: mol_type = other DNA
atggccttaccagtgaccgccttgctcctgccgctggccttgctgctccacgccgccaggccgctcgaggaggacctgaagaacgtgttcccacctgaggtggccgtgttcgagcctagcgaggccgagatcagccacacccagaaagccaccctcgtgtgcctggctaccggcttctaccccgaccatgtggaactgtcttggtgggtcaacggcaaagaggtgcacagcggcgtgtctaccgacccccagccactgaaagaacagcccgccctgaacgacagccggtactgcctgagcagcagactgagagtgtccgccaccttctggcagaacccccggaaccacttcagatgccaggtgcagttctacggcctgagcgagaacgacgagtggacccaggacagagccaagcccgtgacccagatcgtgtctgccgaagcctggggcagagccgatgatgtgattaagatccactggcaggaaaagaagtccaacaccatcctgggcagccaggaaggcaacaccatgaagaccaacgacacctacatgaagttcagctggctgaccgtgcccgagaagtccctggacaaagaacacagatgcatcgtgcggcacgaaaacaacaagaacggcgtggaccaggaaatcatcttcccacccatcaagaccgatgtgattacaatggaccccaaggacaactgctccaaggacgccaacgataccctgctgctccagctgaccaacaccagcgcctactacatgtacttgttgctgctgctgaagtccgtggtgtacttcgccatcatcacatgctgcctgctgatggctatggtcaagcggaaggacagccggggaagggccaagcgatctggatctggagcaacaaacttctcactactcaaacaagcaggtgacgtggaggagaatcccgggcctactagcgccaccatggccttaccagtgaccgccttgctcctgccgctggccttgctgctccacgccgccaggccgatggaccctgatctcgaaattgaggccgcctttctggaacgcgagaacactgccctggaaaccagggtcgcagagctgagacagagagtgcagagactgcggaacagagtgtctcagtaccgcaccagatatggcccactcggcggaggtaaaacgcgtatccagaaccctgatcctgccgtgtaccagctgcgggatagcaagagcagcgacaagagcgtgtgtctgttcaccgacttcgacagccagaccaacgtgtcccagagcaaggactccgacgtgtacatcaccgataagaccgtgctggacatgcggagcatggacttcaagagcaactccgccgtggcctggtccaacaagtccgatttcgcctgcgccaacgccttcaacaacagcattatccccgaggacacattcttcccaagccccgagagcagcgactccaccgaccacgtgaagcccaaagagacagagaacaccaagcagcccagcaagagctgccacaagcccaaggccatcgtgcacaccgagaaagtgaacatgatgagcctgaccgtgctgggcctgcggatgctgttcgccaaaaccgtggccgtgaacttcctgctgaccgccaagctgttcttcctcctcaccgcc

SEQ ID NO: 17571 - DNA, 1584 bp, synthetic construct
  source 1..1584: mol_type = other DNA
atggccttaccagtgaccgccttgctcctgccgctggccttgctgctccacgccgccaggccgctcgaggaggacctgaagaacgtgttcccacctgaggtggccgtgttcgagcctagcgaggccgagatcagccacacccagaaagccaccctcgtgtgcctggctaccggcttctaccccgaccatgtggaactgtcttggtgggtcaacggcaaagaggtgcacagcggcgtgtctaccgacccccagccactgaaagaacagcccgccctgaacgacagccggtactgcctgagcagcagactgagagtgtccgccaccttctggcagaacccccggaaccacttcagatgccaggtgcagttctacggcctgagcgagaacgacgagtggacccaggacagagccaagcccgtgacccagatcgtgtctgccgaagcctggggcagagccgatgatgtgattaagatccactggcaggaaaagaagtccaacaccatcctgggcagccaggaaggcaacaccatgaagaccaacgacacctacatgaagttcagctggctgaccgtgcccgagaagtccctggacaaagaacacagatgcatcgtgcggcacgaaaacaacaagaacggcgtggaccaggaaatcatcttcccacccatcaagaccgatgtgattacaatggaccccaaggacaactgctccaaggacgccaacgataccctgctgctccagctgaccaacaccagcgcctactacatgtacttgttgctgctgctgaagtccgtggtgtacttcgccatcatcacatgctgcctgctgatggctatggtcaagcggaaggacagccggggaagggccaagcgatctggatctggagcaacaaacttctcactactcaaacaagcaggtgacgtggaggagaatcccgggcctactagcgccaccatggccttaccagtgaccgccttgctcctgccgctggccttgctgctccacgccgccaggccggaagttgctgccctcgagaaggaggtagcagctttggaaaaagaagtcgcagcccttgagaaagaagttgcggctctggagaagacgcgtatccagaaccctgatcctgccgtgtaccagctgcgggatagcaagagcagcgacaagagcgtgtgtctgttcaccgacttcgacagccagaccaacgtgtcccagagcaaggactccgacgtgtacatcaccgataagaccgtgctggacatgcggagcatggacttcaagagcaactccgccgtggcctggtccaacaagtccgatttcgcctgcgccaacgccttcaacaacagcattatccccgaggacacattcttcccaagccccgagagcagcgactccaccgaccacgtgaagcccaaagagacagagaacaccaagcagcccagcaagagctgccacaagcccaaggccatcgtgcacaccgagaaagtgaacatgatgagcctgaccgtgctgggcctgcggatgctgttcgccaaaaccgtggccgtgaacttcctgctgaccgccaagctgttcttcctcctcaccgcc

SEQ ID NO: 17572 - DNA, 2358 bp, synthetic construct
  source 1..2358: mol_type = other DNA
atggccttaccagtgaccgccttgctcctgccgctggccttgctgctccacgccgccaggccgctcgaggaggacctgaagaacgtgttcccacctgaggtggccgtgttcgagcctagcgaggccgagatcagccacacccagaaagccaccctcgtgtgcctggctaccggcttctaccccgaccatgtggaactgtcttggtgggtcaacggcaaagaggtgcacagcggcgtgtctaccgacccccagccactgaaagaacagcccgccctgaacgacagccggtactgcctgagcagcagactgagagtgtccgccaccttctggcagaacccccggaaccacttcagatgccaggtgcagttctacggcctgagcgagaacgacgagtggacccaggacagagccaagcccgtgacccagatcgtgtctgccgaagcctggggcagagccgatgatgtgattaagatccactggcaggaaaagaagtccaacaccatcctgggcagccaggaaggcaacaccatgaagaccaacgacacctacatgaagttcagctggctgaccgtgcccgagaagtccctggacaaagaacacagatgcatcgtgcggcacgaaaacaacaagaacggcgtggaccaggaaatcatcttcccacccatcaagaccgatgtgattacaatggaccccaaggacaactgctccaaggacgccaacgataccctgctgctccagctgaccaacaccagcgcctactacatgtacttgttgctgctgctgaagtccgtggtgtacttcgccatcatcacatgctgcctgctgatggctatggtcaagcggaaggacagccggggaagggccaagcgatctggatctggagcaacaaacttctcactactcaaacaagcaggtgacgtggaggagaatcccgggcctactagcgccaccatggccttaccagtgaccgccttgctcctgccgctggccttgctgctccacgccgccaggccgctgttcaatcaagaggtgcagatccctctgaccgagagctactgtggcccctgtcctaagaactggatctgctacaagaacaactgctaccagttcttcgacgagagcaagaattggtacgagagccaggccagctgcatgagccagaatgccagcctgctgaaggtgtacagcaaagaggaccaggacctgctgaaactggtcaagagcgcccactggatgggccttgtgcacatccccaccaatggctcttggcagtgggaggacggcagcattctgagccctaacctgctgaccatcatcgagatgcagaagggcgactgcgccctgtacgccagcagctttaagggctacatcgagaattgcagcaccccgaacacctacatctgtatgcagagaaccgtttctggcggaggcggctctggaggaggcggaagtggcggcggaggcgacctctttaatcaagaagtccagattccactcaccgaatcctactgcggaccttgtccaaaaaattggatttgttataagaacaactgttatcaattctttgatgagtctaaaaattggtatgagtcccaggcttcctgcatgtctcagaacgcttctctgctgaaagtctactctaaagaagatcaggatctcctgaagctcgtcaagtctgcccattggatggggctcgtccacattcctaccaacggaagctggcaatgggaagatggctccatcctgtctccaaatctgctcacgattattgaaatgcagaaaggggattgtgctctctacgccagctccttcaagggatatattgagaactgtagcacgcccaatacttatatctgtatgcaacggaccgtgacgcgtatccagaaccctgatcctgccgtgtaccagctgcgggatagcaagagcagcgacaagagcgtgtgtctgttcaccgacttcgacagccagaccaacgtgtcccagagcaaggactccgacgtgtacatcaccgataagaccgtgctggacatgcggagcatggacttcaagagcaactccgccgtggcctggtccaacaagtccgatttcgcctgcgccaacgccttcaacaacagcattatccccgaggacacattcttcccaagccccgagagcagcgactccaccgaccacgtgaagcccaaagagacagagaacaccaagcagcccagcaagagctgccacaagcccaaggccatcgtgcacaccgagaaagtgaacatgatgagcctgaccgtgctgggcctgcggatgctgttcgccaaaaccgtggccgtgaacttcctgctgaccgccaagctgttcttcctcctcaccgcc

SEQ ID NO: 17573 - DNA, 2358 bp, synthetic construct
  source 1..2358: mol_type = other DNA
atggccttaccagtgaccgccttgctcctgccgctggccttgctgctccacgccgccaggccgctcgaggaggacctgaagaacgtgttcccacctgaggtggccgtgttcgagcctagcgaggccgagatcagccacacccagaaagccaccctcgtgtgcctggctaccggcttctaccccgaccatgtggaactgtcttggtgggtcaacggcaaagaggtgcacagcggcgtgtctaccgacccccagccactgaaagaacagcccgccctgaacgacagccggtactgcctgagcagcagactgagagtgtccgccaccttctggcagaacccccggaaccacttcagatgccaggtgcagttctacggcctgagcgagaacgacgagtggacccaggacagagccaagcccgtgacccagatcgtgtctgccgaagcctggggcagagccgatgatgtgattaagatccactggcaggaaaagaagtccaacaccatcctgggcagccaggaaggcaacaccatgaagaccaacgacacctacatgaagttcagctggctgaccgtgcccgagaagtccctggacaaagaacacagatgcatcgtgcggcacgaaaacaacaagaacggcgtggaccaggaaatcatcttcccacccatcaagaccgatgtgattacaatggaccccaaggacaactgctccaaggacgccaacgataccctgctgctccagctgaccaacaccagcgcctactacatgtacttgttgctgctgctgaagtccgtggtgtacttcgccatcatcacatgctgcctgctgatggctatggtcaagcggaaggacagccggggaagggccaagcgatctggatctggagcaacaaacttctcactactcaaacaagcaggtgacgtggaggagaatcccgggcctactagcgccaccatggccttaccagtgaccgccttgctcctgccgctggccttgctgctccacgccgccaggccgctgttcaatcaagaggtgcagatccctctgaccgagagctactgtggcccctgtcctaagaactggatctgctacaagaacaactgctaccagttcttcgacgagagcaagaattggtacgagagccaggccagctgcatgagccagaatgccagcctgctgaaggtgtacagcaaagaggaccaggacctgctgaaactggtcaagagcgcccactggatgggccttgtgcacatccccaccaatggctcttggcagtgggaggacggcagcattctgagccctaacctgctgaccatcatcgagatgcagaagggcgactgcgccctgtacgccagcagctttaagggcttcatcgagaattgcagcaccccgaacacctacatctgtatgcagagaaccgttggcggaggcggaagtggaggcggaggatctggcggcggaggctctgacctctttaatcaagaagtccagattccactcaccgaatcctactgcggaccttgtccaaaaaattggatttgttataagaacaactgttatcaattctttgatgagtctaaaaattggtatgagtcccaggcttcctgcatgtctcagaacgcttctctgctgaaagtctactctaaagaagatcaggatctcctgaagctcgtcaagtctgcccattggatggggctcgtccacattcctaccaacggaagctggcaatgggaagatggctccatcctgtctccaaatctgctcacgattattgaaatgcagaaaggggattgtgctctctacgccagctccttcaagggatttattgagaactgtagcacgcccaatacttatatctgtatgcaacggaccgtgacgcgtatccagaaccctgatcctgccgtgtaccagctgcgggatagcaagagcagcgacaagagcgtgtgtctgttcaccgacttcgacagccagaccaacgtgtcccagagcaaggactccgacgtgtacatcaccgataagaccgtgctggacatgcggagcatggacttcaagagcaactccgccgtggcctggtccaacaagtccgatttcgcctgcgccaacgccttcaacaacagcattatccccgaggacacattcttcccaagccccgagagcagcgactccaccgaccacgtgaagcccaaagagacagagaacaccaagcagcccagcaagagctgccacaagcccaaggccatcgtgcacaccgagaaagtgaacatgatgagcctgaccgtgctgggcctgcggatgctgttcgccaaaaccgtggccgtgaacttcctgctgaccgccaagctgttcttcctcctcaccgcc

SEQ ID NO: 17574 - DNA, 2436 bp, synthetic construct
  source 1..2436: mol_type = other DNA
atggccttaccagtgaccgccttgctcctgccgctggccttgctgctccacgccgccaggccgctcgaggaggacctgaagaacgtgttcccacctgaggtggccgtgttcgagcctagcgaggccgagatcagccacacccagaaagccaccctcgtgtgcctggctaccggcttctaccccgaccatgtggaactgtcttggtgggtcaacggcaaagaggtgcacagcggcgtgtctaccgacccccagccactgaaagaacagcccgccctgaacgacagccggtactgcctgagcagcagactgagagtgtccgccaccttctggcagaacccccggaaccacttcagatgccaggtgcagttctacggcctgagcgagaacgacgagtggacccaggacagagccaagcccgtgacccagatcgtgtctgccgaagcctggggcagagccgatgatgtgattaagatccactggcaggaaaagaagtccaacaccatcctgggcagccaggaaggcaacaccatgaagaccaacgacacctacatgaagttcagctggctgaccgtgcccgagaagtccctggacaaagaacacagatgcatcgtgcggcacgaaaacaacaagaacggcgtggaccaggaaatcatcttcccacccatcaagaccgatgtgattacaatggaccccaaggacaactgctccaaggacgccaacgataccctgctgctccagctgaccaacaccagcgcctactacatgtacttgttgctgctgctgaagtccgtggtgtacttcgccatcatcacatgctgcctgctgatggctatggtcaagcggaaggacagccggggaagggccaagcgatctggatctggagcaacaaacttctcactactcaaacaagcaggtgacgtggaggagaatcccgggcctactagcatggccttaccagtgaccgccttgctcctgccgctggccttgctgctccacgccgccaggccgatggaccccgacctggaaatcagagccgccttcctgcggcagagaaacacagccctgagaacagaggtggccgagctggaacaagaggtgcagcggctggaaaacgaggtgtcccagtacgagacaagatacggccctctcggaggcggaaaaggtaccggcggaggcggatctggcggcggaggtagcggtggcggaggatctgaattcgacatccagatgacacagagccctagcagcctgtctgccagcgtgggagacagagtgaccatcacatgcaaggccagcgaccacatcaacaactggctggcctggtatcagcagaagcctggacaggcccctaagctgctgatctacggcgctaccacactggaaacaggcgtgcccagcagattttctggcagcggctctggcaccgactacaccctgacaatatccagcctccagcctgaggacttcgccacctactactgtcagcagagctggaacaccccttggacattcggccagggcaccaagctggaaatcaagagaggcggaggcggaagtggaggcggaggatctggcggcggaggctctcaagttcagcttcaacagcctggcgctgagctggtcaaacctggcgcttctgtgaagatgagctgcaaagccagcggctacgccttcagcagctactggatcaactggatgaagcagaaacccggccagggactcgaatggatcggccaaatctatcccggcgacggcgacaccaactacaacggcaagttcaagggcagagccacactgaccgccgatacctctagcagcacagcctacatgcagctgagcagcctgaccagcgaagatagcgccgtgtacttctgtgcccggtccatcacaacagtcgtgggctgcgctatggactattggggccagggaacaagcgtgaccgtgtctagtacgcgtatccagaaccctgatcctgccgtgtaccagctgcgggatagcaagagcagcgacaagagcgtgtgtctgttcaccgacttcgacagccagaccaacgtgtcccagagcaaggactccgacgtgtacatcaccgataagaccgtgctggacatgcggagcatggacttcaagagcaactccgccgtggcctggtccaacaagtccgatttcgcctgcgccaacgccttcaacaacagcattatccccgaggacacattcttcccaagccccgagagcagcgactccaccgaccacgtgaagcccaaagagacagagaacaccaagcagcccagcaagagctgccacaagcccaaggccatcgtgcacaccgagaaagtgaacatgatgagcctgaccgtgctgggcctgcggatgctgttcgccaaaaccgtggccgtgaacttcctgctgaccgccaagctgttcttcctcctcaccgcc

SEQ ID NO: 17575 - DNA, 3141 bp, synthetic construct
  source 1..3141: mol_type = other DNA
atggccttaccagtgaccgccttgctcctgccgctggccttgctgctccacgccgccaggccgctcgaggaggacctgaagaacgtgttcccacctgaggtggccgtgttcgagcctagcgaggccgagatcagccacacccagaaagccaccctcgtgtgcctggctaccggcttctaccccgaccatgtggaactgtcttggtgggtcaacggcaaagaggtgcacagcggcgtgtctaccgacccccagccactgaaagaacagcccgccctgaacgacagccggtactgcctgagcagcagactgagagtgtccgccaccttctggcagaacccccggaaccacttcagatgccaggtgcagttctacggcctgagcgagaacgacgagtggacccaggacagagccaagcccgtgacccagatcgtgtctgccgaagcctggggcagagccgatgatgtgattaagatccactggcaggaaaagaagtccaacaccatcctgggcagccaggaaggcaacaccatgaagaccaacgacacctacatgaagttcagctggctgaccgtgcccgagaagtccctggacaaagaacacagatgcatcgtgcggcacgaaaacaacaagaacggcgtggaccaggaaatcatcttcccacccatcaagaccgatgtgattacaatggaccccaaggacaactgctccaaggacgccaacgataccctgctgctccagctgaccaacaccagcgcctactacatgtacttgttgctgctgctgaagtccgtggtgtacttcgccatcatcacatgctgcctgctgatggctatggtcaagcggaaggacagccggggaagggccaagcgatctggatctggagcaacaaacttctcactactcaaacaagcaggtgacgtggaggagaatcccgggcctactagcatggccttaccagtgaccgccttgctcctgccgctggccttgctgctccacgccgccaggccgctgttcaatcaagaggtgcagatccctctgaccgagagctactgtggcccctgtcctaagaactggatctgctacaagaacaactgctaccagttcttcgacgagagcaagaattggtacgagagccaggccagctgcatgagccagaatgccagcctgctgaaggtgtacagcaaagaggaccaggacctgctgaaactggtcaagagcgcccactggatgggccttgtgcacatccccaccaatggctcttggcagtgggaggacggcagcattctgagccctaacctgctgaccatcatcgagatgcagaagggcgactgcgccctgtacgccagcagctttaagggcttcatcgagaattgcagcaccccgaacacctacatctgtatgcagagaaccgttggcggaggcggaagtggaggcggaggatctggcggcggaggctctgacctctttaatcaagaagtccagattccactcaccgaatcctactgcggaccttgtccaaaaaattggatttgttataagaacaactgttatcaattctttgatgagtctaaaaattggtatgagtcccaggcttcctgcatgtctcagaacgcttctctgctgaaagtctactctaaagaagatcaggatctcctgaagctcgtcaagtctgcccattggatggggctcgtccacattcctaccaacggaagctggcaatgggaagatggctccatcctgtctccaaatctgctcacgattattgaaatgcagaaaggggattgtgctctctacgccagctccttcaagggatttattgagaactgtagcacgcccaatacttatatctgtatgcaacggaccgtgggtaccggcggaggcggatctggcggcggaggtagcggtggcggaggatctgaattcgacatccagatgacacagagccctagcagcctgtctgccagcgtgggagacagagtgaccatcacatgcaaggccagcgaccacatcaacaactggctggcctggtatcagcagaagcctggacaggcccctaagctgctgatctacggcgctaccacactggaaacaggcgtgcccagcagattttctggcagcggctctggcaccgactacaccctgacaatatccagcctccagcctgaggacttcgccacctactactgtcagcagagctggaacaccccttggacattcggccagggcaccaagctggaaatcaagagaggcggaggcggaagtggaggcggaggatctggcggcggaggctctcaagttcagcttcaacagcctggcgctgagctggtcaaacctggcgcttctgtgaagatgagctgcaaagccagcggctacgccttcagcagctactggatcaactggatgaagcagaaacccggccagggactcgaatggatcggccaaatctatcccggcgacggcgacaccaactacaacggcaagttcaagggcagagccacactgaccgccgatacctctagcagcacagcctacatgcagctgagcagcctgaccagcgaagatagcgccgtgtacttctgtgcccggtccatcacaacagtcgtgggctgcgctatggactattggggccagggaacaagcgtgaccgtgtctagtacgcgtatccagaaccctgatcctgccgtgtaccagctgcgggatagcaagagcagcgacaagagcgtgtgtctgttcaccgacttcgacagccagaccaacgtgtcccagagcaaggactccgacgtgtacatcaccgataagaccgtgctggacatgcggagcatggacttcaagagcaactccgccgtggcctggtccaacaagtccgatttcgcctgcgccaacgccttcaacaacagcattatccccgaggacacattcttcccaagccccgagagcagcgactccaccgaccacgtgaagcccaaagagacagagaacaccaagcagcccagcaagagctgccacaagcccaaggccatcgtgcacaccgagaaagtgaacatgatgagcctgaccgtgctgggcctgcggatgctgttcgccaaaaccgtggccgtgaacttcctgctgaccgccaagctgttcttcctcctcaccgcc

SEQ ID NO: 17576 - DNA, 2256 bp, synthetic construct
  source 1..2256: mol_type = other DNA
atggccttaccagtgaccgccttgctcctgccgctggccttgctgctccacgccgccaggccgctcgaggaggacctgaagaacgtgttcccacctgaggtggccgtgttcgagcctagcgaggccgagatcagccacacccagaaagccaccctcgtgtgcctggctaccggcttctaccccgaccatgtggaactgtcttggtgggtcaacggcaaagaggtgcacagcggcgtgtctaccgacccccagccactgaaagaacagcccgccctgaacgacagccggtactgcctgagcagcagactgagagtgtccgccaccttctggcagaacccccggaaccacttcagatgccaggtgcagttctacggcctgagcgagaacgacgagtggacccaggacagagccaagcccgtgacccagatcgtgtctgccgaagcctggggcagagccgatgatgtgattaagatccactggcaggaaaagaagtccaacaccatcctgggcagccaggaaggcaacaccatgaagaccaacgacacctacatgaagttcagctggctgaccgtgcccgagaagtccctggacaaagaacacagatgcatcgtgcggcacgaaaacaacaagaacggcgtggaccaggaaatcatcttcccacccatcaagaccgatgtgattacaatggaccccaaggacaactgctccaaggacgccaacgataccctgctgctccagctgaccaacaccagcgcctactacatgtacttgttgctgctgctgaagtccgtggtgtacttcgccatcatcacatgctgcctgctgatggctatggtcaagcggaaggacagccggggaagggccaagcgatctggatctggagcaacaaacttctcactactcaaacaagcaggtgacgtggaggagaatcccgggcctactagcatggccttaccagtgaccgccttgctcctgccgctggccttgctgctccacgccgccaggccgcagtctgtgctgacacagcctcctagtgtgtctggcgctcctggacagagagtgaccatctcttgtaccggcagcagcagcaatatcggagccggctatgacgtgcactggtatcagcagctccctggcacagcccctaaactgctgatcttcggcaacagcaacagacccagcggcgtgcccgatagattcagcggctttaagagcggcacaagcgccagcctggctatcactggactgcaagccgaggacgaggccgactacttctgccagagctacgatagcagcctgagcggcagcggagtgtttggcacaggcaccaaagtgacagtgcttggcggcggaggcggaagtggaggcggaggatctggcggcggaggctctcaaatgcaactggttcaaagcggcggtggcctggtgcaacctggaagaagtctgagactgagctgtgccgccagcggcttcaccttcgatgattacgccatgcactgggtccgacaggcccctggaaaaggactggaatgggtgtccggcatctcctggaatagcggctctatcggctacgccgacagcgtgaagggcagattcaccatcagccgggacaacgccaagaacagcctgtacctccagatgaactccctgagagccgaggatacagccctgtactactgcgccaaggacatccacagcggcagctactacggcctgctgtactacgctatggacgtgtggggccagggcacaaccgtgacagtttcttctacgcgtatccagaaccctgatcctgccgtgtaccagctgcgggatagcaagagcagcgacaagagcgtgtgtctgttcaccgacttcgacagccagaccaacgtgtcccagagcaaggactccgacgtgtacatcaccgataagaccgtgctggacatgcggagcatggacttcaagagcaactccgccgtggcctggtccaacaagtccgatttcgcctgcgccaacgccttcaacaacagcattatccccgaggacacattcttcccaagccccgagagcagcgactccaccgaccacgtgaagcccaaagagacagagaacaccaagcagcccagcaagagctgccacaagcccaaggccatcgtgcacaccgagaaagtgaacatgatgagcctgaccgtgctgggcctgcggatgctgttcgccaaaaccgtggccgtgaacttcctgctgaccgccaagctgttcttcctcctcaccgcc

SEQ ID NO: 17577 - DNA, 1767 bp, synthetic construct
  source 1..1767: mol_type = other DNA
atggccttaccagtgaccgccttgctcctgccgctggccttgctgctccacgccgccaggccgctcgaggaggacctgaagaacgtgttcccacctgaggtggccgtgttcgagcctagcgaggccgagatcagccacacccagaaagccaccctcgtgtgcctggctaccggcttctaccccgaccatgtggaactgtcttggtgggtcaacggcaaagaggtgcacagcggcgtgtctaccgacccccagccactgaaagaacagcccgccctgaacgacagccggtactgcctgagcagcagactgagagtgtccgccaccttctggcagaacccccggaaccacttcagatgccaggtgcagttctacggcctgagcgagaacgacgagtggacccaggacagagccaagcccgtgacccagatcgtgtctgccgaagcctggggcagagccgatgatgtgattaagatccactggcaggaaaagaagtccaacaccatcctgggcagccaggaaggcaacaccatgaagaccaacgacacctacatgaagttcagctggctgaccgtgcccgagaagtccctggacaaagaacacagatgcatcgtgcggcacgaaaacaacaagaacggcgtggaccaggaaatcatcttcccacccatcaagaccgatgtgattacaatggaccccaaggacaactgctccaaggacgccaacgataccctgctgctccagctgaccaacaccagcgcctactacatgtacttgttgctgctgctgaagtccgtggtgtacttcgccatcatcacatgctgcctgctgatggctatggtcaagcggaaggacagccggggaagggccaagcgatctggatctggagcaacaaacttctcactactcaaacaagcaggtgacgtggaggagaatcccgggcctactagcatggccttaccagtgaccgccttgctcctgccgctggccttgctgctccacgccgccaggccgatgtgtatgccctgcttcaccaccgaccatcagatggcccggaagtgcgacgattgctgtggcggaaaaggcagaggcaagtgctacggccctcagtgcttgtgtagactcgagggcggaggcggaagtggaggcggaggatctggcggcggaggctctttcgaagtgtgtatgccttgttttaccacggatcaacaaatggctcgcaagtgttctgactgctgcggaggcaaaggccggggaaagtgttatggcccacagtgtctgtgccggacgcgtatccagaaccctgatcctgccgtgtaccagctgcgggatagcaagagcagcgacaagagcgtgtgtctgttcaccgacttcgacagccagaccaacgtgtcccagagcaaggactccgacgtgtacatcaccgataagaccgtgctggacatgcggagcatggacttcaagagcaactccgccgtggcctggtccaacaagtccgatttcgcctgcgccaacgccttcaacaacagcattatccccgaggacacattcttcccaagccccgagagcagcgactccaccgaccacgtgaagcccaaagagacagagaacaccaagcagcccagcaagagctgccacaagcccaaggccatcgtgcacaccgagaaagtgaacatgatgagcctgaccgtgctgggcctgcggatgctgttcgccaaaaccgtggccgtgaacttcctgctgaccgccaagctgttcttcctcctcaccgcc

SEQ ID NO: 17578 - DNA, 2556 bp, synthetic construct
  source 1..2556: mol_type = other DNA
atggccttaccagtgaccgccttgctcctgccgctggccttgctgctccacgccgccaggccgctcgaggaggacctgaagaacgtgttcccacctgaggtggccgtgttcgagcctagcgaggccgagatcagccacacccagaaagccaccctcgtgtgcctggctaccggcttctaccccgaccatgtggaactgtcttggtgggtcaacggcaaagaggtgcacagcggcgtgtctaccgacccccagccactgaaagaacagcccgccctgaacgacagccggtactgcctgagcagcagactgagagtgtccgccaccttctggcagaacccccggaaccacttcagatgccaggtgcagttctacggcctgagcgagaacgacgagtggacccaggacagagccaagcccgtgacccagatcgtgtctgccgaagcctggggcagagccgatgatgtgattaagatccactggcaggaaaagaagtccaacaccatcctgggcagccaggaaggcaacaccatgaagaccaacgacacctacatgaagttcagctggctgaccgtgcccgagaagtccctggacaaagaacacagatgcatcgtgcggcacgaaaacaacaagaacggcgtggaccaggaaatcatcttcccacccatcaagaccgatgtgattacaatggaccccaaggacaactgctccaaggacgccaacgataccctgctgctccagctgaccaacaccagcgcctactacatgtacttgttgctgctgctgaagtccgtggtgtacttcgccatcatcacatgctgcctgctgatggctatggtcaagcggaaggacagccggggaagggccaagcgatctggatctggagcaacaaacttctcactactcaaacaagcaggtgacgtggaggagaatcccgggcctactagcatggccttaccagtgaccgccttgctcctgccgctggccttgctgctccacgccgccaggccgatgtgtatgccctgcttcaccaccgaccatcagatggcccggaagtgcgacgattgctgtggcggaaaaggcagaggcaagtgctacggccctcagtgcttgtgtagactcgagggcggaggcggaagtggaggcggaggatctggcggcggaggctctttcgaagtgtgtatgccttgttttaccacggatcaacaaatggctcgcaagtgttctgactgctgcggaggcaaaggccggggaaagtgttatggcccacagtgtctgtgccggggtaccggcggaggcggatctggcggcggaggtagcggtggcggaggatctgaattcgacatccagatgacacagagccctagcagcctgtctgccagcgtgggagacagagtgaccatcacatgcaaggccagcgaccacatcaacaactggctggcctggtatcagcagaagcctggacaggcccctaagctgctgatctacggcgctaccacactggaaacaggcgtgcccagcagattttctggcagcggctctggcaccgactacaccctgacaatatccagcctccagcctgaggacttcgccacctactactgtcagcagagctggaacaccccttggacattcggccagggcaccaagctggaaatcaagagaggcggaggcggaagtggaggcggaggatctggcggcggaggctctcaagttcagcttcaacagcctggcgctgagctggtcaaacctggcgcttctgtgaagatgagctgcaaagccagcggctacgccttcagcagctactggatcaactggatgaagcagaaacccggccagggactcgaatggatcggccaaatctatcccggcgacggcgacaccaactacaacggcaagttcaagggcagagccacactgaccgccgatacctctagcagcacagcctacatgcagctgagcagcctgaccagcgaagatagcgccgtgtacttctgtgcccggtccatcacaacagtcgtgggctgcgctatggactattggggccagggaacaagcgtgaccgtgtctagtacgcgtatccagaaccctgatcctgccgtgtaccagctgcgggatagcaagagcagcgacaagagcgtgtgtctgttcaccgacttcgacagccagaccaacgtgtcccagagcaaggactccgacgtgtacatcaccgataagaccgtgctggacatgcggagcatggacttcaagagcaactccgccgtggcctggtccaacaagtccgatttcgcctgcgccaacgccttcaacaacagcattatccccgaggacacattcttcccaagccccgagagcagcgactccaccgaccacgtgaagcccaaagagacagagaacaccaagcagcccagcaagagctgccacaagcccaaggccatcgtgcacaccgagaaagtgaacatgatgagcctgaccgtgctgggcctgcggatgctgttcgccaaaaccgtggccgtgaacttcctgctgaccgccaagctgttcttcctcctcaccgcc

SEQ ID NO: 17579 - DNA, 2781 bp, synthetic construct
  source 1..2781: mol_type = other DNA
atggccttaccagtgaccgccttgctcctgccgctggccttgctgctccacgccgccaggccgctcgaggaggacctgaagaacgtgttcccacctgaggtggccgtgttcgagcctagcgaggccgagatcagccacacccagaaagccaccctcgtgtgcctggctaccggcttctaccccgaccatgtggaactgtcttggtgggtcaacggcaaagaggtgcacagcggcgtgtctaccgacccccagccactgaaagaacagcccgccctgaacgacagccggtactgcctgagcagcagactgagagtgtccgccaccttctggcagaacccccggaaccacttcagatgccaggtgcagttctacggcctgagcgagaacgacgagtggacccaggacagagccaagcccgtgacccagatcgtgtctgccgaagcctggggcagagccgatgatgtgattaagatccactggcaggaaaagaagtccaacaccatcctgggcagccaggaaggcaacaccatgaagaccaacgacacctacatgaagttcagctggctgaccgtgcccgagaagtccctggacaaagaacacagatgcatcgtgcggcacgaaaacaacaagaacggcgtggaccaggaaatcatcttcccacccatcaagaccgatgtgattacaatggaccccaaggacaactgctccaaggacgccaacgataccctgctgctccagctgaccaacaccagcgcctactacatgtacttgttgctgctgctgaagtccgtggtgtacttcgccatcatcacatgctgcctgctgatggctatggtcaagcggaaggacagccggggaagggccaagcgatctggatctggagcaacaaacttctcactactcaaacaagcaggtgacgtggaggagaatcccgggcctactagcatggccttaccagtgaccgccttgctcctgccgctggccttgctgctccacgccgccaggccgagccccgtagctcctgcctgtgaccccagactcctaaataaactgctgcgtgactcccacctccttcacagccgactgagtcagtgtcccgacgtggaccctttgtctatccctgttctgctgcctgctgtggactttagcctgggagaatggaaaacccagacggaacagagcaaggcacaggacattctaggggcagtgtcccttctactggagggagtgatggcagcacgaggacagttggaaccctcctgcctctcatccctcctgggacagctttctgggcaggttcgcctcctcttgggggccctgcagggcctcctaggaacccagcttcctctacagggcaggaccacagctcacaaggaccccaatgccctcttcttgagcttgcaacaactgcttcggggaaaggtgcgcttcctgcttctggtagaaggtcccaccctctgtgtcagacggaccctgccaaccacagctgtcccaagcagtacttctggtaccggcggaggcggatctggcggcggaggtagcggtggcggaggatctgaattcgacatccagatgacacagagccctagcagcctgtctgccagcgtgggagacagagtgaccatcacatgcaaggccagcgaccacatcaacaactggctggcctggtatcagcagaagcctggacaggcccctaagctgctgatctacggcgctaccacactggaaacaggcgtgcccagcagattttctggcagcggctctggcaccgactacaccctgacaatatccagcctccagcctgaggacttcgccacctactactgtcagcagagctggaacaccccttggacattcggccagggcaccaagctggaaatcaagagaggcggaggcggaagtggaggcggaggatctggcggcggaggctctcaagttcagcttcaacagcctggcgctgagctggtcaaacctggcgcttctgtgaagatgagctgcaaagccagcggctacgccttcagcagctactggatcaactggatgaagcagaaacccggccagggactcgaatggatcggccaaatctatcccggcgacggcgacaccaactacaacggcaagttcaagggcagagccacactgaccgccgatacctctagcagcacagcctacatgcagctgagcagcctgaccagcgaagatagcgccgtgtacttctgtgcccggtccatcacaacagtcgtgggctgcgctatggactattggggccagggaacaagcgtgaccgtgtctagtacgcgtatccagaaccctgatcctgccgtgtaccagctgcgggatagcaagagcagcgacaagagcgtgtgtctgttcaccgacttcgacagccagaccaacgtgtcccagagcaaggactccgacgtgtacatcaccgataagaccgtgctggacatgcggagcatggacttcaagagcaactccgccgtggcctggtccaacaagtccgatttcgcctgcgccaacgccttcaacaacagcattatccccgaggacacattcttcccaagccccgagagcagcgactccaccgaccacgtgaagcccaaagagacagagaacaccaagcagcccagcaagagctgccacaagcccaaggccatcgtgcacaccgagaaagtgaacatgatgagcctgaccgtgctgggcctgcggatgctgttcgccaaaaccgtggccgtgaacttcctgctgaccgccaagctgttcttcctcctcaccgcc

SEQ ID NO: 17580 - DNA, 2502 bp, synthetic construct
  source 1..2502: mol_type = other DNA
atggccttaccagtgaccgccttgctcctgccgctggccttgctgctccacgccgccaggccgctcgaggaggacctgaagaacgtgttcccacctgaggtggccgtgttcgagcctagcgaggccgagatcagccacacccagaaagccaccctcgtgtgcctggctaccggcttctaccccgaccatgtggaactgtcttggtgggtcaacggcaaagaggtgcacagcggcgtgtctaccgacccccagccactgaaagaacagcccgccctgaacgacagccggtactgcctgagcagcagactgagagtgtccgccaccttctggcagaacccccggaaccacttcagatgccaggtgcagttctacggcctgagcgagaacgacgagtggacccaggacagagccaagcccgtgacccagatcgtgtctgccgaagcctggggcagagccgatgatgtgattaagatccactggcaggaaaagaagtccaacaccatcctgggcagccaggaaggcaacaccatgaagaccaacgacacctacatgaagttcagctggctgaccgtgcccgagaagtccctggacaaagaacacagatgcatcgtgcggcacgaaaacaacaagaacggcgtggaccaggaaatcatcttcccacccatcaagaccgatgtgattacaatggaccccaaggacaactgctccaaggacgccaacgataccctgctgctccagctgaccaacaccagcgcctactacatgtacttgttgctgctgctgaagtccgtggtgtacttcgccatcatcacatgctgcctgctgatggctatggtcaagcggaaggacagccggggaagggccaagcgatctggatctggagcaacaaacttctcactactcaaacaagcaggtgacgtggaggagaatcccgggcctactagcatggccttaccagtgaccgccttgctcctgccgctggccttgctgctccacgccgccaggccgatgggcagctgggaagagttcgagctgagactgaacgccatcgaggaacggctgtatgccctcggaggatctgaagccgagctggcctacttcgagtacgtgatcgccgacttcgagggcaacctgcagcggtacaaaggcaagggcaaccctgaagtggaagccctgtacttcgaggccgacgccatcttcgaggaactggtggcctacagacacaacggtaccggcggaggcggatctggcggcggaggtagcggtggcggaggatctgaattcgacatccagatgacacagagccctagcagcctgtctgccagcgtgggagacagagtgaccatcacatgcaaggccagcgaccacatcaacaactggctggcctggtatcagcagaagcctggacaggcccctaagctgctgatctacggcgctaccacactggaaacaggcgtgcccagcagattttctggcagcggctctggcaccgactacaccctgacaatatccagcctccagcctgaggacttcgccacctactactgtcagcagagctggaacaccccttggacattcggccagggcaccaagctggaaatcaagagaggcggaggcggaagtggaggcggaggatctggcggcggaggctctcaagttcagcttcaacagcctggcgctgagctggtcaaacctggcgcttctgtgaagatgagctgcaaagccagcggctacgccttcagcagctactggatcaactggatgaagcagaaacccggccagggactcgaatggatcggccaaatctatcccggcgacggcgacaccaactacaacggcaagttcaagggcagagccacactgaccgccgatacctctagcagcacagcctacatgcagctgagcagcctgaccagcgaagatagcgccgtgtacttctgtgcccggtccatcacaacagtcgtgggctgcgctatggactattggggccagggaacaagcgtgaccgtgtctagtacgcgtatccagaaccctgatcctgccgtgtaccagctgcgggatagcaagagcagcgacaagagcgtgtgtctgttcaccgacttcgacagccagaccaacgtgtcccagagcaaggactccgacgtgtacatcaccgataagaccgtgctggacatgcggagcatggacttcaagagcaactccgccgtggcctggtccaacaagtccgatttcgcctgcgccaacgccttcaacaacagcattatccccgaggacacattcttcccaagccccgagagcagcgactccaccgaccacgtgaagcccaaagagacagagaacaccaagcagcccagcaagagctgccacaagcccaaggccatcgtgcacaccgagaaagtgaacatgatgagcctgaccgtgctgggcctgcggatgctgttcgccaaaaccgtggccgtgaacttcctgctgaccgccaagctgttcttcctcctcaccgcc

SEQ ID NO: 17581 - DNA, 2922 bp, synthetic construct; identical to SEQ ID NO: 8304
  source 1..2922: mol_type = other DNA

SEQ ID NO: 17582 - DNA, 2925 bp, synthetic construct; identical to SEQ ID NO: 8305
  source 1..2925: mol_type = other DNA

SEQ ID NO: 17583 - DNA, 2928 bp, synthetic construct; identical to SEQ ID NO: 8306
  source 1..2928: mol_type = other DNA

SEQ ID NO: 17584 - DNA, 2916 bp, synthetic construct; identical to SEQ ID NO: 8307
  source 1..2916: mol_type = other DNA

SEQ ID NO: 17585 - DNA, 2928 bp, synthetic construct; identical to SEQ ID NO: 8308
  source 1..2928: mol_type = other DNA

SEQ ID NO: 17586 - DNA, 2934 bp, synthetic construct; identical to SEQ ID NO: 8309
  source 1..2934: mol_type = other DNA

SEQ ID NO: 17587 - DNA, 2928 bp, synthetic construct; identical to SEQ ID NO: 8310
  source 1..2928: mol_type = other DNA

SEQ ID NO: 17588 - DNA, 2922 bp, synthetic construct; identical to SEQ ID NO: 8311
  source 1..2922: mol_type = other DNA

SEQ ID NO: 17589 - DNA, 2559 bp, synthetic construct; identical to SEQ ID NO: 8312
  source 1..2559: mol_type = other DNA

SEQ ID NO: 17590 - DNA, 2559 bp, synthetic construct; identical to SEQ ID NO: 8312
  source 1..2559: mol_type = other DNA

SEQ ID NO: 17591 - DNA, 3354 bp, synthetic construct; identical to SEQ ID NO: 8314
  source 1..3354: mol_type = other DNA

SEQ ID NO: 17592 - DNA, 3741 bp, synthetic construct; identical to SEQ ID NO: 8315
  source 1..3741: mol_type = other DNA

SEQ ID NO: 17593 - DNA, 3735 bp, synthetic construct
  source 1..3735: mol_type = other DNA
atggccttaccagtgaccgccttgctcctgccgctggccttgctgctccacgccgccaggccgctcgagatccagaaccctgatcctgccgtgtaccagctgcgggatagcaagagcagcgacaagagcgtgtgtctgttcaccgacttcgacagccagaccaacgtgtcccagagcaaggactccgacgtgtacatcaccgataagaccgtgctggacatgcggagcatggacttcaagagcaactccgccgtggcctggtccaacaagtccgatttcgcctgcgccaacgccttcaacaacagcattatccccgaggacacattcttcccaagccccgagagcagcgactccaccgaccacgtgaagcccaaagagacagagaacaccaagcagcccagcaagagctgccacaagcccaaggccatcgtgcacaccgagaaagtgaacatgatgagcctgaccgtgctgggcctgcggatgctgttcgccaaaaccgtggccgtgaacttcctgctgaccgccaagctgttcttcctcctcaccgccagggccaagcgatctggatctggagcaacaaacttctcactactcaaacaagcaggtgacgtggaggagaatcccgggcctactagcatggccttaccagtgaccgccttgctcctgccgctggccttgctgctccacgccgccaggccgggcgtgacacagagccccacacacctgattaagaccagaggccagcaggccacactgagatgcagccctatcagcggccacaccagcgtgtactggtatcagcaggctctcggactgggcctccagttcctgctttggtacgacgagggcgaagagagaaaccggggcaacttccctcctcggttttccggcagacagttccccaactacagcagcgagctgaacgtgaacgccctggaactggaagatagcgccctgtacctgtgtgcctcttctcttggtggacctcgcggactggctggactgagaggggatgagcagtttttcggccctggcaccagactgaccgtgctggaaggcggaggaagcggcggaggatctcaggtccagctcgtcgagtccggcggcggcctcgtccaggccggcgactccgtcaccctctcctgcaccgcctccggccgcaccttctcctcctacgccctcgcctggttccgccagcgccccggcaaggagcgcgagttcgtcgccggcctccgctggggcggccccaccaactacgccgactccgtcaaggaccgcttcaccatctccggcgactccgccaagcacaccatgtacctccagatgaactccctcaagcccgaggacaccgccgtctactactgcggctacaaccccggcggctgggccgtcccctcccagtacgagtacgactcctggggccagggcacccaggtcaccgtctcctccggtaccggcggaggcggatctggcggcggaggtagcggtggcggaggatctgaattcgacatccagatgacacagagccctagcagcctgtctgccagcgtgggagacagagtgaccatcacatgcaaggccagcgaccacatcaacaactggctggcctggtatcagcagaagcctggacaggcccctaagctgctgatctacggcgctaccacactggaaacaggcgtgcccagcagattttctggcagcggctctggcaccgactacaccctgacaatatccagcctccagcctgaggacttcgccacctactactgtcagcagagctggaacaccccttggacattcggccagggcaccaagctggaaatcaagagaggcggaggcggaagtggaggcggaggatctggcggcggaggctctcaagttcagcttcaacagcctggcgctgagctggtcaaacctggcgcttctgtgaagatgagctgcaaagccagcggctacgccttcagcagctactggatcaactggatgaagcagaaacccggccagggactcgaatggatcggccaaatctatcccggcgacggcgacaccaactacaacggcaagttcaagggcagagccacactgaccgccgatacctctagcagcacagcctacatgcagctgagcagcctgaccagcgaagatagcgccgtgtacttctgtgcccggtccatcacaacagtcgtgggctgcgctatggactattggggccagggaacaagcgtgaccgtgtctagtacgcgtgaggacctgaagaacgtgttcccacctgaggtggccgtgttcgagcctagcgaggccgagatcagccacacccagaaagccaccctcgtgtgcctggctaccggcttctaccccgaccatgtggaactgtcttggtgggtcaacggcaaagaggtgcacagcggcgtgtctaccgacccccagccactgaaagaacagcccgccctgaacgacagccggtactgcctgagcagcagactgagagtgtccgccaccttctggcagaacccccggaaccacttcagatgccaggtgcagttctacggcctgagcgagaacgacgagtggacccaggacagagccaagcccgtgacccagatcgtgtctgccgaagcctggggcagagccgatgatgtgattaagatccactggcaggaaaagaagtccaacaccatcctgggcagccaggaaggcaacaccatgaagaccaacgacacctacatgaagttcagctggctgaccgtgcccgagaagtccctggacaaagaacacagatgcatcgtgcggcacgaaaacaacaagaacggcgtggaccaggaaatcatcttcccacccatcaagaccgatgtgattacaatggaccccaaggacaactgctccaaggacgccaacgataccctgctgctccagctgaccaacaccagcgcctactacatgtacttgttgctgctgctgaagtccgtggtgtacttcgccatcatcacatgctgcctgctgatggctatggtcaagcggaaggacagccggggacgcgccaagagaagcggatctggcgtgaagcagaccctgaatttcgacctgctgaagctggctggcgacgtggaatccaacccaggcccttctagaggccatatgaccgagtacaagcccacggtgcgcctcgccacccgcgacgacgtccccagggccgtacgcaccctcgccgccgcgttcgccgactaccccgccacgcgccacaccgtcgatccggaccgccacatcgagcgggtcaccgagctgcaagaactcttcctcacgcgcgtcgggctcgacatcggcaaggtgtgggtcgcggacgacggcgccgcggtggcggtctggaccacgccggagagcgtcgaagcgggggcggtgttcgccgagatcggcccgcgcatggccgagttgagcggttcccggctggccgcgcagcaacagatggaaggcctcctggcgccgcaccggcccaaggagcccgcgtggttcctggccaccgtcggcgtctcgcccgaccaccagggcaagggtctgggcagcgccgtcgtgctccccggagtggaggcggccgagcgcgccggggtgcccgccttcctggagacctccgcgccccgcaacctccccttctacgagcggctcggcttcaccgtcaccgccgacgtcgaggtgcccgaaggaccgcgcacctggtgcatgacccgcaagcccggtgcctga

SEQ ID NO: 17594 - DNA, 3015 bp, synthetic construct
  source 1..3015: mol_type = other DNA
atggccttaccagtgaccgccttgctcctgccgctggccttgctgctccacgccgccaggccgctcgagatccagaaccctgatcctgccgtgtaccagctgcgggatagcaagagcagcgacaagagcgtgtgtctgttcaccgacttcgacagccagaccaacgtgtcccagagcaaggactccgacgtgtacatcaccgataagaccgtgctggacatgcggagcatggacttcaagagcaactccgccgtggcctggtccaacaagtccgatttcgcctgcgccaacgccttcaacaacagcattatccccgaggacacattcttcccaagccccgagagcagcgactccaccgaccacgtgaagcccaaagagacagagaacaccaagcagcccagcaagagctgccacaagcccaaggccatcgtgcacaccgagaaagtgaacatgatgagcctgaccgtgctgggcctgcggatgctgttcgccaaaaccgtggccgtgaacttcctgctgaccgccaagctgttcttcctcctcaccgccagggccaagcgatctggatctggagcaacaaacttctcactactcaaacaagcaggtgacgtggaggagaatcccgggcctactagcatggccttaccagtgaccgccttgctcctgccgctggccttgctgctccacgccgccaggccgggcgtgacacagagccccacacacctgattaagaccagaggccagcaggccacactgagatgcagccctatcagcggccacaccagcgtgtactggtatcagcaggctctcggactgggcctccagttcctgctttggtacgacgagggcgaagagagaaaccggggcaacttccctcctcggttttccggcagacagttccccaactacagcagcgagctgaacgtgaacgccctggaactggaagatagcgccctgtacctgtgtgcctcttctcttggtggacctcgcggactggctggactgagaggggatgagcagtttttcggccctggcaccagactgaccgtgctggaaggcggaggaagcggcggaggatctggcgtgacacagagccccacacacctgattaagaccagaggccagcaggccacactgagatgcagccctatcagcggccacaccagcgtgtactggtatcagcaggctctcggactgggcctccagttcctgctttggtacgacgagggcgaagagagaaaccggggcaacttccctcctcggttttccggcagacagttccccaactacagcagcgagctgaacgtgaacgccctggaactggaagatagcgccctgtacctgtgtgccagctctctcggcggagatgaactgggagccgatggcaacgagcagttctttggccctggcaccagactgaccgtgctggaaggtaccggcggaggcggatctggcggcggaggtagcggtggcggaggatctgaattcgacatccagatgacacagagccctagcagcctgtctgccagcgtgggagacagagtgaccatcacatgcaaggccagcgaccacatcaacaactggctggcctggtatcagcagaagcctggacaggcccctaagctgctgatctacggcgctaccacactggaaacaggcgtgcccagcagattttctggcagcggctctggcaccgactacaccctgacaatatccagcctccagcctgaggacttcgccacctactactgtcagcagagctggaacaccccttggacattcggccagggcaccaagctggaaatcaagagaggcggaggcggaagtggaggcggaggatctggcggcggaggctctcaagttcagcttcaacagcctggcgctgagctggtcaaacctggcgcttctgtgaagatgagctgcaaagccagcggctacgccttcagcagctactggatcaactggatgaagcagaaacccggccagggactcgaatggatcggccaaatctatcccggcgacggcgacaccaactacaacggcaagttcaagggcagagccacactgaccgccgatacctctagcagcacagcctacatgcagctgagcagcctgaccagcgaagatagcgccgtgtacttctgtgcccggtccatcacaacagtcgtgggctgcgctatggactattggggccagggaacaagcgtgaccgtgtctagtacgcgtgaggacctgaagaacgtgttcccacctgaggtggccgtgttcgagcctagcgaggccgagatcagccacacccagaaagccaccctcgtgtgcctggctaccggcttctaccccgaccatgtggaactgtcttggtgggtcaacggcaaagaggtgcacagcggcgtgtctaccgacccccagccactgaaagaacagcccgccctgaacgacagccggtactgcctgagcagcagactgagagtgtccgccaccttctggcagaacccccggaaccacttcagatgccaggtgcagttctacggcctgagcgagaacgacgagtggacccaggacagagccaagcccgtgacccagatcgtgtctgccgaagcctggggcagagccgatgatgtgattaagatccactggcaggaaaagaagtccaacaccatcctgggcagccaggaaggcaacaccatgaagaccaacgacacctacatgaagttcagctggctgaccgtgcccgagaagtccctggacaaagaacacagatgcatcgtgcggcacgaaaacaacaagaacggcgtggaccaggaaatcatcttcccacccatcaagaccgatgtgattacaatggaccccaaggacaactgctccaaggacgccaacgataccctgctgctccagctgaccaacaccagcgcctactacatgtacttgttgctgctgctgaagtccgtggtgtacttcgccatcatcacatgctgcctgctgatggctatggtcaagcggaaggacagccgggga

SEQ ID NO: 17595 - DNA, 2577 bp, synthetic construct; identical to SEQ ID NO: 8317
  source 1..2577: mol_type = other DNA

SEQ ID NO: 17596 - DNA, 2364 bp, synthetic construct; identical to SEQ ID NO: 8318
  source 1..2364: mol_type = other DNA

SEQ ID NO: 17597 - DNA, 3030 bp, synthetic construct; identical to SEQ ID NO: 8319
  source 1..3030: mol_type = other DNA

SEQ ID NO: 17598 - DNA, 2772 bp, synthetic construct; identical to SEQ ID NO: 8320
  source 1..2772: mol_type = other DNA

SEQ ID NO: 17599 - DNA, 1653 bp, synthetic construct
  source 1..1653: mol_type = other DNA
atggccttaccagtgaccgccttgctcctgccgctggccttgctgctccacgccgccaggccgctcgagatccagaaccctgatcctgccgtgtaccagctgcgggatagcaagagcagcgacaagagcgtgtgtctgttcaccgacttcgacagccagaccaacgtgtcccagagcaaggactccgacgtgtacatcaccgataagaccgtgctggacatgcggagcatggacttcaagagcaactccgccgtggcctggtccaacaagtccgatttcgcctgcgccaacgccttcaacaacagcattatccccgaggacacattcttcccaagccccgagagcagcgactccaccgaccacgtgaagcccaaagagacagagaacaccaagcagcccagcaagagctgccacaagcccaaggccatcgtgcacaccgagaaagtgaacatgatgagcctgaccgtgctgggcctgcggatgctgttcgccaaaaccgtggccgtgaacttcctgctgaccgccaagctgttcttcctcctcaccgccagggccaagcgatctggatctggagcaacaaacttctcactactcaaacaagcaggtgacgtggaggagaatcccgggcctactagcgccaccatggccttaccagtgaccgccttgctcctgccgctggccttgctgctccacgccgccaggccgatggaccccgacctggaaatcagagccgccttcctgcggcagagaaacacagccctgagaacagaggtggccgagctggaacaagaggtgcagcggctggaaaacgaggtgtcccagtacgagacaagatacggccctctcggaggcggaaaaacgcgtgaggacctgaagaacgtgttcccacctgaggtggccgtgttcgagcctagcgaggccgagatcagccacacccagaaagccaccctcgtgtgcctggctaccggcttctaccccgaccatgtggaactgtcttggtgggtcaacggcaaagaggtgcacagcggcgtgtctaccgacccccagccactgaaagaacagcccgccctgaacgacagccggtactgcctgagcagcagactgagagtgtccgccaccttctggcagaacccccggaaccacttcagatgccaggtgcagttctacggcctgagcgagaacgacgagtggacccaggacagagccaagcccgtgacccagatcgtgtctgccgaagcctggggcagagccgatgatgtgattaagatccactggcaggaaaagaagtccaacaccatcctgggcagccaggaaggcaacaccatgaagaccaacgacacctacatgaagttcagctggctgaccgtgcccgagaagtccctggacaaagaacacagatgcatcgtgcggcacgaaaacaacaagaacggcgtggaccaggaaatcatcttcccacccatcaagaccgatgtgattacaatggaccccaaggacaactgctccaaggacgccaacgataccctgctgctccagctgaccaacaccagcgcctactacatgtacttgttgctgctgctgaagtccgtggtgtacttcgccatcatcacatgctgcctgctgatggctatggtcaagcggaaggacagccgggga

SEQ ID NO: 17600 - DNA, 1653 bp, synthetic construct
  source 1..1653: mol_type = other DNA
atggccttaccagtgaccgccttgctcctgccgctggccttgctgctccacgccgccaggccgctcgagatccagaaccctgatcctgccgtgtaccagctgcgggatagcaagagcagcgacaagagcgtgtgtctgttcaccgacttcgacagccagaccaacgtgtcccagagcaaggactccgacgtgtacatcaccgataagaccgtgctggacatgcggagcatggacttcaagagcaactccgccgtggcctggtccaacaagtccgatttcgcctgcgccaacgccttcaacaacagcattatccccgaggacacattcttcccaagccccgagagcagcgactccaccgaccacgtgaagcccaaagagacagagaacaccaagcagcccagcaagagctgccacaagcccaaggccatcgtgcacaccgagaaagtgaacatgatgagcctgaccgtgctgggcctgcggatgctgttcgccaaaaccgtggccgtgaacttcctgctgaccgccaagctgttcttcctcctcaccgccagggccaagcgatctggatctggagcaacaaacttctcactactcaaacaagcaggtgacgtggaggagaatcccgggcctactagcgccaccatggccttaccagtgaccgccttgctcctgccgctggccttgctgctccacgccgccaggccgatggaccctgatctcgaaattgaggccgcctttctggaacgcgagaacactgccctggaaaccagggtcgcagagctgagacagagagtgcagagactgcggaacagagtgtctcagtaccgcaccagatatggcccactcggcggaggtaaaacgcgtgaggacctgaagaacgtgttcccacctgaggtggccgtgttcgagcctagcgaggccgagatcagccacacccagaaagccaccctcgtgtgcctggctaccggcttctaccccgaccatgtggaactgtcttggtgggtcaacggcaaagaggtgcacagcggcgtgtctaccgacccccagccactgaaagaacagcccgccctgaacgacagccggtactgcctgagcagcagactgagagtgtccgccaccttctggcagaacccccggaaccacttcagatgccaggtgcagttctacggcctgagcgagaacgacgagtggacccaggacagagccaagcccgtgacccagatcgtgtctgccgaagcctggggcagagccgatgatgtgattaagatccactggcaggaaaagaagtccaacaccatcctgggcagccaggaaggcaacaccatgaagaccaacgacacctacatgaagttcagctggctgaccgtgcccgagaagtccctggacaaagaacacagatgcatcgtgcggcacgaaaacaacaagaacggcgtggaccaggaaatcatcttcccacccatcaagaccgatgtgattacaatggaccccaaggacaactgctccaaggacgccaacgataccctgctgctccagctgaccaacaccagcgcctactacatgtacttgttgctgctgctgaagtccgtggtgtacttcgccatcatcacatgctgcctgctgatggctatggtcaagcggaaggacagccgggga

SEQ ID NO: 17601 - DNA, 2358 bp, synthetic construct
  source 1..2358: mol_type = other DNA
atggccttaccagtgaccgccttgctcctgccgctggccttgctgctccacgccgccaggccgctcgagatccagaaccctgatcctgccgtgtaccagctgcgggatagcaagagcagcgacaagagcgtgtgtctgttcaccgacttcgacagccagaccaacgtgtcccagagcaaggactccgacgtgtacatcaccgataagaccgtgctggacatgcggagcatggacttcaagagcaactccgccgtggcctggtccaacaagtccgatttcgcctgcgccaacgccttcaacaacagcattatccccgaggacacattcttcccaagccccgagagcagcgactccaccgaccacgtgaagcccaaagagacagagaacaccaagcagcccagcaagagctgccacaagcccaaggccatcgtgcacaccgagaaagtgaacatgatgagcctgaccgtgctgggcctgcggatgctgttcgccaaaaccgtggccgtgaacttcctgctgaccgccaagctgttcttcctcctcaccgccagggccaagcgatctggatctggagcaacaaacttctcactactcaaacaagcaggtgacgtggaggagaatcccgggcctactagcgccaccatggccttaccagtgaccgccttgctcctgccgctggccttgctgctccacgccgccaggccgctgttcaatcaagaggtgcagatccctctgaccgagagctactgtggcccctgtcctaagaactggatctgctacaagaacaactgctaccagttcttcgacgagagcaagaattggtacgagagccaggccagctgcatgagccagaatgccagcctgctgaaggtgtacagcaaagaggaccaggacctgctgaaactggtcaagagcgcccactggatgggccttgtgcacatccccaccaatggctcttggcagtgggaggacggcagcattctgagccctaacctgctgaccatcatcgagatgcagaagggcgactgcgccctgtacgccagcagctttaagggctacatcgagaattgcagcaccccgaacacctacatctgtatgcagagaaccgtttctggcggaggcggctctggaggaggcggaagtggcggcggaggcgacctctttaatcaagaagtccagattccactcaccgaatcctactgcggaccttgtccaaaaaattggatttgttataagaacaactgttatcaattctttgatgagtctaaaaattggtatgagtcccaggcttcctgcatgtctcagaacgcttctctgctgaaagtctactctaaagaagatcaggatctcctgaagctcgtcaagtctgcccattggatggggctcgtccacattcctaccaacggaagctggcaatgggaagatggctccatcctgtctccaaatctgctcacgattattgaaatgcagaaaggggattgtgctctctacgccagctccttcaagggatatattgagaactgtagcacgcccaatacttatatctgtatgcaacggaccgtgacgcgtgaggacctgaagaacgtgttcccacctgaggtggccgtgttcgagcctagcgaggccgagatcagccacacccagaaagccaccctcgtgtgcctggctaccggcttctaccccgaccatgtggaactgtcttggtgggtcaacggcaaagaggtgcacagcggcgtgtctaccgacccccagccactgaaagaacagcccgccctgaacgacagccggtactgcctgagcagcagactgagagtgtccgccaccttctggcagaacccccggaaccacttcagatgccaggtgcagttctacggcctgagcgagaacgacgagtggacccaggacagagccaagcccgtgacccagatcgtgtctgccgaagcctggggcagagccgatgatgtgattaagatccactggcaggaaaagaagtccaacaccatcctgggcagccaggaaggcaacaccatgaagaccaacgacacctacatgaagttcagctggctgaccgtgcccgagaagtccctggacaaagaacacagatgcatcgtgcggcacgaaaacaacaagaacggcgtggaccaggaaatcatcttcccacccatcaagaccgatgtgattacaatggaccccaaggacaactgctccaaggacgccaacgataccctgctgctccagctgaccaacaccagcgcctactacatgtacttgttgctgctgctgaagtccgtggtgtacttcgccatcatcacatgctgcctgctgatggctatggtcaagcggaaggacagccgggga

SEQ ID NO: 17602 - DNA, 2358 bp, synthetic construct
  source 1..2358: mol_type = other DNA
atggccttaccagtgaccgccttgctcctgccgctggccttgctgctccacgccgccaggccgctcgagatccagaaccctgatcctgccgtgtaccagctgcgggatagcaagagcagcgacaagagcgtgtgtctgttcaccgacttcgacagccagaccaacgtgtcccagagcaaggactccgacgtgtacatcaccgataagaccgtgctggacatgcggagcatggacttcaagagcaactccgccgtggcctggtccaacaagtccgatttcgcctgcgccaacgccttcaacaacagcattatccccgaggacacattcttcccaagccccgagagcagcgactccaccgaccacgtgaagcccaaagagacagagaacaccaagcagcccagcaagagctgccacaagcccaaggccatcgtgcacaccgagaaagtgaacatgatgagcctgaccgtgctgggcctgcggatgctgttcgccaaaaccgtggccgtgaacttcctgctgaccgccaagctgttcttcctcctcaccgccagggccaagcgatctggatctggagcaacaaacttctcactactcaaacaagcaggtgacgtggaggagaatcccgggcctactagcgccaccatggccttaccagtgaccgccttgctcctgccgctggccttgctgctccacgccgccaggccgctgttcaatcaagaggtgcagatccctctgaccgagagctactgtggcccctgtcctaagaactggatctgctacaagaacaactgctaccagttcttcgacgagagcaagaattggtacgagagccaggccagctgcatgagccagaatgccagcctgctgaaggtgtacagcaaagaggaccaggacctgctgaaactggtcaagagcgcccactggatgggccttgtgcacatccccaccaatggctcttggcagtgggaggacggcagcattctgagccctaacctgctgaccatcatcgagatgcagaagggcgactgcgccctgtacgccagcagctttaagggcttcatcgagaattgcagcaccccgaacacctacatctgtatgcagagaaccgttggcggaggcggaagtggaggcggaggatctggcggcggaggctctgacctctttaatcaagaagtccagattccactcaccgaatcctactgcggaccttgtccaaaaaattggatttgttataagaacaactgttatcaattctttgatgagtctaaaaattggtatgagtcccaggcttcctgcatgtctcagaacgcttctctgctgaaagtctactctaaagaagatcaggatctcctgaagctcgtcaagtctgcccattggatggggctcgtccacattcctaccaacggaagctggcaatgggaagatggctccatcctgtctccaaatctgctcacgattattgaaatgcagaaaggggattgtgctctctacgccagctccttcaagggatttattgagaactgtagcacgcccaatacttatatctgtatgcaacggaccgtgacgcgtgaggacctgaagaacgtgttcccacctgaggtggccgtgttcgagcctagcgaggccgagatcagccacacccagaaagccaccctcgtgtgcctggctaccggcttctaccccgaccatgtggaactgtcttggtgggtcaacggcaaagaggtgcacagcggcgtgtctaccgacccccagccactgaaagaacagcccgccctgaacgacagccggtactgcctgagcagcagactgagagtgtccgccaccttctggcagaacccccggaaccacttcagatgccaggtgcagttctacggcctgagcgagaacgacgagtggacccaggacagagccaagcccgtgacccagatcgtgtctgccgaagcctggggcagagccgatgatgtgattaagatccactggcaggaaaagaagtccaacaccatcctgggcagccaggaaggcaacaccatgaagaccaacgacacctacatgaagttcagctggctgaccgtgcccgagaagtccctggacaaagaacacagatgcatcgtgcggcacgaaaacaacaagaacggcgtggaccaggaaatcatcttcccacccatcaagaccgatgtgattacaatggaccccaaggacaactgctccaaggacgccaacgataccctgctgctccagctgaccaacaccagcgcctactacatgtacttgttgctgctgctgaagtccgtggtgtacttcgccatcatcacatgctgcctgctgatggctatggtcaagcggaaggacagccgggga

SEQ ID NO: 17603 - DNA, 2436 bp, synthetic construct
  source 1..2436: mol_type = other DNA
atggccttaccagtgaccgccttgctcctgccgctggccttgctgctccacgccgccaggccgctcgagatccagaaccctgatcctgccgtgtaccagctgcgggatagcaagagcagcgacaagagcgtgtgtctgttcaccgacttcgacagccagaccaacgtgtcccagagcaaggactccgacgtgtacatcaccgataagaccgtgctggacatgcggagcatggacttcaagagcaactccgccgtggcctggtccaacaagtccgatttcgcctgcgccaacgccttcaacaacagcattatccccgaggacacattcttcccaagccccgagagcagcgactccaccgaccacgtgaagcccaaagagacagagaacaccaagcagcccagcaagagctgccacaagcccaaggccatcgtgcacaccgagaaagtgaacatgatgagcctgaccgtgctgggcctgcggatgctgttcgccaaaaccgtggccgtgaacttcctgctgaccgccaagctgttcttcctcctcaccgccagggccaagcgatctggatctggagcaacaaacttctcactactcaaacaagcaggtgacgtggaggagaatcccgggcctactagcatggccttaccagtgaccgccttgctcctgccgctggccttgctgctccacgccgccaggccgatggaccccgacctggaaatcagagccgccttcctgcggcagagaaacacagccctgagaacagaggtggccgagctggaacaagaggtgcagcggctggaaaacgaggtgtcccagtacgagacaagatacggccctctcggaggcggaaaaggtaccggcggaggcggatctggcggcggaggtagcggtggcggaggatctgaattcgacatccagatgacacagagccctagcagcctgtctgccagcgtgggagacagagtgaccatcacatgcaaggccagcgaccacatcaacaactggctggcctggtatcagcagaagcctggacaggcccctaagctgctgatctacggcgctaccacactggaaacaggcgtgcccagcagattttctggcagcggctctggcaccgactacaccctgacaatatccagcctccagcctgaggacttcgccacctactactgtcagcagagctggaacaccccttggacattcggccagggcaccaagctggaaatcaagagaggcggaggcggaagtggaggcggaggatctggcggcggaggctctcaagttcagcttcaacagcctggcgctgagctggtcaaacctggcgcttctgtgaagatgagctgcaaagccagcggctacgccttcagcagctactggatcaactggatgaagcagaaacccggccagggactcgaatggatcggccaaatctatcccggcgacggcgacaccaactacaacggcaagttcaagggcagagccacactgaccgccgatacctctagcagcacagcctacatgcagctgagcagcctgaccagcgaagatagcgccgtgtacttctgtgcccggtccatcacaacagtcgtgggctgcgctatggactattggggccagggaacaagcgtgaccgtgtctagtacgcgtgaggacctgaagaacgtgttcccacctgaggtggccgtgttcgagcctagcgaggccgagatcagccacacccagaaagccaccctcgtgtgcctggctaccggcttctaccccgaccatgtggaactgtcttggtgggtcaacggcaaagaggtgcacagcggcgtgtctaccgacccccagccactgaaagaacagcccgccctgaacgacagccggtactgcctgagcagcagactgagagtgtccgccaccttctggcagaacccccggaaccacttcagatgccaggtgcagttctacggcctgagcgagaacgacgagtggacccaggacagagccaagcccgtgacccagatcgtgtctgccgaagcctggggcagagccgatgatgtgattaagatccactggcaggaaaagaagtccaacaccatcctgggcagccaggaaggcaacaccatgaagaccaacgacacctacatgaagttcagctggctgaccgtgcccgagaagtccctggacaaagaacacagatgcatcgtgcggcacgaaaacaacaagaacggcgtggaccaggaaatcatcttcccacccatcaagaccgatgtgattacaatggaccccaaggacaactgctccaaggacgccaacgataccctgctgctccagctgaccaacaccagcgcctactacatgtacttgttgctgctgctgaagtccgtggtgtacttcgccatcatcacatgctgcctgctgatggctatggtcaagcggaaggacagccgggga

SEQ ID NO: 17604 - DNA, 3141 bp, synthetic construct
  source 1..3141: mol_type = other DNA
atggccttaccagtgaccgccttgctcctgccgctggccttgctgctccacgccgccaggccgctcgagatccagaaccctgatcctgccgtgtaccagctgcgggatagcaagagcagcgacaagagcgtgtgtctgttcaccgacttcgacagccagaccaacgtgtcccagagcaaggactccgacgtgtacatcaccgataagaccgtgctggacatgcggagcatggacttcaagagcaactccgccgtggcctggtccaacaagtccgatttcgcctgcgccaacgccttcaacaacagcattatccccgaggacacattcttcccaagccccgagagcagcgactccaccgaccacgtgaagcccaaagagacagagaacaccaagcagcccagcaagagctgccacaagcccaaggccatcgtgcacaccgagaaagtgaacatgatgagcctgaccgtgctgggcctgcggatgctgttcgccaaaaccgtggccgtgaacttcctgctgaccgccaagctgttcttcctcctcaccgccagggccaagcgatctggatctggagcaacaaacttctcactactcaaacaagcaggtgacgtggaggagaatcccgggcctactagcatggccttaccagtgaccgccttgctcctgccgctggccttgctgctccacgccgccaggccgctgttcaatcaagaggtgcagatccctctgaccgagagctactgtggcccctgtcctaagaactggatctgctacaagaacaactgctaccagttcttcgacgagagcaagaattggtacgagagccaggccagctgcatgagccagaatgccagcctgctgaaggtgtacagcaaagaggaccaggacctgctgaaactggtcaagagcgcccactggatgggccttgtgcacatccccaccaatggctcttggcagtgggaggacggcagcattctgagccctaacctgctgaccatcatcgagatgcagaagggcgactgcgccctgtacgccagcagctttaagggcttcatcgagaattgcagcaccccgaacacctacatctgtatgcagagaaccgttggcggaggcggaagtggaggcggaggatctggcggcggaggctctgacctctttaatcaagaagtccagattccactcaccgaatcctactgcggaccttgtccaaaaaattggatttgttataagaacaactgttatcaattctttgatgagtctaaaaattggtatgagtcccaggcttcctgcatgtctcagaacgcttctctgctgaaagtctactctaaagaagatcaggatctcctgaagctcgtcaagtctgcccattggatggggctcgtccacattcctaccaacggaagctggcaatgggaagatggctccatcctgtctccaaatctgctcacgattattgaaatgcagaaaggggattgtgctctctacgccagctccttcaagggatttattgagaactgtagcacgcccaatacttatatctgtatgcaacggaccgtgggtaccggcggaggcggatctggcggcggaggtagcggtggcggaggatctgaattcgacatccagatgacacagagccctagcagcctgtctgccagcgtgggagacagagtgaccatcacatgcaaggccagcgaccacatcaacaactggctggcctggtatcagcagaagcctggacaggcccctaagctgctgatctacggcgctaccacactggaaacaggcgtgcccagcagattttctggcagcggctctggcaccgactacaccctgacaatatccagcctccagcctgaggacttcgccacctactactgtcagcagagctggaacaccccttggacattcggccagggcaccaagctggaaatcaagagaggcggaggcggaagtggaggcggaggatctggcggcggaggctctcaagttcagcttcaacagcctggcgctgagctggtcaaacctggcgcttctgtgaagatgagctgcaaagccagcggctacgccttcagcagctactggatcaactggatgaagcagaaacccggccagggactcgaatggatcggccaaatctatcccggcgacggcgacaccaactacaacggcaagttcaagggcagagccacactgaccgccgatacctctagcagcacagcctacatgcagctgagcagcctgaccagcgaagatagcgccgtgtacttctgtgcccggtccatcacaacagtcgtgggctgcgctatggactattggggccagggaacaagcgtgaccgtgtctagtacgcgtgaggacctgaagaacgtgttcccacctgaggtggccgtgttcgagcctagcgaggccgagatcagccacacccagaaagccaccctcgtgtgcctggctaccggcttctaccccgaccatgtggaactgtcttggtgggtcaacggcaaagaggtgcacagcggcgtgtctaccgacccccagccactgaaagaacagcccgccctgaacgacagccggtactgcctgagcagcagactgagagtgtccgccaccttctggcagaacccccggaaccacttcagatgccaggtgcagttctacggcctgagcgagaacgacgagtggacccaggacagagccaagcccgtgacccagatcgtgtctgccgaagcctggggcagagccgatgatgtgattaagatccactggcaggaaaagaagtccaacaccatcctgggcagccaggaaggcaacaccatgaagaccaacgacacctacatgaagttcagctggctgaccgtgcccgagaagtccctggacaaagaacacagatgcatcgtgcggcacgaaaacaacaagaacggcgtggaccaggaaatcatcttcccacccatcaagaccgatgtgattacaatggaccccaaggacaactgctccaaggacgccaacgataccctgctgctccagctgaccaacaccagcgcctactacatgtacttgttgctgctgctgaagtccgtggtgtacttcgccatcatcacatgctgcctgctgatggctatggtcaagcggaaggacagccgggga

SEQ ID NO: 17605 - DNA, 2256 bp, synthetic construct
  source 1..2256: mol_type = other DNA
atggccttaccagtgaccgccttgctcctgccgctggccttgctgctccacgccgccaggccgctcgagatccagaaccctgatcctgccgtgtaccagctgcgggatagcaagagcagcgacaagagcgtgtgtctgttcaccgacttcgacagccagaccaacgtgtcccagagcaaggactccgacgtgtacatcaccgataagaccgtgctggacatgcggagcatggacttcaagagcaactccgccgtggcctggtccaacaagtccgatttcgcctgcgccaacgccttcaacaacagcattatccccgaggacacattcttcccaagccccgagagcagcgactccaccgaccacgtgaagcccaaagagacagagaacaccaagcagcccagcaagagctgccacaagcccaaggccatcgtgcacaccgagaaagtgaacatgatgagcctgaccgtgctgggcctgcggatgctgttcgccaaaaccgtggccgtgaacttcctgctgaccgccaagctgttcttcctcctcaccgccagggccaagcgatctggatctggagcaacaaacttctcactactcaaacaagcaggtgacgtggaggagaatcccgggcctactagcatggccttaccagtgaccgccttgctcctgccgctggccttgctgctccacgccgccaggccgcagtctgtgctgacacagcctcctagtgtgtctggcgctcctggacagagagtgaccatctcttgtaccggcagcagcagcaatatcggagccggctatgacgtgcactggtatcagcagctccctggcacagcccctaaactgctgatcttcggcaacagcaacagacccagcggcgtgcccgatagattcagcggctttaagagcggcacaagcgccagcctggctatcactggactgcaagccgaggacgaggccgactacttctgccagagctacgatagcagcctgagcggcagcggagtgtttggcacaggcaccaaagtgacagtgcttggcggcggaggcggaagtggaggcggaggatctggcggcggaggctctcaaatgcaactggttcaaagcggcggtggcctggtgcaacctggaagaagtctgagactgagctgtgccgccagcggcttcaccttcgatgattacgccatgcactgggtccgacaggcccctggaaaaggactggaatgggtgtccggcatctcctggaatagcggctctatcggctacgccgacagcgtgaagggcagattcaccatcagccgggacaacgccaagaacagcctgtacctccagatgaactccctgagagccgaggatacagccctgtactactgcgccaaggacatccacagcggcagctactacggcctgctgtactacgctatggacgtgtggggccagggcacaaccgtgacagtttcttctacgcgtgaggacctgaagaacgtgttcccacctgaggtggccgtgttcgagcctagcgaggccgagatcagccacacccagaaagccaccctcgtgtgcctggctaccggcttctaccccgaccatgtggaactgtcttggtgggtcaacggcaaagaggtgcacagcggcgtgtctaccgacccccagccactgaaagaacagcccgccctgaacgacagccggtactgcctgagcagcagactgagagtgtccgccaccttctggcagaacccccggaaccacttcagatgccaggtgcagttctacggcctgagcgagaacgacgagtggacccaggacagagccaagcccgtgacccagatcgtgtctgccgaagcctggggcagagccgatgatgtgattaagatccactggcaggaaaagaagtccaacaccatcctgggcagccaggaaggcaacaccatgaagaccaacgacacctacatgaagttcagctggctgaccgtgcccgagaagtccctggacaaagaacacagatgcatcgtgcggcacgaaaacaacaagaacggcgtggaccaggaaatcatcttcccacccatcaagaccgatgtgattacaatggaccccaaggacaactgctccaaggacgccaacgataccctgctgctccagctgaccaacaccagcgcctactacatgtacttgttgctgctgctgaagtccgtggtgtacttcgccatcatcacatgctgcctgctgatggctatggtcaagcggaaggacagccgggga

SEQ ID NO: 17606 - DNA, 1767 bp, synthetic construct
  source 1..1767: mol_type = other DNA
atggccttaccagtgaccgccttgctcctgccgctggccttgctgctccacgccgccaggccgctcgagatccagaaccctgatcctgccgtgtaccagctgcgggatagcaagagcagcgacaagagcgtgtgtctgttcaccgacttcgacagccagaccaacgtgtcccagagcaaggactccgacgtgtacatcaccgataagaccgtgctggacatgcggagcatggacttcaagagcaactccgccgtggcctggtccaacaagtccgatttcgcctgcgccaacgccttcaacaacagcattatccccgaggacacattcttcccaagccccgagagcagcgactccaccgaccacgtgaagcccaaagagacagagaacaccaagcagcccagcaagagctgccacaagcccaaggccatcgtgcacaccgagaaagtgaacatgatgagcctgaccgtgctgggcctgcggatgctgttcgccaaaaccgtggccgtgaacttcctgctgaccgccaagctgttcttcctcctcaccgccagggccaagcgatctggatctggagcaacaaacttctcactactcaaacaagcaggtgacgtggaggagaatcccgggcctactagcatggccttaccagtgaccgccttgctcctgccgctggccttgctgctccacgccgccaggccgatgtgtatgccctgcttcaccaccgaccatcagatggcccggaagtgcgacgattgctgtggcggaaaaggcagaggcaagtgctacggccctcagtgcttgtgtagactcgagggcggaggcggaagtggaggcggaggatctggcggcggaggctctttcgaagtgtgtatgccttgttttaccacggatcaacaaatggctcgcaagtgttctgactgctgcggaggcaaaggccggggaaagtgttatggcccacagtgtctgtgccggacgcgtgaggacctgaagaacgtgttcccacctgaggtggccgtgttcgagcctagcgaggccgagatcagccacacccagaaagccaccctcgtgtgcctggctaccggcttctaccccgaccatgtggaactgtcttggtgggtcaacggcaaagaggtgcacagcggcgtgtctaccgacccccagccactgaaagaacagcccgccctgaacgacagccggtactgcctgagcagcagactgagagtgtccgccaccttctggcagaacccccggaaccacttcagatgccaggtgcagttctacggcctgagcgagaacgacgagtggacccaggacagagccaagcccgtgacccagatcgtgtctgccgaagcctggggcagagccgatgatgtgattaagatccactggcaggaaaagaagtccaacaccatcctgggcagccaggaaggcaacaccatgaagaccaacgacacctacatgaagttcagctggctgaccgtgcccgagaagtccctggacaaagaacacagatgcatcgtgcggcacgaaaacaacaagaacggcgtggaccaggaaatcatcttcccacccatcaagaccgatgtgattacaatggaccccaaggacaactgctccaaggacgccaacgataccctgctgctccagctgaccaacaccagcgcctactacatgtacttgttgctgctgctgaagtccgtggtgtacttcgccatcatcacatgctgcctgctgatggctatggtcaagcggaaggacagccgggga

SEQ ID NO: 17607 - DNA, 2397 bp, synthetic construct
  source 1..2397: mol_type = other DNA
atggccttaccagtgaccgccttgctcctgccgctggccttgctgctccacgccgccaggccgctcgagatccagaaccctgatcctgccgtgtaccagctgcgggatagcaagagcagcgacaagagcgtgtgtctgttcaccgacttcgacagccagaccaacgtgtcccagagcaaggactccgacgtgtacatcaccgataagaccgtgctggacatgcggagcatggacttcaagagcaactccgccgtggcctggtccaacaagtccgatttcgcctgcgccaacgccttcaacaacagcattatccccgaggacacattcttcccaagccccgagagcagcgactccaccgaccacgtgaagcccaaagagacagagaacaccaagcagcccagcaagagctgccacaagcccaaggccatcgtgcacaccgagaaagtgaacatgatgagcctgaccgtgctgggcctgcggatgctgttcgccaaaaccgtggccgtgaacttcctgctgaccgccaagctgttcttcctcctcaccgccagggccaagcgatctggatctggagcaacaaacttctcactactcaaacaagcaggtgacgtggaggagaatcccgggcctactagcatggccttaccagtgaccgccttgctcctgccgctggccttgctgctccacgccgccaggccgttcgaagtgtgtatgccttgttttaccacggatcaacaaatggctcgcaagtgttctgactgctgcggaggcaaaggccggggaaagtgttatggcccacagtgtctgtgccggggtaccggcggaggcggatctggcggcggaggtagcggtggcggaggatctgaattcgacatccagatgacacagagccctagcagcctgtctgccagcgtgggagacagagtgaccatcacatgcaaggccagcgaccacatcaacaactggctggcctggtatcagcagaagcctggacaggcccctaagctgctgatctacggcgctaccacactggaaacaggcgtgcccagcagattttctggcagcggctctggcaccgactacaccctgacaatatccagcctccagcctgaggacttcgccacctactactgtcagcagagctggaacaccccttggacattcggccagggcaccaagctggaaatcaagagaggcggaggcggaagtggaggcggaggatctggcggcggaggctctcaagttcagcttcaacagcctggcgctgagctggtcaaacctggcgcttctgtgaagatgagctgcaaagccagcggctacgccttcagcagctactggatcaactggatgaagcagaaacccggccagggactcgaatggatcggccaaatctatcccggcgacggcgacaccaactacaacggcaagttcaagggcagagccacactgaccgccgatacctctagcagcacagcctacatgcagctgagcagcctgaccagcgaagatagcgccgtgtacttctgtgcccggtccatcacaacagtcgtgggctgcgctatggactattggggccagggaacaagcgtgaccgtgtctagtacgcgtgaggacctgaagaacgtgttcccacctgaggtggccgtgttcgagcctagcgaggccgagatcagccacacccagaaagccaccctcgtgtgcctggctaccggcttctaccccgaccatgtggaactgtcttggtgggtcaacggcaaagaggtgcacagcggcgtgtctaccgacccccagccactgaaagaacagcccgccctgaacgacagccggtactgcctgagcagcagactgagagtgtccgccaccttctggcagaacccccggaaccacttcagatgccaggtgcagttctacggcctgagcgagaacgacgagtggacccaggacagagccaagcccgtgacccagatcgtgtctgccgaagcctggggcagagccgatgatgtgattaagatccactggcaggaaaagaagtccaacaccatcctgggcagccaggaaggcaacaccatgaagaccaacgacacctacatgaagttcagctggctgaccgtgcccgagaagtccctggacaaagaacacagatgcatcgtgcggcacgaaaacaacaagaacggcgtggaccaggaaatcatcttcccacccatcaagaccgatgtgattacaatggaccccaaggacaactgctccaaggacgccaacgataccctgctgctccagctgaccaacaccagcgcctactacatgtacttgttgctgctgctgaagtccgtggtgtacttcgccatcatcacatgctgcctgctgatggctatggtcaagcggaaggacagccgggga

SEQ ID NO: 17608 - DNA, 2787 bp, synthetic construct
  source 1..2787: mol_type = other DNA
atggccttaccagtgaccgccttgctcctgccgctggccttgctgctccacgccgccaggccgctcgagatccagaaccctgatcctgccgtgtaccagctgcgggatagcaagagcagcgacaagagcgtgtgtctgttcaccgacttcgacagccagaccaacgtgtcccagagcaaggactccgacgtgtacatcaccgataagaccgtgctggacatgcggagcatggacttcaagagcaactccgccgtggcctggtccaacaagtccgatttcgcctgcgccaacgccttcaacaacagcattatccccgaggacacattcttcccaagccccgagagcagcgactccaccgaccacgtgaagcccaaagagacagagaacaccaagcagcccagcaagagctgccacaagcccaaggccatcgtgcacaccgagaaagtgaacatgatgagcctgaccgtgctgggcctgcggatgctgttcgccaaaaccgtggccgtgaacttcctgctgaccgccaagctgttcttcctcctcaccgccagggccaagcgatctggatctggagcaacaaacttctcactactcaaacaagcaggtgacgtggaggagaatcccgggcctactagcatggccttaccagtgaccgccttgctcctgccgctggccttgctgctccacgccgccaggccgttcgaaagccccgtagctcctgcctgtgaccccagactcctaaataaactgctgcgtgactcccacctccttcacagccgactgagtcagtgtcccgacgtggaccctttgtctatccctgttctgctgcctgctgtggactttagcctgggagaatggaaaacccagacggaacagagcaaggcacaggacattctaggggcagtgtcccttctactggagggagtgatggcagcacgaggacagttggaaccctcctgcctctcatccctcctgggacagctttctgggcaggttcgcctcctcttgggggccctgcagggcctcctaggaacccagcttcctctacagggcaggaccacagctcacaaggaccccaatgccctcttcttgagcttgcaacaactgcttcggggaaaggtgcgcttcctgcttctggtagaaggtcccaccctctgtgtcagacggaccctgccaaccacagctgtcccaagcagtacttctggtaccggcggaggcggatctggcggcggaggtagcggtggcggaggatctgaattcgacatccagatgacacagagccctagcagcctgtctgccagcgtgggagacagagtgaccatcacatgcaaggccagcgaccacatcaacaactggctggcctggtatcagcagaagcctggacaggcccctaagctgctgatctacggcgctaccacactggaaacaggcgtgcccagcagattttctggcagcggctctggcaccgactacaccctgacaatatccagcctccagcctgaggacttcgccacctactactgtcagcagagctggaacaccccttggacattcggccagggcaccaagctggaaatcaagagaggcggaggcggaagtggaggcggaggatctggcggcggaggctctcaagttcagcttcaacagcctggcgctgagctggtcaaacctggcgcttctgtgaagatgagctgcaaagccagcggctacgccttcagcagctactggatcaactggatgaagcagaaacccggccagggactcgaatggatcggccaaatctatcccggcgacggcgacaccaactacaacggcaagttcaagggcagagccacactgaccgccgatacctctagcagcacagcctacatgcagctgagcagcctgaccagcgaagatagcgccgtgtacttctgtgcccggtccatcacaacagtcgtgggctgcgctatggactattggggccagggaacaagcgtgaccgtgtctagtacgcgtgaggacctgaagaacgtgttcccacctgaggtggccgtgttcgagcctagcgaggccgagatcagccacacccagaaagccaccctcgtgtgcctggctaccggcttctaccccgaccatgtggaactgtcttggtgggtcaacggcaaagaggtgcacagcggcgtgtctaccgacccccagccactgaaagaacagcccgccctgaacgacagccggtactgcctgagcagcagactgagagtgtccgccaccttctggcagaacccccggaaccacttcagatgccaggtgcagttctacggcctgagcgagaacgacgagtggacccaggacagagccaagcccgtgacccagatcgtgtctgccgaagcctggggcagagccgatgatgtgattaagatccactggcaggaaaagaagtccaacaccatcctgggcagccaggaaggcaacaccatgaagaccaacgacacctacatgaagttcagctggctgaccgtgcccgagaagtccctggacaaagaacacagatgcatcgtgcggcacgaaaacaacaagaacggcgtggaccaggaaatcatcttcccacccatcaagaccgatgtgattacaatggaccccaaggacaactgctccaaggacgccaacgataccctgctgctccagctgaccaacaccagcgcctactacatgtacttgttgctgctgctgaagtccgtggtgtacttcgccatcatcacatgctgcctgctgatggctatggtcaagcggaaggacagccgggga

SEQ ID NO: 17609 - DNA, 2508 bp, synthetic construct
  source 1..2508: mol_type = other DNA
atggccttaccagtgaccgccttgctcctgccgctggccttgctgctccacgccgccaggccgctcgagatccagaaccctgatcctgccgtgtaccagctgcgggatagcaagagcagcgacaagagcgtgtgtctgttcaccgacttcgacagccagaccaacgtgtcccagagcaaggactccgacgtgtacatcaccgataagaccgtgctggacatgcggagcatggacttcaagagcaactccgccgtggcctggtccaacaagtccgatttcgcctgcgccaacgccttcaacaacagcattatccccgaggacacattcttcccaagccccgagagcagcgactccaccgaccacgtgaagcccaaagagacagagaacaccaagcagcccagcaagagctgccacaagcccaaggccatcgtgcacaccgagaaagtgaacatgatgagcctgaccgtgctgggcctgcggatgctgttcgccaaaaccgtggccgtgaacttcctgctgaccgccaagctgttcttcctcctcaccgccagggccaagcgatctggatctggagcaacaaacttctcactactcaaacaagcaggtgacgtggaggagaatcccgggcctactagcatggccttaccagtgaccgccttgctcctgccgctggccttgctgctccacgccgccaggccgttcgaaatgggcagctgggaagagttcgagctgagactgaacgccatcgaggaacggctgtatgccctcggaggatctgaagccgagctggcctacttcgagtacgtgatcgccgacttcgagggcaacctgcagcggtacaaaggcaagggcaaccctgaagtggaagccctgtacttcgaggccgacgccatcttcgaggaactggtggcctacagacacaacggtaccggcggaggcggatctggcggcggaggtagcggtggcggaggatctgaattcgacatccagatgacacagagccctagcagcctgtctgccagcgtgggagacagagtgaccatcacatgcaaggccagcgaccacatcaacaactggctggcctggtatcagcagaagcctggacaggcccctaagctgctgatctacggcgctaccacactggaaacaggcgtgcccagcagattttctggcagcggctctggcaccgactacaccctgacaatatccagcctccagcctgaggacttcgccacctactactgtcagcagagctggaacaccccttggacattcggccagggcaccaagctggaaatcaagagaggcggaggcggaagtggaggcggaggatctggcggcggaggctctcaagttcagcttcaacagcctggcgctgagctggtcaaacctggcgcttctgtgaagatgagctgcaaagccagcggctacgccttcagcagctactggatcaactggatgaagcagaaacccggccagggactcgaatggatcggccaaatctatcccggcgacggcgacaccaactacaacggcaagttcaagggcagagccacactgaccgccgatacctctagcagcacagcctacatgcagctgagcagcctgaccagcgaagatagcgccgtgtacttctgtgcccggtccatcacaacagtcgtgggctgcgctatggactattggggccagggaacaagcgtgaccgtgtctagtacgcgtgaggacctgaagaacgtgttcccacctgaggtggccgtgttcgagcctagcgaggccgagatcagccacacccagaaagccaccctcgtgtgcctggctaccggcttctaccccgaccatgtggaactgtcttggtgggtcaacggcaaagaggtgcacagcggcgtgtctaccgacccccagccactgaaagaacagcccgccctgaacgacagccggtactgcctgagcagcagactgagagtgtccgccaccttctggcagaacccccggaaccacttcagatgccaggtgcagttctacggcctgagcgagaacgacgagtggacccaggacagagccaagcccgtgacccagatcgtgtctgccgaagcctggggcagagccgatgatgtgattaagatccactggcaggaaaagaagtccaacaccatcctgggcagccaggaaggcaacaccatgaagaccaacgacacctacatgaagttcagctggctgaccgtgcccgagaagtccctggacaaagaacacagatgcatcgtgcggcacgaaaacaacaagaacggcgtggaccaggaaatcatcttcccacccatcaagaccgatgtgattacaatggaccccaaggacaactgctccaaggacgccaacgataccctgctgctccagctgaccaacaccagcgcctactacatgtacttgttgctgctgctgaagtccgtggtgtacttcgccatcatcacatgctgcctgctgatggctatggtcaagcggaaggacagccgggga

SEQ ID NO: 17610 - DNA, 2919 bp, synthetic construct
  source 1..2919: mol_type = other DNA
atggccttaccagtgaccgccttgctcctgccgctggccttgctgctccacgccgccaggccgctcgaggaggaggacctgaagaacgtgttcccacctgaggtggccgtgttcgagcctagcgaggccgagatcagccacacccagaaagccaccctcgtgtgcctggctaccggcttctaccccgaccatgtggaactgtcttggtgggtcaacggcaaagaggtgcacagcggcgtgtgtaccgacccccagccactgaaagaacagcccgccctgaacgacagccggtactgcctgagcagcagactgagagtgtccgccaccttctggcagaacccccggaaccacttcagatgccaggtgcagttctacggcctgagcgagaacgacgagtggacccaggacagagccaagcccgtgacccagatcgtgtctgccgaagcctggggcagagccgatgatgtgattaagatccactggcaggaaaagaagtccaacaccatcctgggcagccaggaaggcaacaccatgaagaccaacgacacctacatgaagttcagctggctgaccgtgcccgagaagtccctggacaaagaacacagatgcatcgtgcggcacgaaaacaacaagaacggcgtggaccaggaaatcatcttcccacccatcaagaccgatgtgattacaatggaccccaaggacaactgctccaaggacgccaacgataccctgctgctccagctgaccaacaccagcgcctactacatgtacttgttgctgctgctgaagtccgtggtgtacttcgccatcatcacatgctgcctgctgcggagaaccgccttctgctgcaacggcgagaagtctagggccaagcgatctggatctggagcaacaaacttctcactactcaaacaagcaggtgacgtggaggagaatcccgggcctactagcatggccttaccagtgaccgccttgctcctgccgctggccttgctgctccacgccgccaggccggacatccagatgacacagactacatcctccctgtctgcctctctgggagacagagtcaccatcagttgcagggcaagtcaggacattagtaaatatttaaattggtatcagcagaaaccagatggaactgttaaactcctgatctaccatacatcaagattacactcaggagtcccatcaaggttcagtggcagtgggtctggaacagattattctctcaccattagcaacctggagcaagaagatattgccacttacttttgccaacagggtaatacgcttccgtacacgttcggaggggggaccaagctggagatcacaggtggcggtggctcgggcggtggtgggtcgggtggcggcggatctgaggtgaaactgcaggagtcaggacctggcctggtggcgccctcacagagcctgtccgtcacatgcactgtctcaggggtctcattacccgactatggtgtaagctggattcgccagcctccacgaaagggtctggagtggctgggagtaatatggggtagtgaaaccacatactataattcagctctcaaatccagactgaccatcatcaaggacaactccaagagccaagttttcttaaaaatgaacagtctgcaaactgatgacacagccatttactactgtgccaaacattattactacggtggtagctatgctatggactactggggtcaaggaacctcagtcaccgtctcctcaacgcgtatccagaaccctgatcctgccgtgtaccagctgcgggatagcaagagcagcgacaagagcgtgtgtctgttcaccgacttcgacagccagaccaacgtgtcccagagcaaggactccgacgtgtacatcaccgataagtgcgtgctggacatgcggagcatggacttcaagagcaactccgccgtggcctggtccaacaagtccgatttcgcctgcgccaacgccttcaacaacagcattatccccgaggacacattcttcccaagccccgagagcagcgactccaccgaccacgtgaagcccaaagagacagagaacaccaagcagcccagcaagagctgccacaagcccaaggccatcgtgcacaccgagaaagtgaacatgatgagcctgaccgtgctgggcctgcggatgctgttcgccaaaaccgtggccgtgaacttcctgctgaccgccaagctgttcttcctccgcgccaagagaagcggatctggcgtgaagcagaccctgaatttcgacctgctgaagctggctggcgacgtggaatccaacccaggcccttctagaggccatatgaccgagtacaagcccacggtgcgcctcgccacccgcgacgacgtccccagggccgtacgcaccctcgccgccgcgttcgccgactaccccgccacgcgccacaccgtcgatccggaccgccacatcgagcgggtcaccgagctgcaagaactcttcctcacgcgcgtcgggctcgacatcggcaaggtgtgggtcgcggacgacggcgccgcggtggcggtctggaccacgccggagagcgtcgaagcgggggcggtgttcgccgagatcggcccgcgcatggccgagttgagcggttcccggctggccgcgcagcaacagatggaaggcctcctggcgccgcaccggcccaaggagcccgcgtggttcctggccaccgtcggcgtctcgcccgaccaccagggcaagggtctgggcagcgccgtcgtgctccccggagtggaggcggccgagcgcgccggggtgcccgccttcctggagacctccgcgccccgcaacctccccttctacgagcggctcggcttcaccgtcaccgccgacgtcgaggtgcccgaaggaccgcgcacctggtgcatgacccgcaagcccggtgcctga

SEQ ID NO: 17611 - DNA, 2922 bp, synthetic construct
  source 1..2922: mol_type = other DNA
atggccttaccagtgaccgccttgctcctgccgctggccttgctgctccacgccgccaggccgctcgaggaggaggacctgaagaacgtgttcccacctgaggtggccgtgttcgagcctagcgaggccgagatcagccacacccagaaagccaccctcgtgtgcctggctaccggcttctaccccgaccatgtggaactgtcttggtgggtcaacggcaaagaggtgcacagcggcgtgtgtaccgacccccagccactgaaagaacagcccgccctgaacgacagccggtactgcctgagcagcagactgagagtgtccgccaccttctggcagaacccccggaaccacttcagatgccaggtgcagttctacggcctgagcgagaacgacgagtggacccaggacagagccaagcccgtgacccagatcgtgtctgccgaagcctggggcagagccgatgatgtgattaagatccactggcaggaaaagaagtccaacaccatcctgggcagccaggaaggcaacaccatgaagaccaacgacacctacatgaagttcagctggctgaccgtgcccgagaagtccctggacaaagaacacagatgcatcgtgcggcacgaaaacaacaagaacggcgtggaccaggaaatcatcttcccacccatcaagaccgatgtgattacaatggaccccaaggacaactgctccaaggacgccaacgataccctgctgctccagctgaccaacaccagcgcctactacatgtacttgttgctgctgctgaagtccgtggtgtacttcgccatcatcacatgctgcctgctgcggagaaccgccttctgctgcaacggcgagaagtctagggccaagcgatctggatctggagcaacaaacttctcactactcaaacaagcaggtgacgtggaggagaatcccgggcctactagcaccatggccttaccagtgaccgccttgctcctgccgctggccttgctgctccacgccgccaggccggagatcgtgatgacccagagccctgccaccctgtctctgagccctggcgaaagagccaccctgagctgtagagccagccaggacatcagcaagtacctgaactggtatcagcagaagcccggccaggcccccagactgctgatctaccacaccagcagactgcacagcggcatccccgccagattttctggctctggcagcggcaccgactacaccctgacaatcagcagcctccagcccgaggacttcgccgtgtacttctgtcagcaaggcaacaccctgccctacaccttcggccagggcaccaagctggaaatcaagggcggaggcggaagtggaggcggaggatctggcggcggaggctctcaggtgcaactccaggaatctggccctggcctcgtgaagcccagcgagacactgagcctgacctgtaccgtgtccggcgtgtccctgcctgactatggcgtgtcctggatcagacagccccctggcaagggcctggaatggatcggagtgatttggggcagcgaaaccacctactacaacagctccctgaagtccagagtgaccatctccaaggacaactccaagaaccaggtgtccctgaagctgagcagcgtgacagccgccgacaccgccgtgtattactgcgccaagcactactactacggcggcagctacgctatggactactggggccagggaaccctcgtgaccgtgtctagtacgcgtatccagaaccctgatcctgccgtgtaccagctgcgggatagcaagagcagcgacaagagcgtgtgtctgttcaccgacttcgacagccagaccaacgtgtcccagagcaaggactccgacgtgtacatcaccgataagtgcgtgctggacatgcggagcatggacttcaagagcaactccgccgtggcctggtccaacaagtccgatttcgcctgcgccaacgccttcaacaacagcattatccccgaggacacattcttcccaagccccgagagcagcgactccaccgaccacgtgaagcccaaagagacagagaacaccaagcagcccagcaagagctgccacaagcccaaggccatcgtgcacaccgagaaagtgaacatgatgagcctgaccgtgctgggcctgcggatgctgttcgccaaaaccgtggccgtgaacttcctgctgaccgccaagctgttcttcctccgcgccaagagaagcggatctggcgtgaagcagaccctgaatttcgacctgctgaagctggctggcgacgtggaatccaacccaggcccttctagaggccatatgaccgagtacaagcccacggtgcgcctcgccacccgcgacgacgtccccagggccgtacgcaccctcgccgccgcgttcgccgactaccccgccacgcgccacaccgtcgatccggaccgccacatcgagcgggtcaccgagctgcaagaactcttcctcacgcgcgtcgggctcgacatcggcaaggtgtgggtcgcggacgacggcgccgcggtggcggtctggaccacgccggagagcgtcgaagcgggggcggtgttcgccgagatcggcccgcgcatggccgagttgagcggttcccggctggccgcgcagcaacagatggaaggcctcctggcgccgcaccggcccaaggagcccgcgtggttcctggccaccgtcggcgtctcgcccgaccaccagggcaagggtctgggcagcgccgtcgtgctccccggagtggaggcggccgagcgcgccggggtgcccgccttcctggagacctccgcgccccgcaacctccccttctacgagcggctcggcttcaccgtcaccgccgacgtcgaggtgcccgaaggaccgcgcacctggtgcatgacccgcaagcccggtgcctga

SEQ ID NO: 17612 - DNA, 2925 bp, synthetic construct
  source 1..2925: mol_type = other DNA
atggccttaccagtgaccgccttgctcctgccgctggccttgctgctccacgccgccaggccgctcgaggaggaggacctgaagaacgtgttcccacctgaggtggccgtgttcgagcctagcgaggccgagatcagccacacccagaaagccaccctcgtgtgcctggctaccggcttctaccccgaccatgtggaactgtcttggtgggtcaacggcaaagaggtgcacagcggcgtgtgtaccgacccccagccactgaaagaacagcccgccctgaacgacagccggtactgcctgagcagcagactgagagtgtccgccaccttctggcagaacccccggaaccacttcagatgccaggtgcagttctacggcctgagcgagaacgacgagtggacccaggacagagccaagcccgtgacccagatcgtgtctgccgaagcctggggcagagccgatgatgtgattaagatccactggcaggaaaagaagtccaacaccatcctgggcagccaggaaggcaacaccatgaagaccaacgacacctacatgaagttcagctggctgaccgtgcccgagaagtccctggacaaagaacacagatgcatcgtgcggcacgaaaacaacaagaacggcgtggaccaggaaatcatcttcccacccatcaagaccgatgtgattacaatggaccccaaggacaactgctccaaggacgccaacgataccctgctgctccagctgaccaacaccagcgcctactacatgtacttgttgctgctgctgaagtccgtggtgtacttcgccatcatcacatgctgcctgctgcggagaaccgccttctgctgcaacggcgagaagtctagggccaagcgatctggatctggagcaacaaacttctcactactcaaacaagcaggtgacgtggaggagaatcccgggcctactagcaccatggccttaccagtgaccgccttgctcctgccgctggccttgctgctccacgccgccaggccggacgagatcgtgctgacacagagccccgccaccctgtcactgtctccaggcgaaagagccaccctgagctgtagcgccagcagcagcgtgtcctacatgcactggtatcagcagaagcccggccaggcccccagactgctgatctacgataccagcaagctggcctccggcatccccgccagattttctggcagcggctccggcaccgacttcaccctgacaatcagcagcctggaacccgaggacgtggccgtgtactactgttttcaaggcagcgtgtaccccttcaccttcggccagggcaccaagctggaaatcaagagaggtggcggtggctcgggcggtggtgggtcgggtggcggcggatctcaggtgcagctccaggaatctggccctggcctcgtgaagcctagccagaccctgagcctgacctgtaccgtgtctggcggcagcatcagcacaagcggcatgggcgtgggctggatcagacagcaccctggcaagggcctggaatggatcggccacatttggtgggacgacgacaagcggtacaaccccgccctgaagtccagagtgaccatcagcgtggacaccagcaagaaccagttcagcctgaagctgagcagcgtgacagccgccgataccgccgtgtattattgcgcccggatggaactgtggtcctactacttcgactactggggccagggaaccctcgtgaccgtgtctagtacgcgtatccagaaccctgatcctgccgtgtaccagctgcgggatagcaagagcagcgacaagagcgtgtgtctgttcaccgacttcgacagccagaccaacgtgtcccagagcaaggactccgacgtgtacatcaccgataagtgcgtgctggacatgcggagcatggacttcaagagcaactccgccgtggcctggtccaacaagtccgatttcgcctgcgccaacgccttcaacaacagcattatccccgaggacacattcttcccaagccccgagagcagcgactccaccgaccacgtgaagcccaaagagacagagaacaccaagcagcccagcaagagctgccacaagcccaaggccatcgtgcacaccgagaaagtgaacatgatgagcctgaccgtgctgggcctgcggatgctgttcgccaaaaccgtggccgtgaacttcctgctgaccgccaagctgttcttcctccgcgccaagagaagcggatctggcgtgaagcagaccctgaatttcgacctgctgaagctggctggcgacgtggaatccaacccaggcccttctagaggccatatgaccgagtacaagcccacggtgcgcctcgccacccgcgacgacgtccccagggccgtacgcaccctcgccgccgcgttcgccgactaccccgccacgcgccacaccgtcgatccggaccgccacatcgagcgggtcaccgagctgcaagaactcttcctcacgcgcgtcgggctcgacatcggcaaggtgtgggtcgcggacgacggcgccgcggtggcggtctggaccacgccggagagcgtcgaagcgggggcggtgttcgccgagatcggcccgcgcatggccgagttgagcggttcccggctggccgcgcagcaacagatggaaggcctcctggcgccgcaccggcccaaggagcccgcgtggttcctggccaccgtcggcgtctcgcccgaccaccagggcaagggtctgggcagcgccgtcgtgctccccggagtggaggcggccgagcgcgccggggtgcccgccttcctggagacctccgcgccccgcaacctccccttctacgagcggctcggcttcaccgtcaccgccgacgtcgaggtgcccgaaggaccgcgcacctggtgcatgacccgcaagcccggtgcctga

SEQ ID NO: 17613 - DNA, 2913 bp, synthetic construct
  source 1..2913: mol_type = other DNA
atggccttaccagtgaccgccttgctcctgccgctggccttgctgctccacgccgccaggccgctcgaggaggaggacctgaagaacgtgttcccacctgaggtggccgtgttcgagcctagcgaggccgagatcagccacacccagaaagccaccctcgtgtgcctggctaccggcttctaccccgaccatgtggaactgtcttggtgggtcaacggcaaagaggtgcacagcggcgtgtgtaccgacccccagccactgaaagaacagcccgccctgaacgacagccggtactgcctgagcagcagactgagagtgtccgccaccttctggcagaacccccggaaccacttcagatgccaggtgcagttctacggcctgagcgagaacgacgagtggacccaggacagagccaagcccgtgacccagatcgtgtctgccgaagcctggggcagagccgatgatgtgattaagatccactggcaggaaaagaagtccaacaccatcctgggcagccaggaaggcaacaccatgaagaccaacgacacctacatgaagttcagctggctgaccgtgcccgagaagtccctggacaaagaacacagatgcatcgtgcggcacgaaaacaacaagaacggcgtggaccaggaaatcatcttcccacccatcaagaccgatgtgattacaatggaccccaaggacaactgctccaaggacgccaacgataccctgctgctccagctgaccaacaccagcgcctactacatgtacttgttgctgctgctgaagtccgtggtgtacttcgccatcatcacatgctgcctgctgcggagaaccgccttctgctgcaacggcgagaagtctagggccaagcgatctggatctggagcaacaaacttctcactactcaaacaagcaggtgacgtggaggagaatcccgggcctactagcatggccttaccagtgaccgccttgctcctgccgctggccttgctgctccacgccgccaggccggacatccagatgacacagagccctagcagcctgtctgccagcgtgggagacagagtgaccatcacctgtagagccagccaggacatcagcaactacctgaactggtatcagcagaagcccggcaaggcccctaagctgctgatctactacaccagcagactgcacagcggcgtgcccagcagattttctggctctggcagcggcaccgacttcaccctgacaatatctagcctccagcctgaggacttcgccacctactattgccagcagggcaacaccctgccttacacatttggacagggcaccaaggtggaaatcaagagaggcggaggcggaagtggaggcggaggatctggcggcggaggctctgaagtgcagctggttgaatcaggtggcggcctggttcaacctggcggatctctgagactgagctgtgccgccagcggcttcaccttcagcgactactttatgagctgggtccgacaggcccctggcaaaggacttgaatgggtcgccaccatcagcaatggcggcacctacacttactaccccgacagcgtgaagggcagattcaccatctccagagacaacagcaagaacaccctgtacctccagatgaactccctgagagccgaggacaccgccgtgtactactgcgccagattcgacggctacatcttcgactattggggccagggcaccctggtcacagtctcttctacgcgtatccagaaccctgatcctgccgtgtaccagctgcgggatagcaagagcagcgacaagagcgtgtgtctgttcaccgacttcgacagccagaccaacgtgtcccagagcaaggactccgacgtgtacatcaccgataagtgcgtgctggacatgcggagcatggacttcaagagcaactccgccgtggcctggtccaacaagtccgatttcgcctgcgccaacgccttcaacaacagcattatccccgaggacacattcttcccaagccccgagagcagcgactccaccgaccacgtgaagcccaaagagacagagaacaccaagcagcccagcaagagctgccacaagcccaaggccatcgtgcacaccgagaaagtgaacatgatgagcctgaccgtgctgggcctgcggatgctgttcgccaaaaccgtggccgtgaacttcctgctgaccgccaagctgttcttcctccgcgccaagagaagcggatctggcgtgaagcagaccctgaatttcgacctgctgaagctggctggcgacgtggaatccaacccaggcccttctagaggccatatgaccgagtacaagcccacggtgcgcctcgccacccgcgacgacgtccccagggccgtacgcaccctcgccgccgcgttcgccgactaccccgccacgcgccacaccgtcgatccggaccgccacatcgagcgggtcaccgagctgcaagaactcttcctcacgcgcgtcgggctcgacatcggcaaggtgtgggtcgcggacgacggcgccgcggtggcggtctggaccacgccggagagcgtcgaagcgggggcggtgttcgccgagatcggcccgcgcatggccgagttgagcggttcccggctggccgcgcagcaacagatggaaggcctcctggcgccgcaccggcccaaggagcccgcgtggttcctggccaccgtcggcgtctcgcccgaccaccagggcaagggtctgggcagcgccgtcgtgctccccggagtggaggcggccgagcgcgccggggtgcccgccttcctggagacctccgcgccccgcaacctccccttctacgagcggctcggcttcaccgtcaccgccgacgtcgaggtgcccgaaggaccgcgcacctggtgcatgacccgcaagcccggtgcctga

SEQ ID NO: 17614 - DNA, 2925 bp, synthetic construct
  source 1..2925: mol_type = other DNA
atggccttaccagtgaccgccttgctcctgccgctggccttgctgctccacgccgccaggccgctcgaggaggaggacctgaagaacgtgttcccacctgaggtggccgtgttcgagcctagcgaggccgagatcagccacacccagaaagccaccctcgtgtgcctggctaccggcttctaccccgaccatgtggaactgtcttggtgggtcaacggcaaagaggtgcacagcggcgtgtgtaccgacccccagccactgaaagaacagcccgccctgaacgacagccggtactgcctgagcagcagactgagagtgtccgccaccttctggcagaacccccggaaccacttcagatgccaggtgcagttctacggcctgagcgagaacgacgagtggacccaggacagagccaagcccgtgacccagatcgtgtctgccgaagcctggggcagagccgatgatgtgattaagatccactggcaggaaaagaagtccaacaccatcctgggcagccaggaaggcaacaccatgaagaccaacgacacctacatgaagttcagctggctgaccgtgcccgagaagtccctggacaaagaacacagatgcatcgtgcggcacgaaaacaacaagaacggcgtggaccaggaaatcatcttcccacccatcaagaccgatgtgattacaatggaccccaaggacaactgctccaaggacgccaacgataccctgctgctccagctgaccaacaccagcgcctactacatgtacttgttgctgctgctgaagtccgtggtgtacttcgccatcatcacatgctgcctgctgcggagaaccgccttctgctgcaacggcgagaagtctagggccaagcgatctggatctggagcaacaaacttctcactactcaaacaagcaggtgacgtggaggagaatcccgggcctactagcatggccttaccagtgaccgccttgctcctgccgctggccttgctgctccacgccgccaggccggacatccagatgacacagagccctagcagcctgtctgccagcgtgggagacagagtgaccatcacatgcaaggccagcgaccacatcaacaactggctggcctggtatcagcagaagcctggacaggcccctaagctgctgatctacggcgctaccacactggaaacaggcgtgcccagcagattttctggcagcggctctggcaccgactacaccctgacaatatccagcctccagcctgaggacttcgccacctactactgtcagcagagctggaacaccccttggacattcggccagggcaccaagctggaaatcaagagaggcggaggcggaagtggaggcggaggatctggcggcggaggctctcaagttcagcttcaacagcctggcgctgagctggtcaaacctggcgcttctgtgaagatgagctgcaaagccagcggctacgccttcagcagctactggatcaactggatgaagcagaaacccggccagggactcgaatggatcggccaaatctatcccggcgacggcgacaccaactacaacggcaagttcaagggcagagccacactgaccgccgatacctctagcagcacagcctacatgcagctgagcagcctgaccagcgaagatagcgccgtgtacttctgtgcccggtccatcacaacagtcgtgggctgcgctatggactattggggccagggaacaagcgtgaccgtgtctagtacgcgtatccagaaccctgatcctgccgtgtaccagctgcgggatagcaagagcagcgacaagagcgtgtgtctgttcaccgacttcgacagccagaccaacgtgtcccagagcaaggactccgacgtgtacatcaccgataagtgcgtgctggacatgcggagcatggacttcaagagcaactccgccgtggcctggtccaacaagtccgatttcgcctgcgccaacgccttcaacaacagcattatccccgaggacacattcttcccaagccccgagagcagcgactccaccgaccacgtgaagcccaaagagacagagaacaccaagcagcccagcaagagctgccacaagcccaaggccatcgtgcacaccgagaaagtgaacatgatgagcctgaccgtgctgggcctgcggatgctgttcgccaaaaccgtggccgtgaacttcctgctgaccgccaagctgttcttcctccgcgccaagagaagcggatctggcgtgaagcagaccctgaatttcgacctgctgaagctggctggcgacgtggaatccaacccaggcccttctagaggccatatgaccgagtacaagcccacggtgcgcctcgccacccgcgacgacgtccccagggccgtacgcaccctcgccgccgcgttcgccgactaccccgccacgcgccacaccgtcgatccggaccgccacatcgagcgggtcaccgagctgcaagaactcttcctcacgcgcgtcgggctcgacatcggcaaggtgtgggtcgcggacgacggcgccgcggtggcggtctggaccacgccggagagcgtcgaagcgggggcggtgttcgccgagatcggcccgcgcatggccgagttgagcggttcccggctggccgcgcagcaacagatggaaggcctcctggcgccgcaccggcccaaggagcccgcgtggttcctggccaccgtcggcgtctcgcccgaccaccagggcaagggtctgggcagcgccgtcgtgctccccggagtggaggcggccgagcgcgccggggtgcccgccttcctggagacctccgcgccccgcaacctccccttctacgagcggctcggcttcaccgtcaccgccgacgtcgaggtgcccgaaggaccgcgcacctggtgcatgacccgcaagcccggtgcctga

SEQ ID NO: 17615 - DNA, 2931 bp, synthetic construct
  source 1..2931: mol_type = other DNA
atggccttaccagtgaccgccttgctcctgccgctggccttgctgctccacgccgccaggccgctcgaggaggaggacctgaagaacgtgttcccacctgaggtggccgtgttcgagcctagcgaggccgagatcagccacacccagaaagccaccctcgtgtgcctggctaccggcttctaccccgaccatgtggaactgtcttggtgggtcaacggcaaagaggtgcacagcggcgtgtgtaccgacccccagccactgaaagaacagcccgccctgaacgacagccggtactgcctgagcagcagactgagagtgtccgccaccttctggcagaacccccggaaccacttcagatgccaggtgcagttctacggcctgagcgagaacgacgagtggacccaggacagagccaagcccgtgacccagatcgtgtctgccgaagcctggggcagagccgatgatgtgattaagatccactggcaggaaaagaagtccaacaccatcctgggcagccaggaaggcaacaccatgaagaccaacgacacctacatgaagttcagctggctgaccgtgcccgagaagtccctggacaaagaacacagatgcatcgtgcggcacgaaaacaacaagaacggcgtggaccaggaaatcatcttcccacccatcaagaccgatgtgattacaatggaccccaaggacaactgctccaaggacgccaacgataccctgctgctccagctgaccaacaccagcgcctactacatgtacttgttgctgctgctgaagtccgtggtgtacttcgccatcatcacatgctgcctgctgcggagaaccgccttctgctgcaacggcgagaagtctagggccaagcgatctggatctggagcaacaaacttctcactactcaaacaagcaggtgacgtggaggagaatcccgggcctactagcatggccttaccagtgaccgccttgctcctgccgctggccttgctgctccacgccgccaggccgcagatcgtgctgtctcagtctcctgccatcctgagcgcttccccaggcgagaaagtgaccatgacctgtagagccagcagcagcgtgtcctacatgcactggtatcagcagaagcccggcagcagccctaagccttggatctacgccaccagcaatctggcctctggcgtgccagccagattttctggctctggcagcggcaccagctacagcttcacaatcagcagagtggaagccgaggacgccgccacctactattgtcagcagtggaccttcaatcctcctaccttcggcggaggcacccggctggaaatcaaaagaacagtggctgctggcggaggcggaagtggaggcggaggatctggcggcggaggctctcaggcttatctgcaacagagcggagccgaactcgtcagacctggcgcttctgtgaagatgagctgcaaggccagcggctacaccttcaccagctataatatgcactgggtcaagcagacccctcggcagggactcgaatggatcggcggaatctatcccggcaacggcgacacctcctacaaccagaagttcaagggcaaagccacactgaccgtgggcaagagcagcagcaccgcctatatgcagctcagcagcctgaccagcgaggacagcgccgtgtacttctgcgccagatacgactacaactacgctatggactactggggccagggcaccagcgtgacagttagctctgccagcacgcgtatccagaaccctgatcctgccgtgtaccagctgcgggatagcaagagcagcgacaagagcgtgtgtctgttcaccgacttcgacagccagaccaacgtgtcccagagcaaggactccgacgtgtacatcaccgataagtgcgtgctggacatgcggagcatggacttcaagagcaactccgccgtggcctggtccaacaagtccgatttcgcctgcgccaacgccttcaacaacagcattatccccgaggacacattcttcccaagccccgagagcagcgactccaccgaccacgtgaagcccaaagagacagagaacaccaagcagcccagcaagagctgccacaagcccaaggccatcgtgcacaccgagaaagtgaacatgatgagcctgaccgtgctgggcctgcggatgctgttcgccaaaaccgtggccgtgaacttcctgctgaccgccaagctgttcttcctccgcgccaagagaagcggatctggcgtgaagcagaccctgaatttcgacctgctgaagctggctggcgacgtggaatccaacccaggcccttctagaggccatatgaccgagtacaagcccacggtgcgcctcgccacccgcgacgacgtccccagggccgtacgcaccctcgccgccgcgttcgccgactaccccgccacgcgccacaccgtcgatccggaccgccacatcgagcgggtcaccgagctgcaagaactcttcctcacgcgcgtcgggctcgacatcggcaaggtgtgggtcgcggacgacggcgccgcggtggcggtctggaccacgccggagagcgtcgaagcgggggcggtgttcgccgagatcggcccgcgcatggccgagttgagcggttcccggctggccgcgcagcaacagatggaaggcctcctggcgccgcaccggcccaaggagcccgcgtggttcctggccaccgtcggcgtctcgcccgaccaccagggcaagggtctgggcagcgccgtcgtgctccccggagtggaggcggccgagcgcgccggggtgcccgccttcctggagacctccgcgccccgcaacctccccttctacgagcggctcggcttcaccgtcaccgccgacgtcgaggtgcccgaaggaccgcgcacctggtgcatgacccgcaagcccggtgcctga

SEQ ID NO: 17616 - DNA, 2925 bp, synthetic construct
  source 1..2925: mol_type = other DNA
atggccttaccagtgaccgccttgctcctgccgctggccttgctgctccacgccgccaggccgctcgaggaggaggacctgaagaacgtgttcccacctgaggtggccgtgttcgagcctagcgaggccgagatcagccacacccagaaagccaccctcgtgtgcctggctaccggcttctaccccgaccatgtggaactgtcttggtgggtcaacggcaaagaggtgcacagcggcgtgtgtaccgacccccagccactgaaagaacagcccgccctgaacgacagccggtactgcctgagcagcagactgagagtgtccgccaccttctggcagaacccccggaaccacttcagatgccaggtgcagttctacggcctgagcgagaacgacgagtggacccaggacagagccaagcccgtgacccagatcgtgtctgccgaagcctggggcagagccgatgatgtgattaagatccactggcaggaaaagaagtccaacaccatcctgggcagccaggaaggcaacaccatgaagaccaacgacacctacatgaagttcagctggctgaccgtgcccgagaagtccctggacaaagaacacagatgcatcgtgcggcacgaaaacaacaagaacggcgtggaccaggaaatcatcttcccacccatcaagaccgatgtgattacaatggaccccaaggacaactgctccaaggacgccaacgataccctgctgctccagctgaccaacaccagcgcctactacatgtacttgttgctgctgctgaagtccgtggtgtacttcgccatcatcacatgctgcctgctgcggagaaccgccttctgctgcaacggcgagaagtctagggccaagcgatctggatctggagcaacaaacttctcactactcaaacaagcaggtgacgtggaggagaatcccgggcctactagcatggccttaccagtgaccgccttgctcctgccgctggccttgctgctccacgccgccaggccggagatcgtgctgacacagagccctgccaccctgtctctgagccctggcgaaagagccaccctgagctgtagagccagccagagcgtgtccagctacctggcctggtatcagcagaagcccggccaggctccccggctgctgatctacgatgccagcaatagagccaccggcatccccgccagattttccggctctggcagcggcaccgacttcaccctgaccatcagctccctggaacccgaggacttcgccgtgtactactgccagcagcggagcaactggcccatcacattcggccagggcacccggctggaaatcaaaggcggaggcggaagtggaggcggaggatctggcggcggaggctctgaggtgcagcttgttgagtctggcggaggactggtgcagcccgatagaagcctgagactgtcttgtgccgccagcggcttcaccttccacgattatgccatgcactgggtccgacaggcccctggcaaaggacttgaatgggtgtccaccatctcttggaacagcggcacaatcggctacgccgactctgtgaagggcagattcaccatcagccgggacaacgccaagaacagcctgtacctccagatgaactccctgagagccgaggacacagccctgtactactgcgccaaggacatccagtacggcaactactactacggcatggacgtgtggggccagggcacaacagtgacagtctcttctacgcgtatccagaaccctgatcctgccgtgtaccagctgcgggatagcaagagcagcgacaagagcgtgtgtctgttcaccgacttcgacagccagaccaacgtgtcccagagcaaggactccgacgtgtacatcaccgataagtgcgtgctggacatgcggagcatggacttcaagagcaactccgccgtggcctggtccaacaagtccgatttcgcctgcgccaacgccttcaacaacagcattatccccgaggacacattcttcccaagccccgagagcagcgactccaccgaccacgtgaagcccaaagagacagagaacaccaagcagcccagcaagagctgccacaagcccaaggccatcgtgcacaccgagaaagtgaacatgatgagcctgaccgtgctgggcctgcggatgctgttcgccaaaaccgtggccgtgaacttcctgctgaccgccaagctgttcttcctccgcgccaagagaagcggatctggcgtgaagcagaccctgaatttcgacctgctgaagctggctggcgacgtggaatccaacccaggcccttctagaggccatatgaccgagtacaagcccacggtgcgcctcgccacccgcgacgacgtccccagggccgtacgcaccctcgccgccgcgttcgccgactaccccgccacgcgccacaccgtcgatccggaccgccacatcgagcgggtcaccgagctgcaagaactcttcctcacgcgcgtcgggctcgacatcggcaaggtgtgggtcgcggacgacggcgccgcggtggcggtctggaccacgccggagagcgtcgaagcgggggcggtgttcgccgagatcggcccgcgcatggccgagttgagcggttcccggctggccgcgcagcaacagatggaaggcctcctggcgccgcaccggcccaaggagcccgcgtggttcctggccaccgtcggcgtctcgcccgaccaccagggcaagggtctgggcagcgccgtcgtgctccccggagtggaggcggccgagcgcgccggggtgcccgccttcctggagacctccgcgccccgcaacctccccttctacgagcggctcggcttcaccgtcaccgccgacgtcgaggtgcccgaaggaccgcgcacctggtgcatgacccgcaagcccggtgcctga

SEQ ID NO: 17617 - DNA, 2919 bp, synthetic construct
  source 1..2919: mol_type = other DNA
atggccttaccagtgaccgccttgctcctgccgctggccttgctgctccacgccgccaggccgctcgaggaggaggacctgaagaacgtgttcccacctgaggtggccgtgttcgagcctagcgaggccgagatcagccacacccagaaagccaccctcgtgtgcctggctaccggcttctaccccgaccatgtggaactgtcttggtgggtcaacggcaaagaggtgcacagcggcgtgtgtaccgacccccagccactgaaagaacagcccgccctgaacgacagccggtactgcctgagcagcagactgagagtgtccgccaccttctggcagaacccccggaaccacttcagatgccaggtgcagttctacggcctgagcgagaacgacgagtggacccaggacagagccaagcccgtgacccagatcgtgtctgccgaagcctggggcagagccgatgatgtgattaagatccactggcaggaaaagaagtccaacaccatcctgggcagccaggaaggcaacaccatgaagaccaacgacacctacatgaagttcagctggctgaccgtgcccgagaagtccctggacaaagaacacagatgcatcgtgcggcacgaaaacaacaagaacggcgtggaccaggaaatcatcttcccacccatcaagaccgatgtgattacaatggaccccaaggacaactgctccaaggacgccaacgataccctgctgctccagctgaccaacaccagcgcctactacatgtacttgttgctgctgctgaagtccgtggtgtacttcgccatcatcacatgctgcctgctgcggagaaccgccttctgctgcaacggcgagaagtctagggccaagcgatctggatctggagcaacaaacttctcactactcaaacaagcaggtgacgtggaggagaatcccgggcctactagcatggccttaccagtgaccgccttgctcctgccgctggccttgctgctccacgccgccaggccggacatccagatgacccagagccccagcagcctgtctgccagcgtgggcgacagagtgaccatcacctgtagagccagccaggacgtgaacaccgccgtggcctggtatcagcagaagcctggcaaggcccccaagctgctgatctacagcgccagcttcctggaaagcggcgtgcccagcagattcagcggaagcagaagcggcaccgacttcaccctgaccatcagctccctccagcccgaggacttcgccacctactactgccagcagcactacaccacccctcccaccttcggccagaccaaggtggaaatcaagagaggcggaggcggaagtggaggcggaggatctggcggcggaggctctgaagtgcaactggtggaatctggcggcggactggtgcagcctggcggatctctgagactgagctgtgccgccagcggcttcaacatcaaggacacctacatccactgggtgcgccaggcccctggaaagggactggaatgggtggcccggatctaccccaccaacggctacaccagatacgccgacagcgtgaagggccggttcaccatcagcgccgacaccagcaagaataccgcctacctccagatgaacagcctgcgggccgaggataccgccgtgtactactgctcaagatggggaggcgacggcttctacgctatggacgtgtggggccagggcacccttgtgaccgtgtcatctacgcgtatccagaaccctgatcctgccgtgtaccagctgcgggatagcaagagcagcgacaagagcgtgtgtctgttcaccgacttcgacagccagaccaacgtgtcccagagcaaggactccgacgtgtacatcaccgataagtgcgtgctggacatgcggagcatggacttcaagagcaactccgccgtggcctggtccaacaagtccgatttcgcctgcgccaacgccttcaacaacagcattatccccgaggacacattcttcccaagccccgagagcagcgactccaccgaccacgtgaagcccaaagagacagagaacaccaagcagcccagcaagagctgccacaagcccaaggccatcgtgcacaccgagaaagtgaacatgatgagcctgaccgtgctgggcctgcggatgctgttcgccaaaaccgtggccgtgaacttcctgctgaccgccaagctgttcttcctccgcgccaagagaagcggatctggcgtgaagcagaccctgaatttcgacctgctgaagctggctggcgacgtggaatccaacccaggcccttctagaggccatatgaccgagtacaagcccacggtgcgcctcgccacccgcgacgacgtccccagggccgtacgcaccctcgccgccgcgttcgccgactaccccgccacgcgccacaccgtcgatccggaccgccacatcgagcgggtcaccgagctgcaagaactcttcctcacgcgcgtcgggctcgacatcggcaaggtgtgggtcgcggacgacggcgccgcggtggcggtctggaccacgccggagagcgtcgaagcgggggcggtgttcgccgagatcggcccgcgcatggccgagttgagcggttcccggctggccgcgcagcaacagatggaaggcctcctggcgccgcaccggcccaaggagcccgcgtggttcctggccaccgtcggcgtctcgcccgaccaccagggcaagggtctgggcagcgccgtcgtgctccccggagtggaggcggccgagcgcgccggggtgcccgccttcctggagacctccgcgccccgcaacctccccttctacgagcggctcggcttcaccgtcaccgccgacgtcgaggtgcccgaaggaccgcgcacctggtgcatgacccgcaagcccggtgcctga

SEQ ID NO: 17618 - DNA, 2556 bp, synthetic construct
  source 1..2556: mol_type = other DNA
atggccttaccagtgaccgccttgctcctgccgctggccttgctgctccacgccgccaggccgctcgaggaggaggacctgaagaacgtgttcccacctgaggtggccgtgttcgagcctagcgaggccgagatcagccacacccagaaagccaccctcgtgtgcctggctaccggcttctaccccgaccatgtggaactgtcttggtgggtcaacggcaaagaggtgcacagcggcgtgtgtaccgacccccagccactgaaagaacagcccgccctgaacgacagccggtactgcctgagcagcagactgagagtgtccgccaccttctggcagaacccccggaaccacttcagatgccaggtgcagttctacggcctgagcgagaacgacgagtggacccaggacagagccaagcccgtgacccagatcgtgtctgccgaagcctggggcagagccgatgatgtgattaagatccactggcaggaaaagaagtccaacaccatcctgggcagccaggaaggcaacaccatgaagaccaacgacacctacatgaagttcagctggctgaccgtgcccgagaagtccctggacaaagaacacagatgcatcgtgcggcacgaaaacaacaagaacggcgtggaccaggaaatcatcttcccacccatcaagaccgatgtgattacaatggaccccaaggacaactgctccaaggacgccaacgataccctgctgctccagctgaccaacaccagcgcctactacatgtacttgttgctgctgctgaagtccgtggtgtacttcgccatcatcacatgctgcctgctgcggagaaccgccttctgctgcaacggcgagaagtctagggccaagcgatctggatctggagcaacaaacttctcactactcaaacaagcaggtgacgtggaggagaatcccgggcctactagcatggccctgcccgtgacagccctgctgctgcctctggctctgctgctgcacgccgccagacccgatgaattcgaggtgcaactggtggaaagcggcggaggcctggtgcaggctggcggatctctgagactgagctgtgccgccagcggcatcaccttcagcatcaacacaatgggctggtacagacaggcccctggcaagcagagggaactggtggccctgatctccagcatcggcgacacctactacgccgacagcgtgaagggccggttcaccatcagccgggacaacgccaagaacaccgtgtacctccagatgaacagcctgaagcccgaggacaccgccgtgtactactgcaagcggttcagaacagccgcccagggcaccgattattggggccagggaacacaagtgaccgtgtcctctacgcgtatccagaaccctgatcctgccgtgtaccagctgcgggatagcaagagcagcgacaagagcgtgtgtctgttcaccgacttcgacagccagaccaacgtgtcccagagcaaggactccgacgtgtacatcaccgataagtgcgtgctggacatgcggagcatggacttcaagagcaactccgccgtggcctggtccaacaagtccgatttcgcctgcgccaacgccttcaacaacagcattatccccgaggacacattcttcccaagccccgagagcagcgactccaccgaccacgtgaagcccaaagagacagagaacaccaagcagcccagcaagagctgccacaagcccaaggccatcgtgcacaccgagaaagtgaacatgatgagcctgaccgtgctgggcctgcggatgctgttcgccaaaaccgtggccgtgaacttcctgctgaccgccaagctgttcttcctccgcgccaagagaagcggatctggcgtgaagcagaccctgaatttcgacctgctgaagctggctggcgacgtggaatccaacccaggcccttctagaggccatatgaccgagtacaagcccacggtgcgcctcgccacccgcgacgacgtccccagggccgtacgcaccctcgccgccgcgttcgccgactaccccgccacgcgccacaccgtcgatccggaccgccacatcgagcgggtcaccgagctgcaagaactcttcctcacgcgcgtcgggctcgacatcggcaaggtgtgggtcgcggacgacggcgccgcggtggcggtctggaccacgccggagagcgtcgaagcgggggcggtgttcgccgagatcggcccgcgcatggccgagttgagcggttcccggctggccgcgcagcaacagatggaaggcctcctggcgccgcaccggcccaaggagcccgcgtggttcctggccaccgtcggcgtctcgcccgaccaccagggcaagggtctgggcagcgccgtcgtgctccccggagtggaggcggccgagcgcgccggggtgcccgccttcctggagacctccgcgccccgcaacctccccttctacgagcggctcggcttcaccgtcaccgccgacgtcgaggtgcccgaaggaccgcgcacctggtgcatgacccgcaagcccggtgcctga

SEQ ID NO: 17619 - DNA, 2556 bp, synthetic construct; identical to SEQ ID NO: 17618
  source 1..2556: mol_type = other DNA

SEQ ID NO: 17620 - DNA, 3351 bp, synthetic construct
  source 1..3351: mol_type = other DNA
atggccttaccagtgaccgccttgctcctgccgctggccttgctgctccacgccgccaggccgctcgaggaggaggacctgaagaacgtgttcccacctgaggtggccgtgttcgagcctagcgaggccgagatcagccacacccagaaagccaccctcgtgtgcctggctaccggcttctaccccgaccatgtggaactgtcttggtgggtcaacggcaaagaggtgcacagcggcgtgtgtaccgacccccagccactgaaagaacagcccgccctgaacgacagccggtactgcctgagcagcagactgagagtgtccgccaccttctggcagaacccccggaaccacttcagatgccaggtgcagttctacggcctgagcgagaacgacgagtggacccaggacagagccaagcccgtgacccagatcgtgtctgccgaagcctggggcagagccgatgatgtgattaagatccactggcaggaaaagaagtccaacaccatcctgggcagccaggaaggcaacaccatgaagaccaacgacacctacatgaagttcagctggctgaccgtgcccgagaagtccctggacaaagaacacagatgcatcgtgcggcacgaaaacaacaagaacggcgtggaccaggaaatcatcttcccacccatcaagaccgatgtgattacaatggaccccaaggacaactgctccaaggacgccaacgataccctgctgctccagctgaccaacaccagcgcctactacatgtacttgttgctgctgctgaagtccgtggtgtacttcgccatcatcacatgctgcctgctgcggagaaccgccttctgctgcaacggcgagaagtctagggccaagcgatctggatctggagcaacaaacttctcactactcaaacaagcaggtgacgtggaggagaatcccgggcctactagcatggccttaccagtgaccgccttgctcctgccgctggccttgctgctccacgccgccaggccgcaggtccagctcgtcgagtccggcggcggcctcgtccaggccggcgactccgtcaccctctcctgcaccgcctccggccgcaccttctcctcctacgccctcgcctggttccgccagcgccccggcaaggagcgcgagttcgtcgccggcctccgctggggcggccccaccaactacgccgactccgtcaaggaccgcttcaccatctccggcgactccgccaagcacaccatgtacctccagatgaactccctcaagcccgaggacaccgccgtctactactgcggctacaaccccggcggctgggccgtcccctcccagtacgagtacgactcctggggccagggcacccaggtcaccgtctcctccggtaccggcggaggcggatctggcggcggaggtagcggtggcggaggatctgaattcgacatccagatgacacagagccctagcagcctgtctgccagcgtgggagacagagtgaccatcacatgcaaggccagcgaccacatcaacaactggctggcctggtatcagcagaagcctggacaggcccctaagctgctgatctacggcgctaccacactggaaacaggcgtgcccagcagattttctggcagcggctctggcaccgactacaccctgacaatatccagcctccagcctgaggacttcgccacctactactgtcagcagagctggaacaccccttggacattcggccagggcaccaagctggaaatcaagagaggcggaggcggaagtggaggcggaggatctggcggcggaggctctcaagttcagcttcaacagcctggcgctgagctggtcaaacctggcgcttctgtgaagatgagctgcaaagccagcggctacgccttcagcagctactggatcaactggatgaagcagaaacccggccagggactcgaatggatcggccaaatctatcccggcgacggcgacaccaactacaacggcaagttcaagggcagagccacactgaccgccgatacctctagcagcacagcctacatgcagctgagcagcctgaccagcgaagatagcgccgtgtacttctgtgcccggtccatcacaacagtcgtgggctgcgctatggactattggggccagggaacaagcgtgaccgtgtctagtacgcgtatccagaaccctgatcctgccgtgtaccagctgcgggatagcaagagcagcgacaagagcgtgtgtctgttcaccgacttcgacagccagaccaacgtgtcccagagcaaggactccgacgtgtacatcaccgataagtgcgtgctggacatgcggagcatggacttcaagagcaactccgccgtggcctggtccaacaagtccgatttcgcctgcgccaacgccttcaacaacagcattatccccgaggacacattcttcccaagccccgagagcagcgactccaccgaccacgtgaagcccaaagagacagagaacaccaagcagcccagcaagagctgccacaagcccaaggccatcgtgcacaccgagaaagtgaacatgatgagcctgaccgtgctgggcctgcggatgctgttcgccaaaaccgtggccgtgaacttcctgctgaccgccaagctgttcttcctccgcgccaagagaagcggatctggcgtgaagcagaccctgaatttcgacctgctgaagctggctggcgacgtggaatccaacccaggcccttctagaggccatatgaccgagtacaagcccacggtgcgcctcgccacccgcgacgacgtccccagggccgtacgcaccctcgccgccgcgttcgccgactaccccgccacgcgccacaccgtcgatccggaccgccacatcgagcgggtcaccgagctgcaagaactcttcctcacgcgcgtcgggctcgacatcggcaaggtgtgggtcgcggacgacggcgccgcggtggcggtctggaccacgccggagagcgtcgaagcgggggcggtgttcgccgagatcggcccgcgcatggccgagttgagcggttcccggctggccgcgcagcaacagatggaaggcctcctggcgccgcaccggcccaaggagcccgcgtggttcctggccaccgtcggcgtctcgcccgaccaccagggcaagggtctgggcagcgccgtcgtgctccccggagtggaggcggccgagcgcgccggggtgcccgccttcctggagacctccgcgccccgcaacctccccttctacgagcggctcggcttcaccgtcaccgccgacgtcgaggtgcccgaaggaccgcgcacctggtgcatgacccgcaagcccggtgcctga

SEQ ID NO: 17621 - DNA, 3738 bp, synthetic construct
  source 1..3738: mol_type = other DNA
atggccttaccagtgaccgccttgctcctgccgctggccttgctgctccacgccgccaggccgctcgaggaggaggacctgaagaacgtgttcccacctgaggtggccgtgttcgagcctagcgaggccgagatcagccacacccagaaagccaccctcgtgtgcctggctaccggcttctaccccgaccatgtggaactgtcttggtgggtcaacggcaaagaggtgcacagcggcgtgtgtaccgacccccagccactgaaagaacagcccgccctgaacgacagccggtactgcctgagcagcagactgagagtgtccgccaccttctggcagaacccccggaaccacttcagatgccaggtgcagttctacggcctgagcgagaacgacgagtggacccaggacagagccaagcccgtgacccagatcgtgtctgccgaagcctggggcagagccgatgatgtgattaagatccactggcaggaaaagaagtccaacaccatcctgggcagccaggaaggcaacaccatgaagaccaacgacacctacatgaagttcagctggctgaccgtgcccgagaagtccctggacaaagaacacagatgcatcgtgcggcacgaaaacaacaagaacggcgtggaccaggaaatcatcttcccacccatcaagaccgatgtgattacaatggaccccaaggacaactgctccaaggacgccaacgataccctgctgctccagctgaccaacaccagcgcctactacatgtacttgttgctgctgctgaagtccgtggtgtacttcgccatcatcacatgctgcctgctgcggagaaccgccttctgctgcaacggcgagaagtctagggccaagcgatctggatctggagcaacaaacttctcactactcaaacaagcaggtgacgtggaggagaatcccgggcctactagcatggccttaccagtgaccgccttgctcctgccgctggccttgctgctccacgccgccaggccggaggttcagctgcttgagtctggcggaggactggttcaacctggcggaagcctgagactgtcttgtgccgccagcggcttcacctttagcagctacgccatgagctgggtccgacaggctcctggcaaaggactggaatgggtgtccagcatcagcggcagcggcgactacatctactacgccgatagcgtgaagggcagattcaccatcagccgggacatcagcaagaacaccctgtacctccagatgaacagcctgagagccgaggacaccgccgtgtactactgtgccaaagaaggcaccggcgctaacagcagcctggccgattatagaggccagggcacactggtcaccgtgtctagtggcggaggaagcggcggaggatctcaggtccagctcgtcgagtccggcggcggcctcgtccaggccggcgactccgtcaccctctcctgcaccgcctccggccgcaccttctcctcctacgccctcgcctggttccgccagcgccccggcaaggagcgcgagttcgtcgccggcctccgctggggcggccccaccaactacgccgactccgtcaaggaccgcttcaccatctccggcgactccgccaagcacaccatgtacctccagatgaactccctcaagcccgaggacaccgccgtctactactgcggctacaaccccggcggctgggccgtcccctcccagtacgagtacgactcctggggccagggcacccaggtcaccgtctcctccggtaccggcggaggcggatctggcggcggaggtagcggtggcggaggatctgaattcgacatccagatgacacagagccctagcagcctgtctgccagcgtgggagacagagtgaccatcacatgcaaggccagcgaccacatcaacaactggctggcctggtatcagcagaagcctggacaggcccctaagctgctgatctacggcgctaccacactggaaacaggcgtgcccagcagattttctggcagcggctctggcaccgactacaccctgacaatatccagcctccagcctgaggacttcgccacctactactgtcagcagagctggaacaccccttggacattcggccagggcaccaagctggaaatcaagagaggcggaggcggaagtggaggcggaggatctggcggcggaggctctcaagttcagcttcaacagcctggcgctgagctggtcaaacctggcgcttctgtgaagatgagctgcaaagccagcggctacgccttcagcagctactggatcaactggatgaagcagaaacccggccagggactcgaatggatcggccaaatctatcccggcgacggcgacaccaactacaacggcaagttcaagggcagagccacactgaccgccgatacctctagcagcacagcctacatgcagctgagcagcctgaccagcgaagatagcgccgtgtacttctgtgcccggtccatcacaacagtcgtgggctgcgctatggactattggggccagggaacaagcgtgaccgtgtctagtacgcgtatccagaaccctgatcctgccgtgtaccagctgcgggatagcaagagcagcgacaagagcgtgtgtctgttcaccgacttcgacagccagaccaacgtgtcccagagcaaggactccgacgtgtacatcaccgataagtgcgtgctggacatgcggagcatggacttcaagagcaactccgccgtggcctggtccaacaagtccgatttcgcctgcgccaacgccttcaacaacagcattatccccgaggacacattcttcccaagccccgagagcagcgactccaccgaccacgtgaagcccaaagagacagagaacaccaagcagcccagcaagagctgccacaagcccaaggccatcgtgcacaccgagaaagtgaacatgatgagcctgaccgtgctgggcctgcggatgctgttcgccaaaaccgtggccgtgaacttcctgctgaccgccaagctgttcttcctccgcgccaagagaagcggatctggcgtgaagcagaccctgaatttcgacctgctgaagctggctggcgacgtggaatccaacccaggcccttctagaggccatatgaccgagtacaagcccacggtgcgcctcgccacccgcgacgacgtccccagggccgtacgcaccctcgccgccgcgttcgccgactaccccgccacgcgccacaccgtcgatccggaccgccacatcgagcgggtcaccgagctgcaagaactcttcctcacgcgcgtcgggctcgacatcggcaaggtgtgggtcgcggacgacggcgccgcggtggcggtctggaccacgccggagagcgtcgaagcgggggcggtgttcgccgagatcggcccgcgcatggccgagttgagcggttcccggctggccgcgcagcaacagatggaaggcctcctggcgccgcaccggcccaaggagcccgcgtggttcctggccaccgtcggcgtctcgcccgaccaccagggcaagggtctgggcagcgccgtcgtgctccccggagtggaggcggccgagcgcgccggggtgcccgccttcctggagacctccgcgccccgcaacctccccttctacgagcggctcggcttcaccgtcaccgccgacgtcgaggtgcccgaaggaccgcgcacctggtgcatgacccgcaagcccggtgcctga

SEQ ID NO: 17622 - DNA, 3732 bp, synthetic construct
  source 1..3732: mol_type = other DNA
atggccttaccagtgaccgccttgctcctgccgctggccttgctgctccacgccgccaggccgctcgaggaggaggacctgaagaacgtgttcccacctgaggtggccgtgttcgagcctagcgaggccgagatcagccacacccagaaagccaccctcgtgtgcctggctaccggcttctaccccgaccatgtggaactgtcttggtgggtcaacggcaaagaggtgcacagcggcgtgtgtaccgacccccagccactgaaagaacagcccgccctgaacgacagccggtactgcctgagcagcagactgagagtgtccgccaccttctggcagaacccccggaaccacttcagatgccaggtgcagttctacggcctgagcgagaacgacgagtggacccaggacagagccaagcccgtgacccagatcgtgtctgccgaagcctggggcagagccgatgatgtgattaagatccactggcaggaaaagaagtccaacaccatcctgggcagccaggaaggcaacaccatgaagaccaacgacacctacatgaagttcagctggctgaccgtgcccgagaagtccctggacaaagaacacagatgcatcgtgcggcacgaaaacaacaagaacggcgtggaccaggaaatcatcttcccacccatcaagaccgatgtgattacaatggaccccaaggacaactgctccaaggacgccaacgataccctgctgctccagctgaccaacaccagcgcctactacatgtacttgttgctgctgctgaagtccgtggtgtacttcgccatcatcacatgctgcctgctgcggagaaccgccttctgctgcaacggcgagaagtctagggccaagcgatctggatctggagcaacaaacttctcactactcaaacaagcaggtgacgtggaggagaatcccgggcctactagcatggccttaccagtgaccgccttgctcctgccgctggccttgctgctccacgccgccaggccgggcgtgacacagagccccacacacctgattaagaccagaggccagcaggccacactgagatgcagccctatcagcggccacaccagcgtgtactggtatcagcaggctctcggactgggcctccagttcctgctttggtacgacgagggcgaagagagaaaccggggcaacttccctcctcggttttccggcagacagttccccaactacagcagcgagctgaacgtgaacgccctggaactggaagatagcgccctgtacctgtgtgcctcttctcttggtggacctcgcggactggctggactgagaggggatgagcagtttttcggccctggcaccagactgaccgtgctggaaggcggaggaagcggcggaggatctcaggtccagctcgtcgagtccggcggcggcctcgtccaggccggcgactccgtcaccctctcctgcaccgcctccggccgcaccttctcctcctacgccctcgcctggttccgccagcgccccggcaaggagcgcgagttcgtcgccggcctccgctggggcggccccaccaactacgccgactccgtcaaggaccgcttcaccatctccggcgactccgccaagcacaccatgtacctccagatgaactccctcaagcccgaggacaccgccgtctactactgcggctacaaccccggcggctgggccgtcccctcccagtacgagtacgactcctggggccagggcacccaggtcaccgtctcctccggtaccggcggaggcggatctggcggcggaggtagcggtggcggaggatctgaattcgacatccagatgacacagagccctagcagcctgtctgccagcgtgggagacagagtgaccatcacatgcaaggccagcgaccacatcaacaactggctggcctggtatcagcagaagcctggacaggcccctaagctgctgatctacggcgctaccacactggaaacaggcgtgcccagcagattttctggcagcggctctggcaccgactacaccctgacaatatccagcctccagcctgaggacttcgccacctactactgtcagcagagctggaacaccccttggacattcggccagggcaccaagctggaaatcaagagaggcggaggcggaagtggaggcggaggatctggcggcggaggctctcaagttcagcttcaacagcctggcgctgagctggtcaaacctggcgcttctgtgaagatgagctgcaaagccagcggctacgccttcagcagctactggatcaactggatgaagcagaaacccggccagggactcgaatggatcggccaaatctatcccggcgacggcgacaccaactacaacggcaagttcaagggcagagccacactgaccgccgatacctctagcagcacagcctacatgcagctgagcagcctgaccagcgaagatagcgccgtgtacttctgtgcccggtccatcacaacagtcgtgggctgcgctatggactattggggccagggaacaagcgtgaccgtgtctagtacgcgtatccagaaccctgatcctgccgtgtaccagctgcgggatagcaagagcagcgacaagagcgtgtgtctgttcaccgacttcgacagccagaccaacgtgtcccagagcaaggactccgacgtgtacatcaccgataagtgcgtgctggacatgcggagcatggacttcaagagcaactccgccgtggcctggtccaacaagtccgatttcgcctgcgccaacgccttcaacaacagcattatccccgaggacacattcttcccaagccccgagagcagcgactccaccgaccacgtgaagcccaaagagacagagaacaccaagcagcccagcaagagctgccacaagcccaaggccatcgtgcacaccgagaaagtgaacatgatgagcctgaccgtgctgggcctgcggatgctgttcgccaaaaccgtggccgtgaacttcctgctgaccgccaagctgttcttcctccgcgccaagagaagcggatctggcgtgaagcagaccctgaatttcgacctgctgaagctggctggcgacgtggaatccaacccaggcccttctagaggccatatgaccgagtacaagcccacggtgcgcctcgccacccgcgacgacgtccccagggccgtacgcaccctcgccgccgcgttcgccgactaccccgccacgcgccacaccgtcgatccggaccgccacatcgagcgggtcaccgagctgcaagaactcttcctcacgcgcgtcgggctcgacatcggcaaggtgtgggtcgcggacgacggcgccgcggtggcggtctggaccacgccggagagcgtcgaagcgggggcggtgttcgccgagatcggcccgcgcatggccgagttgagcggttcccggctggccgcgcagcaacagatggaaggcctcctggcgccgcaccggcccaaggagcccgcgtggttcctggccaccgtcggcgtctcgcccgaccaccagggcaagggtctgggcagcgccgtcgtgctccccggagtggaggcggccgagcgcgccggggtgcccgccttcctggagacctccgcgccccgcaacctccccttctacgagcggctcggcttcaccgtcaccgccgacgtcgaggtgcccgaaggaccgcgcacctggtgcatgacccgcaagcccggtgcctga

SEQ ID NO: 17623 - DNA, 3714 bp, synthetic construct
  source 1..3714: mol_type = other DNA
atggccttaccagtgaccgccttgctcctgccgctggccttgctgctccacgccgccaggccgctcgaggaggaggacctgaagaacgtgttcccacctgaggtggccgtgttcgagcctagcgaggccgagatcagccacacccagaaagccaccctcgtgtgcctggctaccggcttctaccccgaccatgtggaactgtcttggtgggtcaacggcaaagaggtgcacagcggcgtgtgtaccgacccccagccactgaaagaacagcccgccctgaacgacagccggtactgcctgagcagcagactgagagtgtccgccaccttctggcagaacccccggaaccacttcagatgccaggtgcagttctacggcctgagcgagaacgacgagtggacccaggacagagccaagcccgtgacccagatcgtgtctgccgaagcctggggcagagccgatgatgtgattaagatccactggcaggaaaagaagtccaacaccatcctgggcagccaggaaggcaacaccatgaagaccaacgacacctacatgaagttcagctggctgaccgtgcccgagaagtccctggacaaagaacacagatgcatcgtgcggcacgaaaacaacaagaacggcgtggaccaggaaatcatcttcccacccatcaagaccgatgtgattacaatggaccccaaggacaactgctccaaggacgccaacgataccctgctgctccagctgaccaacaccagcgcctactacatgtacttgttgctgctgctgaagtccgtggtgtacttcgccatcatcacatgctgcctgctgcggagaaccgccttctgctgcaacggcgagaagtctagggccaagcgatctggatctggagcaacaaacttctcactactcaaacaagcaggtgacgtggaggagaatcccgggcctactagcatggccttaccagtgaccgccttgctcctgccgctggccttgctgctccacgccgccaggccgggcgtgacacagagccccacacacctgattaagaccagaggccagcaggccacactgagatgcagccctatcagcggccacaccagcgtgtactggtatcagcaggctctcggactgggcctccagttcctgctttggtacgacgagggcgaagagagaaaccggggcaacttccctcctcggttttccggcagacagttccccaactacagcagcgagctgaacgtgaacgccctggaactggaagatagcgccctgtacctgtgtgcctcttctcttggtggacctcgcggactggctggactgagaggggatgagcagtttttcggccctggcaccagactgaccgtgctggaaggcggaggaagcggcggaggatctggcgtgacacagagccccacacacctgattaagaccagaggccagcaggccacactgagatgcagccctatcagcggccacaccagcgtgtactggtatcagcaggctctcggactgggcctccagttcctgctttggtacgacgagggcgaagagagaaaccggggcaacttccctcctcggttttccggcagacagttccccaactacagcagcgagctgaacgtgaacgccctggaactggaagatagcgccctgtacctgtgtgccagctctctcggcggagatgaactgggagccgatggcaacgagcagttctttggccctggcaccagactgaccgtgctggaaggtaccggcggaggcggatctggcggcggaggtagcggtggcggaggatctgaattcgacatccagatgacacagagccctagcagcctgtctgccagcgtgggagacagagtgaccatcacatgcaaggccagcgaccacatcaacaactggctggcctggtatcagcagaagcctggacaggcccctaagctgctgatctacggcgctaccacactggaaacaggcgtgcccagcagattttctggcagcggctctggcaccgactacaccctgacaatatccagcctccagcctgaggacttcgccacctactactgtcagcagagctggaacaccccttggacattcggccagggcaccaagctggaaatcaagagaggcggaggcggaagtggaggcggaggatctggcggcggaggctctcaagttcagcttcaacagcctggcgctgagctggtcaaacctggcgcttctgtgaagatgagctgcaaagccagcggctacgccttcagcagctactggatcaactggatgaagcagaaacccggccagggactcgaatggatcggccaaatctatcccggcgacggcgacaccaactacaacggcaagttcaagggcagagccacactgaccgccgatacctctagcagcacagcctacatgcagctgagcagcctgaccagcgaagatagcgccgtgtacttctgtgcccggtccatcacaacagtcgtgggctgcgctatggactattggggccagggaacaagcgtgaccgtgtctagtacgcgtatccagaaccctgatcctgccgtgtaccagctgcgggatagcaagagcagcgacaagagcgtgtgtctgttcaccgacttcgacagccagaccaacgtgtcccagagcaaggactccgacgtgtacatcaccgataagtgcgtgctggacatgcggagcatggacttcaagagcaactccgccgtggcctggtccaacaagtccgatttcgcctgcgccaacgccttcaacaacagcattatccccgaggacacattcttcccaagccccgagagcagcgactccaccgaccacgtgaagcccaaagagacagagaacaccaagcagcccagcaagagctgccacaagcccaaggccatcgtgcacaccgagaaagtgaacatgatgagcctgaccgtgctgggcctgcggatgctgttcgccaaaaccgtggccgtgaacttcctgctgaccgccaagctgttcttcctccgcgccaagagaagcggatctggcgtgaagcagaccctgaatttcgacctgctgaagctggctggcgacgtggaatccaacccaggcccttctagaggccatatgaccgagtacaagcccacggtgcgcctcgccacccgcgacgacgtccccagggccgtacgcaccctcgccgccgcgttcgccgactaccccgccacgcgccacaccgtcgatccggaccgccacatcgagcgggtcaccgagctgcaagaactcttcctcacgcgcgtcgggctcgacatcggcaaggtgtgggtcgcggacgacggcgccgcggtggcggtctggaccacgccggagagcgtcgaagcgggggcggtgttcgccgagatcggcccgcgcatggccgagttgagcggttcccggctggccgcgcagcaacagatggaaggcctcctggcgccgcaccggcccaaggagcccgcgtggttcctggccaccgtcggcgtctcgcccgaccaccagggcaagggtctgggcagcgccgtcgtgctccccggagtggaggcggccgagcgcgccggggtgcccgccttcctggagacctccgcgccccgcaacctccccttctacgagcggctcggcttcaccgtcaccgccgacgtcgaggtgcccgaaggaccgcgcacctggtgcatgacccgcaagcccggtgcctga

SEQ ID NO: 17624 - DNA, 2574 bp, synthetic construct
  source 1..2574: mol_type = other DNA
atggccttaccagtgaccgccttgctcctgccgctggccttgctgctccacgccgccaggccgctcgaggaggaggacctgaagaacgtgttcccacctgaggtggccgtgttcgagcctagcgaggccgagatcagccacacccagaaagccaccctcgtgtgcctggctaccggcttctaccccgaccatgtggaactgtcttggtgggtcaacggcaaagaggtgcacagcggcgtgtgtaccgacccccagccactgaaagaacagcccgccctgaacgacagccggtactgcctgagcagcagactgagagtgtccgccaccttctggcagaacccccggaaccacttcagatgccaggtgcagttctacggcctgagcgagaacgacgagtggacccaggacagagccaagcccgtgacccagatcgtgtctgccgaagcctggggcagagccgatgatgtgattaagatccactggcaggaaaagaagtccaacaccatcctgggcagccaggaaggcaacaccatgaagaccaacgacacctacatgaagttcagctggctgaccgtgcccgagaagtccctggacaaagaacacagatgcatcgtgcggcacgaaaacaacaagaacggcgtggaccaggaaatcatcttcccacccatcaagaccgatgtgattacaatggaccccaaggacaactgctccaaggacgccaacgataccctgctgctccagctgaccaacaccagcgcctactacatgtacttgttgctgctgctgaagtccgtggtgtacttcgccatcatcacatgctgcctgctgcggagaaccgccttctgctgcaacggcgagaagtctagggccaagcgatctggatctggagcaacaaacttctcactactcaaacaagcaggtgacgtggaggagaatcccgggcctactagcatggccctgcccgtgacagccctgctgctgcctctggctctgctgctgcacgccgccagacccgatgaattcggctctgacctgggcatcaagctgctgttcgccgctgccaagggccaggacgacgaagtgcggattctgctggctgctggggccgacgtgaacgccaaggatttcgagggctacacccccctgcacgtggccgcctatgatggacacctggaaatcgtggaagtgctgctgaaggctggcgctgatgtgaatgccaaagacagccagggccggacccctctgcatgaagccgcctacagcggccatctggaaattgtggaagtgctgctgaaagccggggcagacgtgaacgctcaggacgacgctggcgagacaccagccgatctggctgcagcttggggccacgaagatatcgccgaggtgctgcagaagacgcgtatccagaaccctgatcctgccgtgtaccagctgcgggatagcaagagcagcgacaagagcgtgtgtctgttcaccgacttcgacagccagaccaacgtgtcccagagcaaggactccgacgtgtacatcaccgataagtgcgtgctggacatgcggagcatggacttcaagagcaactccgccgtggcctggtccaacaagtccgatttcgcctgcgccaacgccttcaacaacagcattatccccgaggacacattcttcccaagccccgagagcagcgactccaccgaccacgtgaagcccaaagagacagagaacaccaagcagcccagcaagagctgccacaagcccaaggccatcgtgcacaccgagaaagtgaacatgatgagcctgaccgtgctgggcctgcggatgctgttcgccaaaaccgtggccgtgaacttcctgctgaccgccaagctgttcttcctccgcgccaagagaagcggatctggcgtgaagcagaccctgaatttcgacctgctgaagctggctggcgacgtggaatccaacccaggcccttctagaggccatatgaccgagtacaagcccacggtgcgcctcgccacccgcgacgacgtccccagggccgtacgcaccctcgccgccgcgttcgccgactaccccgccacgcgccacaccgtcgatccggaccgccacatcgagcgggtcaccgagctgcaagaactcttcctcacgcgcgtcgggctcgacatcggcaaggtgtgggtcgcggacgacggcgccgcggtggcggtctggaccacgccggagagcgtcgaagcgggggcggtgttcgccgagatcggcccgcgcatggccgagttgagcggttcccggctggccgcgcagcaacagatggaaggcctcctggcgccgcaccggcccaaggagcccgcgtggttcctggccaccgtcggcgtctcgcccgaccaccagggcaagggtctgggcagcgccgtcgtgctccccggagtggaggcggccgagcgcgccggggtgcccgccttcctggagacctccgcgccccgcaacctccccttctacgagcggctcggcttcaccgtcaccgccgacgtcgaggtgcccgaaggaccgcgcacctggtgcatgacccgcaagcccggtgcctga

SEQ ID NO: 17625 - DNA, 2361 bp, synthetic construct
  source 1..2361: mol_type = other DNA
atggccttaccagtgaccgccttgctcctgccgctggccttgctgctccacgccgccaggccgctcgaggaggaggacctgaagaacgtgttcccacctgaggtggccgtgttcgagcctagcgaggccgagatcagccacacccagaaagccaccctcgtgtgcctggctaccggcttctaccccgaccatgtggaactgtcttggtgggtcaacggcaaagaggtgcacagcggcgtgtgtaccgacccccagccactgaaagaacagcccgccctgaacgacagccggtactgcctgagcagcagactgagagtgtccgccaccttctggcagaacccccggaaccacttcagatgccaggtgcagttctacggcctgagcgagaacgacgagtggacccaggacagagccaagcccgtgacccagatcgtgtctgccgaagcctggggcagagccgatgatgtgattaagatccactggcaggaaaagaagtccaacaccatcctgggcagccaggaaggcaacaccatgaagaccaacgacacctacatgaagttcagctggctgaccgtgcccgagaagtccctggacaaagaacacagatgcatcgtgcggcacgaaaacaacaagaacggcgtggaccaggaaatcatcttcccacccatcaagaccgatgtgattacaatggaccccaaggacaactgctccaaggacgccaacgataccctgctgctccagctgaccaacaccagcgcctactacatgtacttgttgctgctgctgaagtccgtggtgtacttcgccatcatcacatgctgcctgctgcggagaaccgccttctgctgcaacggcgagaagtctagggccaagcgatctggatctggagcaacaaacttctcactactcaaacaagcaggtgacgtggaggagaatcccgggcctactagcatggactggatttggcgcatccttttccttgtcggcgctgctaccggcgcccattccttcgaaggcagcggattcgaatacgccaaagagatgcggaacgcctactgggagatcgccctgctgcccaatctgaccaaccagcagaagagagcccccatcagaaagctgtacgacgacccctcccagagcagcgagctgctgtctgaggctaaaaaactgaacgatagccagacgcgtatccagaaccctgatcctgccgtgtaccagctgcgggatagcaagagcagcgacaagagcgtgtgtctgttcaccgacttcgacagccagaccaacgtgtcccagagcaaggactccgacgtgtacatcaccgataagtgcgtgctggacatgcggagcatggacttcaagagcaactccgccgtggcctggtccaacaagtccgatttcgcctgcgccaacgccttcaacaacagcattatccccgaggacacattcttcccaagccccgagagcagcgactccaccgaccacgtgaagcccaaagagacagagaacaccaagcagcccagcaagagctgccacaagcccaaggccatcgtgcacaccgagaaagtgaacatgatgagcctgaccgtgctgggcctgcggatgctgttcgccaaaaccgtggccgtgaacttcctgctgaccgccaagctgttcttcctccgcgccaagagaagcggatctggcgtgaagcagaccctgaatttcgacctgctgaagctggctggcgacgtggaatccaacccaggcccttctagaggccatatgaccgagtacaagcccacggtgcgcctcgccacccgcgacgacgtccccagggccgtacgcaccctcgccgccgcgttcgccgactaccccgccacgcgccacaccgtcgatccggaccgccacatcgagcgggtcaccgagctgcaagaactcttcctcacgcgcgtcgggctcgacatcggcaaggtgtgggtcgcggacgacggcgccgcggtggcggtctggaccacgccggagagcgtcgaagcgggggcggtgttcgccgagatcggcccgcgcatggccgagttgagcggttcccggctggccgcgcagcaacagatggaaggcctcctggcgccgcaccggcccaaggagcccgcgtggttcctggccaccgtcggcgtctcgcccgaccaccagggcaagggtctgggcagcgccgtcgtgctccccggagtggaggcggccgagcgcgccggggtgcccgccttcctggagacctccgcgccccgcaacctccccttctacgagcggctcggcttcaccgtcaccgccgacgtcgaggtgcccgaaggaccgcgcacctggtgcatgacccgcaagcccggtgcctga

SEQ ID NO: 17626 - DNA, 3027 bp, synthetic construct
  source 1..3027: mol_type = other DNA
atggccttaccagtgaccgccttgctcctgccgctggccttgctgctccacgccgccaggccgctcgaggaggaggacctgaagaacgtgttcccacctgaggtggccgtgttcgagcctagcgaggccgagatcagccacacccagaaagccaccctcgtgtgcctggctaccggcttctaccccgaccatgtggaactgtcttggtgggtcaacggcaaagaggtgcacagcggcgtgtgtaccgacccccagccactgaaagaacagcccgccctgaacgacagccggtactgcctgagcagcagactgagagtgtccgccaccttctggcagaacccccggaaccacttcagatgccaggtgcagttctacggcctgagcgagaacgacgagtggacccaggacagagccaagcccgtgacccagatcgtgtctgccgaagcctggggcagagccgatgatgtgattaagatccactggcaggaaaagaagtccaacaccatcctgggcagccaggaaggcaacaccatgaagaccaacgacacctacatgaagttcagctggctgaccgtgcccgagaagtccctggacaaagaacacagatgcatcgtgcggcacgaaaacaacaagaacggcgtggaccaggaaatcatcttcccacccatcaagaccgatgtgattacaatggaccccaaggacaactgctccaaggacgccaacgataccctgctgctccagctgaccaacaccagcgcctactacatgtacttgttgctgctgctgaagtccgtggtgtacttcgccatcatcacatgctgcctgctgcggagaaccgccttctgctgcaacggcgagaagtctagggccaagcgatctggatctggagcaacaaacttctcactactcaaacaagcaggtgacgtggaggagaatcccgggcctactagcatggccctgcccgtgacagccctgctgctgcctctggctctgctgctgcacgccgccagacccgatgaattcgaggtgcaactggtggaaagcggcggaggcctggtgcaggctggcggatctctgagactgagctgtgccgccagcggcatcaccttcagcatcaacacaatgggctggtacagacaggcccctggcaagcagagggaactggtggccctgatctccagcatcggcgacacctactacgccgacagcgtgaagggccggttcaccatcagccgggacaacgccaagaacaccgtgtacctccagatgaacagcctgaagcccgaggacaccgccgtgtactactgcaagcggttcagaacagccgcccagggcaccgattattggggccagggaacacaagtgaccgtgtcctctctcgagggaggaggcggctccgggggaggcggaagtggaggcggaggatctgggtctggaggaagcggatctggaggctcagggtcagggggctcaggcagtggaggctctttcgaagtgcaactggtggaatctgggggcggactggtgcagccaggcggaagtctgaggctgtcttgtgccgcctccggcagcatcttcggcttcaacgacatggcctggtatcggcaggctcccggaaaacagcgcgagctggtggctctgattagcagagtgggcgtgaccagcagcgccgactctgtgaagggcagattcacaatctccagagtgaacgccaaggatacagtgtacctccagatgaactctctgaaacctgaggatacagcagtgtactattgctacatggaccagcggctggacggcagcacactggcctactggggacagggaactcaagtgacagtgtctagcacgcgtatccagaaccctgatcctgccgtgtaccagctgcgggatagcaagagcagcgacaagagcgtgtgtctgttcaccgacttcgacagccagaccaacgtgtcccagagcaaggactccgacgtgtacatcaccgataagtgcgtgctggacatgcggagcatggacttcaagagcaactccgccgtggcctggtccaacaagtccgatttcgcctgcgccaacgccttcaacaacagcattatccccgaggacacattcttcccaagccccgagagcagcgactccaccgaccacgtgaagcccaaagagacagagaacaccaagcagcccagcaagagctgccacaagcccaaggccatcgtgcacaccgagaaagtgaacatgatgagcctgaccgtgctgggcctgcggatgctgttcgccaaaaccgtggccgtgaacttcctgctgaccgccaagctgttcttcctccgcgccaagagaagcggatctggcgtgaagcagaccctgaatttcgacctgctgaagctggctggcgacgtggaatccaacccaggcccttctagaggccatatgaccgagtacaagcccacggtgcgcctcgccacccgcgacgacgtccccagggccgtacgcaccctcgccgccgcgttcgccgactaccccgccacgcgccacaccgtcgatccggaccgccacatcgagcgggtcaccgagctgcaagaactcttcctcacgcgcgtcgggctcgacatcggcaaggtgtgggtcgcggacgacggcgccgcggtggcggtctggaccacgccggagagcgtcgaagcgggggcggtgttcgccgagatcggcccgcgcatggccgagttgagcggttcccggctggccgcgcagcaacagatggaaggcctcctggcgccgcaccggcccaaggagcccgcgtggttcctggccaccgtcggcgtctcgcccgaccaccagggcaagggtctgggcagcgccgtcgtgctccccggagtggaggcggccgagcgcgccggggtgcccgccttcctggagacctccgcgccccgcaacctccccttctacgagcggctcggcttcaccgtcaccgccgacgtcgaggtgcccgaaggaccgcgcacctggtgcatgacccgcaagcccggtgcctga

SEQ ID NO: 17627 - DNA, 2769 bp, synthetic construct
  source 1..2769: mol_type = other DNA
atggccttaccagtgaccgccttgctcctgccgctggccttgctgctccacgccgccaggccgctcgaggaggaggacctgaagaacgtgttcccacctgaggtggccgtgttcgagcctagcgaggccgagatcagccacacccagaaagccaccctcgtgtgcctggctaccggcttctaccccgaccatgtggaactgtcttggtgggtcaacggcaaagaggtgcacagcggcgtgtgtaccgacccccagccactgaaagaacagcccgccctgaacgacagccggtactgcctgagcagcagactgagagtgtccgccaccttctggcagaacccccggaaccacttcagatgccaggtgcagttctacggcctgagcgagaacgacgagtggacccaggacagagccaagcccgtgacccagatcgtgtctgccgaagcctggggcagagccgatgatgtgattaagatccactggcaggaaaagaagtccaacaccatcctgggcagccaggaaggcaacaccatgaagaccaacgacacctacatgaagttcagctggctgaccgtgcccgagaagtccctggacaaagaacacagatgcatcgtgcggcacgaaaacaacaagaacggcgtggaccaggaaatcatcttcccacccatcaagaccgatgtgattacaatggaccccaaggacaactgctccaaggacgccaacgataccctgctgctccagctgaccaacaccagcgcctactacatgtacttgttgctgctgctgaagtccgtggtgtacttcgccatcatcacatgctgcctgctgcggagaaccgccttctgctgcaacggcgagaagtctagggccaagcgatctggatctggagcaacaaacttctcactactcaaacaagcaggtgacgtggaggagaatcccgggcctactagcatggcccttccagtcactgccttgctgttgcctctggcgctcctgctccacgccgctagaccgggcatgagaaccgaggacctgcctaaggccgtggtgttcctggaaccccagtggtacagagtgctggaaaaggacagcgtgaccctgaagtgccagggcgcctacagccccgaggacaatagcacccagtggttccacaacgagagcctgatctccagccaggccagcagctacttcatcgacgccgccaccgtggacgacagcggcgagtatagatgccagaccaacctgagcaccctgagcgaccccgtgcagctggaagtgcacatcggatggctgctgctgcaggcccccagatgggtgttcaaagaagaggaccccatccacctgagatgccactcttggaagaacaccgccctgcacaaagtgacctacctgcagaacggcaagggcagaaagtacttccaccacaacagcgacttctacatccccaaggccaccctgaaggactccggctcctacttctgcagaggcctcgtgggcagcaagaacgtgtccagcgagacagtgaacatcaccatcacccagggcctggccgtgtctaccatcagcagctttttcccacccggctaccagacgcgtatccagaaccctgatcctgccgtgtaccagctgcgggatagcaagagcagcgacaagagcgtgtgtctgttcaccgacttcgacagccagaccaacgtgtcccagagcaaggactccgacgtgtacatcaccgataagtgcgtgctggacatgcggagcatggacttcaagagcaactccgccgtggcctggtccaacaagtccgatttcgcctgcgccaacgccttcaacaacagcattatccccgaggacacattcttcccaagccccgagagcagcgactccaccgaccacgtgaagcccaaagagacagagaacaccaagcagcccagcaagagctgccacaagcccaaggccatcgtgcacaccgagaaagtgaacatgatgagcctgaccgtgctgggcctgcggatgctgttcgccaaaaccgtggccgtgaacttcctgctgaccgccaagctgttcttcctccgcgccaagagaagcggatctggcgtgaagcagaccctgaatttcgacctgctgaagctggctggcgacgtggaatccaacccaggcccttctagaggccatatgaccgagtacaagcccacggtgcgcctcgccacccgcgacgacgtccccagggccgtacgcaccctcgccgccgcgttcgccgactaccccgccacgcgccacaccgtcgatccggaccgccacatcgagcgggtcaccgagctgcaagaactcttcctcacgcgcgtcgggctcgacatcggcaaggtgtgggtcgcggacgacggcgccgcggtggcggtctggaccacgccggagagcgtcgaagcgggggcggtgttcgccgagatcggcccgcgcatggccgagttgagcggttcccggctggccgcgcagcaacagatggaaggcctcctggcgccgcaccggcccaaggagcccgcgtggttcctggccaccgtcggcgtctcgcccgaccaccagggcaagggtctgggcagcgccgtcgtgctccccggagtggaggcggccgagcgcgccggggtgcccgccttcctggagacctccgcgccccgcaacctccccttctacgagcggctcggcttcaccgtcaccgccgacgtcgaggtgcccgaaggaccgcgcacctggtgcatgacccgcaagcccggtgcctga

SEQ ID NO: 17628 - DNA, 1650 bp, synthetic construct
  source 1..1650: mol_type = other DNA
atggccttaccagtgaccgccttgctcctgccgctggccttgctgctccacgccgccaggccgctcgaggaggaggacctgaagaacgtgttcccacctgaggtggccgtgttcgagcctagcgaggccgagatcagccacacccagaaagccaccctcgtgtgcctggctaccggcttctaccccgaccatgtggaactgtcttggtgggtcaacggcaaagaggtgcacagcggcgtgtgtaccgacccccagccactgaaagaacagcccgccctgaacgacagccggtactgcctgagcagcagactgagagtgtccgccaccttctggcagaacccccggaaccacttcagatgccaggtgcagttctacggcctgagcgagaacgacgagtggacccaggacagagccaagcccgtgacccagatcgtgtctgccgaagcctggggcagagccgatgatgtgattaagatccactggcaggaaaagaagtccaacaccatcctgggcagccaggaaggcaacaccatgaagaccaacgacacctacatgaagttcagctggctgaccgtgcccgagaagtccctggacaaagaacacagatgcatcgtgcggcacgaaaacaacaagaacggcgtggaccaggaaatcatcttcccacccatcaagaccgatgtgattacaatggaccccaaggacaactgctccaaggacgccaacgataccctgctgctccagctgaccaacaccagcgcctactacatgtacttgttgctgctgctgaagtccgtggtgtacttcgccatcatcacatgctgcctgctgcggagaaccgccttctgctgcaacggcgagaagtctagggccaagcgatctggatctggagcaacaaacttctcactactcaaacaagcaggtgacgtggaggagaatcccgggcctactagcgccaccatggccttaccagtgaccgccttgctcctgccgctggccttgctgctccacgccgccaggccgatggaccccgacctggaaatcagagccgccttcctgcggcagagaaacacagccctgagaacagaggtggccgagctggaacaagaggtgcagcggctggaaaacgaggtgtcccagtacgagacaagatacggccctctcggaggcggaaaaacgcgtatccagaaccctgatcctgccgtgtaccagctgcgggatagcaagagcagcgacaagagcgtgtgtctgttcaccgacttcgacagccagaccaacgtgtcccagagcaaggactccgacgtgtacatcaccgataagtgcgtgctggacatgcggagcatggacttcaagagcaactccgccgtggcctggtccaacaagtccgatttcgcctgcgccaacgccttcaacaacagcattatccccgaggacacattcttcccaagccccgagagcagcgactccaccgaccacgtgaagcccaaagagacagagaacaccaagcagcccagcaagagctgccacaagcccaaggccatcgtgcacaccgagaaagtgaacatgatgagcctgaccgtgctgggcctgcggatgctgttcgccaaaaccgtggccgtgaacttcctgctgaccgccaagctgttcttcctc

SEQ ID NO: 17629 - DNA, 1650 bp, synthetic construct
  source 1..1650: mol_type = other DNA
atggccttaccagtgaccgccttgctcctgccgctggccttgctgctccacgccgccaggccgctcgaggaggaggacctgaagaacgtgttcccacctgaggtggccgtgttcgagcctagcgaggccgagatcagccacacccagaaagccaccctcgtgtgcctggctaccggcttctaccccgaccatgtggaactgtcttggtgggtcaacggcaaagaggtgcacagcggcgtgtgtaccgacccccagccactgaaagaacagcccgccctgaacgacagccggtactgcctgagcagcagactgagagtgtccgccaccttctggcagaacccccggaaccacttcagatgccaggtgcagttctacggcctgagcgagaacgacgagtggacccaggacagagccaagcccgtgacccagatcgtgtctgccgaagcctggggcagagccgatgatgtgattaagatccactggcaggaaaagaagtccaacaccatcctgggcagccaggaaggcaacaccatgaagaccaacgacacctacatgaagttcagctggctgaccgtgcccgagaagtccctggacaaagaacacagatgcatcgtgcggcacgaaaacaacaagaacggcgtggaccaggaaatcatcttcccacccatcaagaccgatgtgattacaatggaccccaaggacaactgctccaaggacgccaacgataccctgctgctccagctgaccaacaccagcgcctactacatgtacttgttgctgctgctgaagtccgtggtgtacttcgccatcatcacatgctgcctgctgcggagaaccgccttctgctgcaacggcgagaagtctagggccaagcgatctggatctggagcaacaaacttctcactactcaaacaagcaggtgacgtggaggagaatcccgggcctactagcgccaccatggccttaccagtgaccgccttgctcctgccgctggccttgctgctccacgccgccaggccgatggaccctgatctcgaaattgaggccgcctttctggaacgcgagaacactgccctggaaaccagggtcgcagagctgagacagagagtgcagagactgcggaacagagtgtctcagtaccgcaccagatatggcccactcggcggaggtaaaacgcgtatccagaaccctgatcctgccgtgtaccagctgcgggatagcaagagcagcgacaagagcgtgtgtctgttcaccgacttcgacagccagaccaacgtgtcccagagcaaggactccgacgtgtacatcaccgataagtgcgtgctggacatgcggagcatggacttcaagagcaactccgccgtggcctggtccaacaagtccgatttcgcctgcgccaacgccttcaacaacagcattatccccgaggacacattcttcccaagccccgagagcagcgactccaccgaccacgtgaagcccaaagagacagagaacaccaagcagcccagcaagagctgccacaagcccaaggccatcgtgcacaccgagaaagtgaacatgatgagcctgaccgtgctgggcctgcggatgctgttcgccaaaaccgtggccgtgaacttcctgctgaccgccaagctgttcttcctc

SEQ ID NO: 17630 - DNA, 1581 bp, synthetic construct
  source 1..1581: mol_type = other DNA
atggccttaccagtgaccgccttgctcctgccgctggccttgctgctccacgccgccaggccgctcgaggaggaggacctgaagaacgtgttcccacctgaggtggccgtgttcgagcctagcgaggccgagatcagccacacccagaaagccaccctcgtgtgcctggctaccggcttctaccccgaccatgtggaactgtcttggtgggtcaacggcaaagaggtgcacagcggcgtgtgtaccgacccccagccactgaaagaacagcccgccctgaacgacagccggtactgcctgagcagcagactgagagtgtccgccaccttctggcagaacccccggaaccacttcagatgccaggtgcagttctacggcctgagcgagaacgacgagtggacccaggacagagccaagcccgtgacccagatcgtgtctgccgaagcctggggcagagccgatgatgtgattaagatccactggcaggaaaagaagtccaacaccatcctgggcagccaggaaggcaacaccatgaagaccaacgacacctacatgaagttcagctggctgaccgtgcccgagaagtccctggacaaagaacacagatgcatcgtgcggcacgaaaacaacaagaacggcgtggaccaggaaatcatcttcccacccatcaagaccgatgtgattacaatggaccccaaggacaactgctccaaggacgccaacgataccctgctgctccagctgaccaacaccagcgcctactacatgtacttgttgctgctgctgaagtccgtggtgtacttcgccatcatcacatgctgcctgctgcggagaaccgccttctgctgcaacggcgagaagtctagggccaagcgatctggatctggagcaacaaacttctcactactcaaacaagcaggtgacgtggaggagaatcccgggcctactagcgccaccatggccttaccagtgaccgccttgctcctgccgctggccttgctgctccacgccgccaggccggaagttgctgccctcgagaaggaggtagcagctttggaaaaagaagtcgcagcccttgagaaagaagttgcggctctggagaagacgcgtatccagaaccctgatcctgccgtgtaccagctgcgggatagcaagagcagcgacaagagcgtgtgtctgttcaccgacttcgacagccagaccaacgtgtcccagagcaaggactccgacgtgtacatcaccgataagtgcgtgctggacatgcggagcatggacttcaagagcaactccgccgtggcctggtccaacaagtccgatttcgcctgcgccaacgccttcaacaacagcattatccccgaggacacattcttcccaagccccgagagcagcgactccaccgaccacgtgaagcccaaagagacagagaacaccaagcagcccagcaagagctgccacaagcccaaggccatcgtgcacaccgagaaagtgaacatgatgagcctgaccgtgctgggcctgcggatgctgttcgccaaaaccgtggccgtgaacttcctgctgaccgccaagctgttcttcctc

SEQ ID NO: 17631 - DNA, 2355 bp, synthetic construct
  source 1..2355: mol_type = other DNA
atggccttaccagtgaccgccttgctcctgccgctggccttgctgctccacgccgccaggccgctcgaggaggaggacctgaagaacgtgttcccacctgaggtggccgtgttcgagcctagcgaggccgagatcagccacacccagaaagccaccctcgtgtgcctggctaccggcttctaccccgaccatgtggaactgtcttggtgggtcaacggcaaagaggtgcacagcggcgtgtgtaccgacccccagccactgaaagaacagcccgccctgaacgacagccggtactgcctgagcagcagactgagagtgtccgccaccttctggcagaacccccggaaccacttcagatgccaggtgcagttctacggcctgagcgagaacgacgagtggacccaggacagagccaagcccgtgacccagatcgtgtctgccgaagcctggggcagagccgatgatgtgattaagatccactggcaggaaaagaagtccaacaccatcctgggcagccaggaaggcaacaccatgaagaccaacgacacctacatgaagttcagctggctgaccgtgcccgagaagtccctggacaaagaacacagatgcatcgtgcggcacgaaaacaacaagaacggcgtggaccaggaaatcatcttcccacccatcaagaccgatgtgattacaatggaccccaaggacaactgctccaaggacgccaacgataccctgctgctccagctgaccaacaccagcgcctactacatgtacttgttgctgctgctgaagtccgtggtgtacttcgccatcatcacatgctgcctgctgcggagaaccgccttctgctgcaacggcgagaagtctagggccaagcgatctggatctggagcaacaaacttctcactactcaaacaagcaggtgacgtggaggagaatcccgggcctactagcgccaccatggccttaccagtgaccgccttgctcctgccgctggccttgctgctccacgccgccaggccgctgttcaatcaagaggtgcagatccctctgaccgagagctactgtggcccctgtcctaagaactggatctgctacaagaacaactgctaccagttcttcgacgagagcaagaattggtacgagagccaggccagctgcatgagccagaatgccagcctgctgaaggtgtacagcaaagaggaccaggacctgctgaaactggtcaagagcgcccactggatgggccttgtgcacatccccaccaatggctcttggcagtgggaggacggcagcattctgagccctaacctgctgaccatcatcgagatgcagaagggcgactgcgccctgtacgccagcagctttaagggctacatcgagaattgcagcaccccgaacacctacatctgtatgcagagaaccgtttctggcggaggcggctctggaggaggcggaagtggcggcggaggcgacctctttaatcaagaagtccagattccactcaccgaatcctactgcggaccttgtccaaaaaattggatttgttataagaacaactgttatcaattctttgatgagtctaaaaattggtatgagtcccaggcttcctgcatgtctcagaacgcttctctgctgaaagtctactctaaagaagatcaggatctcctgaagctcgtcaagtctgcccattggatggggctcgtccacattcctaccaacggaagctggcaatgggaagatggctccatcctgtctccaaatctgctcacgattattgaaatgcagaaaggggattgtgctctctacgccagctccttcaagggatatattgagaactgtagcacgcccaatacttatatctgtatgcaacggaccgtgacgcgtatccagaaccctgatcctgccgtgtaccagctgcgggatagcaagagcagcgacaagagcgtgtgtctgttcaccgacttcgacagccagaccaacgtgtcccagagcaaggactccgacgtgtacatcaccgataagtgcgtgctggacatgcggagcatggacttcaagagcaactccgccgtggcctggtccaacaagtccgatttcgcctgcgccaacgccttcaacaacagcattatccccgaggacacattcttcccaagccccgagagcagcgactccaccgaccacgtgaagcccaaagagacagagaacaccaagcagcccagcaagagctgccacaagcccaaggccatcgtgcacaccgagaaagtgaacatgatgagcctgaccgtgctgggcctgcggatgctgttcgccaaaaccgtggccgtgaacttcctgctgaccgccaagctgttcttcctc

SEQ ID NO: 17632 - DNA, 2355 bp, synthetic construct
  source 1..2355: mol_type = other DNA
atggccttaccagtgaccgccttgctcctgccgctggccttgctgctccacgccgccaggccgctcgaggaggaggacctgaagaacgtgttcccacctgaggtggccgtgttcgagcctagcgaggccgagatcagccacacccagaaagccaccctcgtgtgcctggctaccggcttctaccccgaccatgtggaactgtcttggtgggtcaacggcaaagaggtgcacagcggcgtgtgtaccgacccccagccactgaaagaacagcccgccctgaacgacagccggtactgcctgagcagcagactgagagtgtccgccaccttctggcagaacccccggaaccacttcagatgccaggtgcagttctacggcctgagcgagaacgacgagtggacccaggacagagccaagcccgtgacccagatcgtgtctgccgaagcctggggcagagccgatgatgtgattaagatccactggcaggaaaagaagtccaacaccatcctgggcagccaggaaggcaacaccatgaagaccaacgacacctacatgaagttcagctggctgaccgtgcccgagaagtccctggacaaagaacacagatgcatcgtgcggcacgaaaacaacaagaacggcgtggaccaggaaatcatcttcccacccatcaagaccgatgtgattacaatggaccccaaggacaactgctccaaggacgccaacgataccctgctgctccagctgaccaacaccagcgcctactacatgtacttgttgctgctgctgaagtccgtggtgtacttcgccatcatcacatgctgcctgctgcggagaaccgccttctgctgcaacggcgagaagtctagggccaagcgatctggatctggagcaacaaacttctcactactcaaacaagcaggtgacgtggaggagaatcccgggcctactagcgccaccatggccttaccagtgaccgccttgctcctgccgctggccttgctgctccacgccgccaggccgctgttcaatcaagaggtgcagatccctctgaccgagagctactgtggcccctgtcctaagaactggatctgctacaagaacaactgctaccagttcttcgacgagagcaagaattggtacgagagccaggccagctgcatgagccagaatgccagcctgctgaaggtgtacagcaaagaggaccaggacctgctgaaactggtcaagagcgcccactggatgggccttgtgcacatccccaccaatggctcttggcagtgggaggacggcagcattctgagccctaacctgctgaccatcatcgagatgcagaagggcgactgcgccctgtacgccagcagctttaagggcttcatcgagaattgcagcaccccgaacacctacatctgtatgcagagaaccgttggcggaggcggaagtggaggcggaggatctggcggcggaggctctgacctctttaatcaagaagtccagattccactcaccgaatcctactgcggaccttgtccaaaaaattggatttgttataagaacaactgttatcaattctttgatgagtctaaaaattggtatgagtcccaggcttcctgcatgtctcagaacgcttctctgctgaaagtctactctaaagaagatcaggatctcctgaagctcgtcaagtctgcccattggatggggctcgtccacattcctaccaacggaagctggcaatgggaagatggctccatcctgtctccaaatctgctcacgattattgaaatgcagaaaggggattgtgctctctacgccagctccttcaagggatttattgagaactgtagcacgcccaatacttatatctgtatgcaacggaccgtgacgcgtatccagaaccctgatcctgccgtgtaccagctgcgggatagcaagagcagcgacaagagcgtgtgtctgttcaccgacttcgacagccagaccaacgtgtcccagagcaaggactccgacgtgtacatcaccgataagtgcgtgctggacatgcggagcatggacttcaagagcaactccgccgtggcctggtccaacaagtccgatttcgcctgcgccaacgccttcaacaacagcattatccccgaggacacattcttcccaagccccgagagcagcgactccaccgaccacgtgaagcccaaagagacagagaacaccaagcagcccagcaagagctgccacaagcccaaggccatcgtgcacaccgagaaagtgaacatgatgagcctgaccgtgctgggcctgcggatgctgttcgccaaaaccgtggccgtgaacttcctgctgaccgccaagctgttcttcctc

SEQ ID NO: 17633 - DNA, 2433 bp, synthetic construct
  source 1..2433: mol_type = other DNA
atggccttaccagtgaccgccttgctcctgccgctggccttgctgctccacgccgccaggccgctcgaggaggaggacctgaagaacgtgttcccacctgaggtggccgtgttcgagcctagcgaggccgagatcagccacacccagaaagccaccctcgtgtgcctggctaccggcttctaccccgaccatgtggaactgtcttggtgggtcaacggcaaagaggtgcacagcggcgtgtgtaccgacccccagccactgaaagaacagcccgccctgaacgacagccggtactgcctgagcagcagactgagagtgtccgccaccttctggcagaacccccggaaccacttcagatgccaggtgcagttctacggcctgagcgagaacgacgagtggacccaggacagagccaagcccgtgacccagatcgtgtctgccgaagcctggggcagagccgatgatgtgattaagatccactggcaggaaaagaagtccaacaccatcctgggcagccaggaaggcaacaccatgaagaccaacgacacctacatgaagttcagctggctgaccgtgcccgagaagtccctggacaaagaacacagatgcatcgtgcggcacgaaaacaacaagaacggcgtggaccaggaaatcatcttcccacccatcaagaccgatgtgattacaatggaccccaaggacaactgctccaaggacgccaacgataccctgctgctccagctgaccaacaccagcgcctactacatgtacttgttgctgctgctgaagtccgtggtgtacttcgccatcatcacatgctgcctgctgcggagaaccgccttctgctgcaacggcgagaagtctagggccaagcgatctggatctggagcaacaaacttctcactactcaaacaagcaggtgacgtggaggagaatcccgggcctactagcatggccttaccagtgaccgccttgctcctgccgctggccttgctgctccacgccgccaggccgatggaccccgacctggaaatcagagccgccttcctgcggcagagaaacacagccctgagaacagaggtggccgagctggaacaagaggtgcagcggctggaaaacgaggtgtcccagtacgagacaagatacggccctctcggaggcggaaaaggtaccggcggaggcggatctggcggcggaggtagcggtggcggaggatctgaattcgacatccagatgacacagagccctagcagcctgtctgccagcgtgggagacagagtgaccatcacatgcaaggccagcgaccacatcaacaactggctggcctggtatcagcagaagcctggacaggcccctaagctgctgatctacggcgctaccacactggaaacaggcgtgcccagcagattttctggcagcggctctggcaccgactacaccctgacaatatccagcctccagcctgaggacttcgccacctactactgtcagcagagctggaacaccccttggacattcggccagggcaccaagctggaaatcaagagaggcggaggcggaagtggaggcggaggatctggcggcggaggctctcaagttcagcttcaacagcctggcgctgagctggtcaaacctggcgcttctgtgaagatgagctgcaaagccagcggctacgccttcagcagctactggatcaactggatgaagcagaaacccggccagggactcgaatggatcggccaaatctatcccggcgacggcgacaccaactacaacggcaagttcaagggcagagccacactgaccgccgatacctctagcagcacagcctacatgcagctgagcagcctgaccagcgaagatagcgccgtgtacttctgtgcccggtccatcacaacagtcgtgggctgcgctatggactattggggccagggaacaagcgtgaccgtgtctagtacgcgtatccagaaccctgatcctgccgtgtaccagctgcgggatagcaagagcagcgacaagagcgtgtgtctgttcaccgacttcgacagccagaccaacgtgtcccagagcaaggactccgacgtgtacatcaccgataagtgcgtgctggacatgcggagcatggacttcaagagcaactccgccgtggcctggtccaacaagtccgatttcgcctgcgccaacgccttcaacaacagcattatccccgaggacacattcttcccaagccccgagagcagcgactccaccgaccacgtgaagcccaaagagacagagaacaccaagcagcccagcaagagctgccacaagcccaaggccatcgtgcacaccgagaaagtgaacatgatgagcctgaccgtgctgggcctgcggatgctgttcgccaaaaccgtggccgtgaacttcctgctgaccgccaagctgttcttcctc

SEQ ID NO: 17634 - DNA, 3138 bp, synthetic construct
  source 1..3138: mol_type = other DNA
atggccttaccagtgaccgccttgctcctgccgctggccttgctgctccacgccgccaggccgctcgaggaggaggacctgaagaacgtgttcccacctgaggtggccgtgttcgagcctagcgaggccgagatcagccacacccagaaagccaccctcgtgtgcctggctaccggcttctaccccgaccatgtggaactgtcttggtgggtcaacggcaaagaggtgcacagcggcgtgtgtaccgacccccagccactgaaagaacagcccgccctgaacgacagccggtactgcctgagcagcagactgagagtgtccgccaccttctggcagaacccccggaaccacttcagatgccaggtgcagttctacggcctgagcgagaacgacgagtggacccaggacagagccaagcccgtgacccagatcgtgtctgccgaagcctggggcagagccgatgatgtgattaagatccactggcaggaaaagaagtccaacaccatcctgggcagccaggaaggcaacaccatgaagaccaacgacacctacatgaagttcagctggctgaccgtgcccgagaagtccctggacaaagaacacagatgcatcgtgcggcacgaaaacaacaagaacggcgtggaccaggaaatcatcttcccacccatcaagaccgatgtgattacaatggaccccaaggacaactgctccaaggacgccaacgataccctgctgctccagctgaccaacaccagcgcctactacatgtacttgttgctgctgctgaagtccgtggtgtacttcgccatcatcacatgctgcctgctgcggagaaccgccttctgctgcaacggcgagaagtctagggccaagcgatctggatctggagcaacaaacttctcactactcaaacaagcaggtgacgtggaggagaatcccgggcctactagcatggccttaccagtgaccgccttgctcctgccgctggccttgctgctccacgccgccaggccgctgttcaatcaagaggtgcagatccctctgaccgagagctactgtggcccctgtcctaagaactggatctgctacaagaacaactgctaccagttcttcgacgagagcaagaattggtacgagagccaggccagctgcatgagccagaatgccagcctgctgaaggtgtacagcaaagaggaccaggacctgctgaaactggtcaagagcgcccactggatgggccttgtgcacatccccaccaatggctcttggcagtgggaggacggcagcattctgagccctaacctgctgaccatcatcgagatgcagaagggcgactgcgccctgtacgccagcagctttaagggcttcatcgagaattgcagcaccccgaacacctacatctgtatgcagagaaccgttggcggaggcggaagtggaggcggaggatctggcggcggaggctctgacctctttaatcaagaagtccagattccactcaccgaatcctactgcggaccttgtccaaaaaattggatttgttataagaacaactgttatcaattctttgatgagtctaaaaattggtatgagtcccaggcttcctgcatgtctcagaacgcttctctgctgaaagtctactctaaagaagatcaggatctcctgaagctcgtcaagtctgcccattggatggggctcgtccacattcctaccaacggaagctggcaatgggaagatggctccatcctgtctccaaatctgctcacgattattgaaatgcagaaaggggattgtgctctctacgccagctccttcaagggatttattgagaactgtagcacgcccaatacttatatctgtatgcaacggaccgtgggtaccggcggaggcggatctggcggcggaggtagcggtggcggaggatctgaattcgacatccagatgacacagagccctagcagcctgtctgccagcgtgggagacagagtgaccatcacatgcaaggccagcgaccacatcaacaactggctggcctggtatcagcagaagcctggacaggcccctaagctgctgatctacggcgctaccacactggaaacaggcgtgcccagcagattttctggcagcggctctggcaccgactacaccctgacaatatccagcctccagcctgaggacttcgccacctactactgtcagcagagctggaacaccccttggacattcggccagggcaccaagctggaaatcaagagaggcggaggcggaagtggaggcggaggatctggcggcggaggctctcaagttcagcttcaacagcctggcgctgagctggtcaaacctggcgcttctgtgaagatgagctgcaaagccagcggctacgccttcagcagctactggatcaactggatgaagcagaaacccggccagggactcgaatggatcggccaaatctatcccggcgacggcgacaccaactacaacggcaagttcaagggcagagccacactgaccgccgatacctctagcagcacagcctacatgcagctgagcagcctgaccagcgaagatagcgccgtgtacttctgtgcccggtccatcacaacagtcgtgggctgcgctatggactattggggccagggaacaagcgtgaccgtgtctagtacgcgtatccagaaccctgatcctgccgtgtaccagctgcgggatagcaagagcagcgacaagagcgtgtgtctgttcaccgacttcgacagccagaccaacgtgtcccagagcaaggactccgacgtgtacatcaccgataagtgcgtgctggacatgcggagcatggacttcaagagcaactccgccgtggcctggtccaacaagtccgatttcgcctgcgccaacgccttcaacaacagcattatccccgaggacacattcttcccaagccccgagagcagcgactccaccgaccacgtgaagcccaaagagacagagaacaccaagcagcccagcaagagctgccacaagcccaaggccatcgtgcacaccgagaaagtgaacatgatgagcctgaccgtgctgggcctgcggatgctgttcgccaaaaccgtggccgtgaacttcctgctgaccgccaagctgttcttcctc

SEQ ID NO: 17635 - DNA, 2253 bp, synthetic construct
  source 1..2253: mol_type = other DNA
atggccttaccagtgaccgccttgctcctgccgctggccttgctgctccacgccgccaggccgctcgaggaggaggacctgaagaacgtgttcccacctgaggtggccgtgttcgagcctagcgaggccgagatcagccacacccagaaagccaccctcgtgtgcctggctaccggcttctaccccgaccatgtggaactgtcttggtgggtcaacggcaaagaggtgcacagcggcgtgtgtaccgacccccagccactgaaagaacagcccgccctgaacgacagccggtactgcctgagcagcagactgagagtgtccgccaccttctggcagaacccccggaaccacttcagatgccaggtgcagttctacggcctgagcgagaacgacgagtggacccaggacagagccaagcccgtgacccagatcgtgtctgccgaagcctggggcagagccgatgatgtgattaagatccactggcaggaaaagaagtccaacaccatcctgggcagccaggaaggcaacaccatgaagaccaacgacacctacatgaagttcagctggctgaccgtgcccgagaagtccctggacaaagaacacagatgcatcgtgcggcacgaaaacaacaagaacggcgtggaccaggaaatcatcttcccacccatcaagaccgatgtgattacaatggaccccaaggacaactgctccaaggacgccaacgataccctgctgctccagctgaccaacaccagcgcctactacatgtacttgttgctgctgctgaagtccgtggtgtacttcgccatcatcacatgctgcctgctgcggagaaccgccttctgctgcaacggcgagaagtctagggccaagcgatctggatctggagcaacaaacttctcactactcaaacaagcaggtgacgtggaggagaatcccgggcctactagcatggccttaccagtgaccgccttgctcctgccgctggccttgctgctccacgccgccaggccgcagtctgtgctgacacagcctcctagtgtgtctggcgctcctggacagagagtgaccatctcttgtaccggcagcagcagcaatatcggagccggctatgacgtgcactggtatcagcagctccctggcacagcccctaaactgctgatcttcggcaacagcaacagacccagcggcgtgcccgatagattcagcggctttaagagcggcacaagcgccagcctggctatcactggactgcaagccgaggacgaggccgactacttctgccagagctacgatagcagcctgagcggcagcggagtgtttggcacaggcaccaaagtgacagtgcttggcggcggaggcggaagtggaggcggaggatctggcggcggaggctctcaaatgcaactggttcaaagcggcggtggcctggtgcaacctggaagaagtctgagactgagctgtgccgccagcggcttcaccttcgatgattacgccatgcactgggtccgacaggcccctggaaaaggactggaatgggtgtccggcatctcctggaatagcggctctatcggctacgccgacagcgtgaagggcagattcaccatcagccgggacaacgccaagaacagcctgtacctccagatgaactccctgagagccgaggatacagccctgtactactgcgccaaggacatccacagcggcagctactacggcctgctgtactacgctatggacgtgtggggccagggcacaaccgtgacagtttcttctacgcgtatccagaaccctgatcctgccgtgtaccagctgcgggatagcaagagcagcgacaagagcgtgtgtctgttcaccgacttcgacagccagaccaacgtgtcccagagcaaggactccgacgtgtacatcaccgataagtgcgtgctggacatgcggagcatggacttcaagagcaactccgccgtggcctggtccaacaagtccgatttcgcctgcgccaacgccttcaacaacagcattatccccgaggacacattcttcccaagccccgagagcagcgactccaccgaccacgtgaagcccaaagagacagagaacaccaagcagcccagcaagagctgccacaagcccaaggccatcgtgcacaccgagaaagtgaacatgatgagcctgaccgtgctgggcctgcggatgctgttcgccaaaaccgtggccgtgaacttcctgctgaccgccaagctgttcttcctc

SEQ ID NO: 17636 - DNA, 1764 bp, synthetic construct
  source 1..1764: mol_type = other DNA
atggccttaccagtgaccgccttgctcctgccgctggccttgctgctccacgccgccaggccgctcgaggaggaggacctgaagaacgtgttcccacctgaggtggccgtgttcgagcctagcgaggccgagatcagccacacccagaaagccaccctcgtgtgcctggctaccggcttctaccccgaccatgtggaactgtcttggtgggtcaacggcaaagaggtgcacagcggcgtgtgtaccgacccccagccactgaaagaacagcccgccctgaacgacagccggtactgcctgagcagcagactgagagtgtccgccaccttctggcagaacccccggaaccacttcagatgccaggtgcagttctacggcctgagcgagaacgacgagtggacccaggacagagccaagcccgtgacccagatcgtgtctgccgaagcctggggcagagccgatgatgtgattaagatccactggcaggaaaagaagtccaacaccatcctgggcagccaggaaggcaacaccatgaagaccaacgacacctacatgaagttcagctggctgaccgtgcccgagaagtccctggacaaagaacacagatgcatcgtgcggcacgaaaacaacaagaacggcgtggaccaggaaatcatcttcccacccatcaagaccgatgtgattacaatggaccccaaggacaactgctccaaggacgccaacgataccctgctgctccagctgaccaacaccagcgcctactacatgtacttgttgctgctgctgaagtccgtggtgtacttcgccatcatcacatgctgcctgctgcggagaaccgccttctgctgcaacggcgagaagtctagggccaagcgatctggatctggagcaacaaacttctcactactcaaacaagcaggtgacgtggaggagaatcccgggcctactagcatggccttaccagtgaccgccttgctcctgccgctggccttgctgctccacgccgccaggccgatgtgtatgccctgcttcaccaccgaccatcagatggcccggaagtgcgacgattgctgtggcggaaaaggcagaggcaagtgctacggccctcagtgcttgtgtagactcgagggcggaggcggaagtggaggcggaggatctggcggcggaggctctttcgaagtgtgtatgccttgttttaccacggatcaacaaatggctcgcaagtgttctgactgctgcggaggcaaaggccggggaaagtgttatggcccacagtgtctgtgccggacgcgtatccagaaccctgatcctgccgtgtaccagctgcgggatagcaagagcagcgacaagagcgtgtgtctgttcaccgacttcgacagccagaccaacgtgtcccagagcaaggactccgacgtgtacatcaccgataagtgcgtgctggacatgcggagcatggacttcaagagcaactccgccgtggcctggtccaacaagtccgatttcgcctgcgccaacgccttcaacaacagcattatccccgaggacacattcttcccaagccccgagagcagcgactccaccgaccacgtgaagcccaaagagacagagaacaccaagcagcccagcaagagctgccacaagcccaaggccatcgtgcacaccgagaaagtgaacatgatgagcctgaccgtgctgggcctgcggatgctgttcgccaaaaccgtggccgtgaacttcctgctgaccgccaagctgttcttcctc

SEQ ID NO: 17637 - DNA, 2553 bp, synthetic construct
  source 1..2553: mol_type = other DNA
atggccttaccagtgaccgccttgctcctgccgctggccttgctgctccacgccgccaggccgctcgaggaggaggacctgaagaacgtgttcccacctgaggtggccgtgttcgagcctagcgaggccgagatcagccacacccagaaagccaccctcgtgtgcctggctaccggcttctaccccgaccatgtggaactgtcttggtgggtcaacggcaaagaggtgcacagcggcgtgtgtaccgacccccagccactgaaagaacagcccgccctgaacgacagccggtactgcctgagcagcagactgagagtgtccgccaccttctggcagaacccccggaaccacttcagatgccaggtgcagttctacggcctgagcgagaacgacgagtggacccaggacagagccaagcccgtgacccagatcgtgtctgccgaagcctggggcagagccgatgatgtgattaagatccactggcaggaaaagaagtccaacaccatcctgggcagccaggaaggcaacaccatgaagaccaacgacacctacatgaagttcagctggctgaccgtgcccgagaagtccctggacaaagaacacagatgcatcgtgcggcacgaaaacaacaagaacggcgtggaccaggaaatcatcttcccacccatcaagaccgatgtgattacaatggaccccaaggacaactgctccaaggacgccaacgataccctgctgctccagctgaccaacaccagcgcctactacatgtacttgttgctgctgctgaagtccgtggtgtacttcgccatcatcacatgctgcctgctgcggagaaccgccttctgctgcaacggcgagaagtctagggccaagcgatctggatctggagcaacaaacttctcactactcaaacaagcaggtgacgtggaggagaatcccgggcctactagcatggccttaccagtgaccgccttgctcctgccgctggccttgctgctccacgccgccaggccgatgtgtatgccctgcttcaccaccgaccatcagatggcccggaagtgcgacgattgctgtggcggaaaaggcagaggcaagtgctacggccctcagtgcttgtgtagactcgagggcggaggcggaagtggaggcggaggatctggcggcggaggctctttcgaagtgtgtatgccttgttttaccacggatcaacaaatggctcgcaagtgttctgactgctgcggaggcaaaggccggggaaagtgttatggcccacagtgtctgtgccggggtaccggcggaggcggatctggcggcggaggtagcggtggcggaggatctgaattcgacatccagatgacacagagccctagcagcctgtctgccagcgtgggagacagagtgaccatcacatgcaaggccagcgaccacatcaacaactggctggcctggtatcagcagaagcctggacaggcccctaagctgctgatctacggcgctaccacactggaaacaggcgtgcccagcagattttctggcagcggctctggcaccgactacaccctgacaatatccagcctccagcctgaggacttcgccacctactactgtcagcagagctggaacaccccttggacattcggccagggcaccaagctggaaatcaagagaggcggaggcggaagtggaggcggaggatctggcggcggaggctctcaagttcagcttcaacagcctggcgctgagctggtcaaacctggcgcttctgtgaagatgagctgcaaagccagcggctacgccttcagcagctactggatcaactggatgaagcagaaacccggccagggactcgaatggatcggccaaatctatcccggcgacggcgacaccaactacaacggcaagttcaagggcagagccacactgaccgccgatacctctagcagcacagcctacatgcagctgagcagcctgaccagcgaagatagcgccgtgtacttctgtgcccggtccatcacaacagtcgtgggctgcgctatggactattggggccagggaacaagcgtgaccgtgtctagtacgcgtatccagaaccctgatcctgccgtgtaccagctgcgggatagcaagagcagcgacaagagcgtgtgtctgttcaccgacttcgacagccagaccaacgtgtcccagagcaaggactccgacgtgtacatcaccgataagtgcgtgctggacatgcggagcatggacttcaagagcaactccgccgtggcctggtccaacaagtccgatttcgcctgcgccaacgccttcaacaacagcattatccccgaggacacattcttcccaagccccgagagcagcgactccaccgaccacgtgaagcccaaagagacagagaacaccaagcagcccagcaagagctgccacaagcccaaggccatcgtgcacaccgagaaagtgaacatgatgagcctgaccgtgctgggcctgcggatgctgttcgccaaaaccgtggccgtgaacttcctgctgaccgccaagctgttcttcctc

SEQ ID NO: 17638 - DNA, 2778 bp, synthetic construct
  source 1..2778: mol_type = other DNA
atggccttaccagtgaccgccttgctcctgccgctggccttgctgctccacgccgccaggccgctcgaggaggaggacctgaagaacgtgttcccacctgaggtggccgtgttcgagcctagcgaggccgagatcagccacacccagaaagccaccctcgtgtgcctggctaccggcttctaccccgaccatgtggaactgtcttggtgggtcaacggcaaagaggtgcacagcggcgtgtgtaccgacccccagccactgaaagaacagcccgccctgaacgacagccggtactgcctgagcagcagactgagagtgtccgccaccttctggcagaacccccggaaccacttcagatgccaggtgcagttctacggcctgagcgagaacgacgagtggacccaggacagagccaagcccgtgacccagatcgtgtctgccgaagcctggggcagagccgatgatgtgattaagatccactggcaggaaaagaagtccaacaccatcctgggcagccaggaaggcaacaccatgaagaccaacgacacctacatgaagttcagctggctgaccgtgcccgagaagtccctggacaaagaacacagatgcatcgtgcggcacgaaaacaacaagaacggcgtggaccaggaaatcatcttcccacccatcaagaccgatgtgattacaatggaccccaaggacaactgctccaaggacgccaacgataccctgctgctccagctgaccaacaccagcgcctactacatgtacttgttgctgctgctgaagtccgtggtgtacttcgccatcatcacatgctgcctgctgcggagaaccgccttctgctgcaacggcgagaagtctagggccaagcgatctggatctggagcaacaaacttctcactactcaaacaagcaggtgacgtggaggagaatcccgggcctactagcatggccttaccagtgaccgccttgctcctgccgctggccttgctgctccacgccgccaggccgagccccgtagctcctgcctgtgaccccagactcctaaataaactgctgcgtgactcccacctccttcacagccgactgagtcagtgtcccgacgtggaccctttgtctatccctgttctgctgcctgctgtggactttagcctgggagaatggaaaacccagacggaacagagcaaggcacaggacattctaggggcagtgtcccttctactggagggagtgatggcagcacgaggacagttggaaccctcctgcctctcatccctcctgggacagctttctgggcaggttcgcctcctcttgggggccctgcagggcctcctaggaacccagcttcctctacagggcaggaccacagctcacaaggaccccaatgccctcttcttgagcttgcaacaactgcttcggggaaaggtgcgcttcctgcttctggtagaaggtcccaccctctgtgtcagacggaccctgccaaccacagctgtcccaagcagtacttctggtaccggcggaggcggatctggcggcggaggtagcggtggcggaggatctgaattcgacatccagatgacacagagccctagcagcctgtctgccagcgtgggagacagagtgaccatcacatgcaaggccagcgaccacatcaacaactggctggcctggtatcagcagaagcctggacaggcccctaagctgctgatctacggcgctaccacactggaaacaggcgtgcccagcagattttctggcagcggctctggcaccgactacaccctgacaatatccagcctccagcctgaggacttcgccacctactactgtcagcagagctggaacaccccttggacattcggccagggcaccaagctggaaatcaagagaggcggaggcggaagtggaggcggaggatctggcggcggaggctctcaagttcagcttcaacagcctggcgctgagctggtcaaacctggcgcttctgtgaagatgagctgcaaagccagcggctacgccttcagcagctactggatcaactggatgaagcagaaacccggccagggactcgaatggatcggccaaatctatcccggcgacggcgacaccaactacaacggcaagttcaagggcagagccacactgaccgccgatacctctagcagcacagcctacatgcagctgagcagcctgaccagcgaagatagcgccgtgtacttctgtgcccggtccatcacaacagtcgtgggctgcgctatggactattggggccagggaacaagcgtgaccgtgtctagtacgcgtatccagaaccctgatcctgccgtgtaccagctgcgggatagcaagagcagcgacaagagcgtgtgtctgttcaccgacttcgacagccagaccaacgtgtcccagagcaaggactccgacgtgtacatcaccgataagtgcgtgctggacatgcggagcatggacttcaagagcaactccgccgtggcctggtccaacaagtccgatttcgcctgcgccaacgccttcaacaacagcattatccccgaggacacattcttcccaagccccgagagcagcgactccaccgaccacgtgaagcccaaagagacagagaacaccaagcagcccagcaagagctgccacaagcccaaggccatcgtgcacaccgagaaagtgaacatgatgagcctgaccgtgctgggcctgcggatgctgttcgccaaaaccgtggccgtgaacttcctgctgaccgccaagctgttcttcctc

SEQ ID NO: 17639 - DNA, 2499 bp, synthetic construct
  source 1..2499: mol_type = other DNA
atggccttaccagtgaccgccttgctcctgccgctggccttgctgctccacgccgccaggccgctcgaggaggaggacctgaagaacgtgttcccacctgaggtggccgtgttcgagcctagcgaggccgagatcagccacacccagaaagccaccctcgtgtgcctggctaccggcttctaccccgaccatgtggaactgtcttggtgggtcaacggcaaagaggtgcacagcggcgtgtgtaccgacccccagccactgaaagaacagcccgccctgaacgacagccggtactgcctgagcagcagactgagagtgtccgccaccttctggcagaacccccggaaccacttcagatgccaggtgcagttctacggcctgagcgagaacgacgagtggacccaggacagagccaagcccgtgacccagatcgtgtctgccgaagcctggggcagagccgatgatgtgattaagatccactggcaggaaaagaagtccaacaccatcctgggcagccaggaaggcaacaccatgaagaccaacgacacctacatgaagttcagctggctgaccgtgcccgagaagtccctggacaaagaacacagatgcatcgtgcggcacgaaaacaacaagaacggcgtggaccaggaaatcatcttcccacccatcaagaccgatgtgattacaatggaccccaaggacaactgctccaaggacgccaacgataccctgctgctccagctgaccaacaccagcgcctactacatgtacttgttgctgctgctgaagtccgtggtgtacttcgccatcatcacatgctgcctgctgcggagaaccgccttctgctgcaacggcgagaagtctagggccaagcgatctggatctggagcaacaaacttctcactactcaaacaagcaggtgacgtggaggagaatcccgggcctactagcatggccttaccagtgaccgccttgctcctgccgctggccttgctgctccacgccgccaggccgatgggcagctgggaagagttcgagctgagactgaacgccatcgaggaacggctgtatgccctcggaggatctgaagccgagctggcctacttcgagtacgtgatcgccgacttcgagggcaacctgcagcggtacaaaggcaagggcaaccctgaagtggaagccctgtacttcgaggccgacgccatcttcgaggaactggtggcctacagacacaacggtaccggcggaggcggatctggcggcggaggtagcggtggcggaggatctgaattcgacatccagatgacacagagccctagcagcctgtctgccagcgtgggagacagagtgaccatcacatgcaaggccagcgaccacatcaacaactggctggcctggtatcagcagaagcctggacaggcccctaagctgctgatctacggcgctaccacactggaaacaggcgtgcccagcagattttctggcagcggctctggcaccgactacaccctgacaatatccagcctccagcctgaggacttcgccacctactactgtcagcagagctggaacaccccttggacattcggccagggcaccaagctggaaatcaagagaggcggaggcggaagtggaggcggaggatctggcggcggaggctctcaagttcagcttcaacagcctggcgctgagctggtcaaacctggcgcttctgtgaagatgagctgcaaagccagcggctacgccttcagcagctactggatcaactggatgaagcagaaacccggccagggactcgaatggatcggccaaatctatcccggcgacggcgacaccaactacaacggcaagttcaagggcagagccacactgaccgccgatacctctagcagcacagcctacatgcagctgagcagcctgaccagcgaagatagcgccgtgtacttctgtgcccggtccatcacaacagtcgtgggctgcgctatggactattggggccagggaacaagcgtgaccgtgtctagtacgcgtatccagaaccctgatcctgccgtgtaccagctgcgggatagcaagagcagcgacaagagcgtgtgtctgttcaccgacttcgacagccagaccaacgtgtcccagagcaaggactccgacgtgtacatcaccgataagtgcgtgctggacatgcggagcatggacttcaagagcaactccgccgtggcctggtccaacaagtccgatttcgcctgcgccaacgccttcaacaacagcattatccccgaggacacattcttcccaagccccgagagcagcgactccaccgaccacgtgaagcccaaagagacagagaacaccaagcagcccagcaagagctgccacaagcccaaggccatcgtgcacaccgagaaagtgaacatgatgagcctgaccgtgctgggcctgcggatgctgttcgccaaaaccgtggccgtgaacttcctgctgaccgccaagctgttcttcctc

SEQ ID NO: 17640 - DNA, 2919 bp, synthetic construct
  source 1..2919: mol_type = other DNA
atggccttaccagtgaccgccttgctcctgccgctggccttgctgctccacgccgccaggccgctcgagatccagaaccctgatcctgccgtgtaccagctgcgggatagcaagagcagcgacaagagcgtgtgtctgttcaccgacttcgacagccagaccaacgtgtcccagagcaaggactccgacgtgtacatcaccgataagtgcgtgctggacatgcggagcatggacttcaagagcaactccgccgtggcctggtccaacaagtccgatttcgcctgcgccaacgccttcaacaacagcattatccccgaggacacattcttcccaagccccgagagcagcgactccaccgaccacgtgaagcccaaagagacagagaacaccaagcagcccagcaagagctgccacaagcccaaggccatcgtgcacaccgagaaagtgaacatgatgagcctgaccgtgctgggcctgcggatgctgttcgccaaaaccgtggccgtgaacttcctgctgaccgccaagctgttcttcctcagggccaagcgatctggatctggagcaacaaacttctcactactcaaacaagcaggtgacgtggaggagaatcccgggcctactagcatggccttaccagtgaccgccttgctcctgccgctggccttgctgctccacgccgccaggccggacatccagatgacacagactacatcctccctgtctgcctctctgggagacagagtcaccatcagttgcagggcaagtcaggacattagtaaatatttaaattggtatcagcagaaaccagatggaactgttaaactcctgatctaccatacatcaagattacactcaggagtcccatcaaggttcagtggcagtgggtctggaacagattattctctcaccattagcaacctggagcaagaagatattgccacttacttttgccaacagggtaatacgcttccgtacacgttcggaggggggaccaagctggagatcacaggtggcggtggctcgggcggtggtgggtcgggtggcggcggatctgaggtgaaactgcaggagtcaggacctggcctggtggcgccctcacagagcctgtccgtcacatgcactgtctcaggggtctcattacccgactatggtgtaagctggattcgccagcctccacgaaagggtctggagtggctgggagtaatatggggtagtgaaaccacatactataattcagctctcaaatccagactgaccatcatcaaggacaactccaagagccaagttttcttaaaaatgaacagtctgcaaactgatgacacagccatttactactgtgccaaacattattactacggtggtagctatgctatggactactggggtcaaggaacctcagtcaccgtctcctcaacgcgtgaggaggacctgaagaacgtgttcccacctgaggtggccgtgttcgagcctagcgaggccgagatcagccacacccagaaagccaccctcgtgtgcctggctaccggcttctaccccgaccatgtggaactgtcttggtgggtcaacggcaaagaggtgcacagcggcgtgtgtaccgacccccagccactgaaagaacagcccgccctgaacgacagccggtactgcctgagcagcagactgagagtgtccgccaccttctggcagaacccccggaaccacttcagatgccaggtgcagttctacggcctgagcgagaacgacgagtggacccaggacagagccaagcccgtgacccagatcgtgtctgccgaagcctggggcagagccgatgatgtgattaagatccactggcaggaaaagaagtccaacaccatcctgggcagccaggaaggcaacaccatgaagaccaacgacacctacatgaagttcagctggctgaccgtgcccgagaagtccctggacaaagaacacagatgcatcgtgcggcacgaaaacaacaagaacggcgtggaccaggaaatcatcttcccacccatcaagaccgatgtgattacaatggaccccaaggacaactgctccaaggacgccaacgataccctgctgctccagctgaccaacaccagcgcctactacatgtacttgttgctgctgctgaagtccgtggtgtacttcgccatcatcacatgctgcctgctgcggagaaccgccttctgctgcaacggcgagaagtctcgcgccaagagaagcggatctggcgtgaagcagaccctgaatttcgacctgctgaagctggctggcgacgtggaatccaacccaggcccttctagaggccatatgaccgagtacaagcccacggtgcgcctcgccacccgcgacgacgtccccagggccgtacgcaccctcgccgccgcgttcgccgactaccccgccacgcgccacaccgtcgatccggaccgccacatcgagcgggtcaccgagctgcaagaactcttcctcacgcgcgtcgggctcgacatcggcaaggtgtgggtcgcggacgacggcgccgcggtggcggtctggaccacgccggagagcgtcgaagcgggggcggtgttcgccgagatcggcccgcgcatggccgagttgagcggttcccggctggccgcgcagcaacagatggaaggcctcctggcgccgcaccggcccaaggagcccgcgtggttcctggccaccgtcggcgtctcgcccgaccaccagggcaagggtctgggcagcgccgtcgtgctccccggagtggaggcggccgagcgcgccggggtgcccgccttcctggagacctccgcgccccgcaacctccccttctacgagcggctcggcttcaccgtcaccgccgacgtcgaggtgcccgaaggaccgcgcacctggtgcatgacccgcaagcccggtgcctga

SEQ ID NO: 17641 - DNA, 2922 bp, synthetic construct
  source 1..2922: mol_type = other DNA
atggccttaccagtgaccgccttgctcctgccgctggccttgctgctccacgccgccaggccgctcgagatccagaaccctgatcctgccgtgtaccagctgcgggatagcaagagcagcgacaagagcgtgtgtctgttcaccgacttcgacagccagaccaacgtgtcccagagcaaggactccgacgtgtacatcaccgataagtgcgtgctggacatgcggagcatggacttcaagagcaactccgccgtggcctggtccaacaagtccgatttcgcctgcgccaacgccttcaacaacagcattatccccgaggacacattcttcccaagccccgagagcagcgactccaccgaccacgtgaagcccaaagagacagagaacaccaagcagcccagcaagagctgccacaagcccaaggccatcgtgcacaccgagaaagtgaacatgatgagcctgaccgtgctgggcctgcggatgctgttcgccaaaaccgtggccgtgaacttcctgctgaccgccaagctgttcttcctcagggccaagcgatctggatctggagcaacaaacttctcactactcaaacaagcaggtgacgtggaggagaatcccgggcctactagcaccatggccttaccagtgaccgccttgctcctgccgctggccttgctgctccacgccgccaggccggagatcgtgatgacccagagccctgccaccctgtctctgagccctggcgaaagagccaccctgagctgtagagccagccaggacatcagcaagtacctgaactggtatcagcagaagcccggccaggcccccagactgctgatctaccacaccagcagactgcacagcggcatccccgccagattttctggctctggcagcggcaccgactacaccctgacaatcagcagcctccagcccgaggacttcgccgtgtacttctgtcagcaaggcaacaccctgccctacaccttcggccagggcaccaagctggaaatcaagggcggaggcggaagtggaggcggaggatctggcggcggaggctctcaggtgcaactccaggaatctggccctggcctcgtgaagcccagcgagacactgagcctgacctgtaccgtgtccggcgtgtccctgcctgactatggcgtgtcctggatcagacagccccctggcaagggcctggaatggatcggagtgatttggggcagcgaaaccacctactacaacagctccctgaagtccagagtgaccatctccaaggacaactccaagaaccaggtgtccctgaagctgagcagcgtgacagccgccgacaccgccgtgtattactgcgccaagcactactactacggcggcagctacgctatggactactggggccagggaaccctcgtgaccgtgtctagtacgcgtgaggaggacctgaagaacgtgttcccacctgaggtggccgtgttcgagcctagcgaggccgagatcagccacacccagaaagccaccctcgtgtgcctggctaccggcttctaccccgaccatgtggaactgtcttggtgggtcaacggcaaagaggtgcacagcggcgtgtgtaccgacccccagccactgaaagaacagcccgccctgaacgacagccggtactgcctgagcagcagactgagagtgtccgccaccttctggcagaacccccggaaccacttcagatgccaggtgcagttctacggcctgagcgagaacgacgagtggacccaggacagagccaagcccgtgacccagatcgtgtctgccgaagcctggggcagagccgatgatgtgattaagatccactggcaggaaaagaagtccaacaccatcctgggcagccaggaaggcaacaccatgaagaccaacgacacctacatgaagttcagctggctgaccgtgcccgagaagtccctggacaaagaacacagatgcatcgtgcggcacgaaaacaacaagaacggcgtggaccaggaaatcatcttcccacccatcaagaccgatgtgattacaatggaccccaaggacaactgctccaaggacgccaacgataccctgctgctccagctgaccaacaccagcgcctactacatgtacttgttgctgctgctgaagtccgtggtgtacttcgccatcatcacatgctgcctgctgcggagaaccgccttctgctgcaacggcgagaagtctcgcgccaagagaagcggatctggcgtgaagcagaccctgaatttcgacctgctgaagctggctggcgacgtggaatccaacccaggcccttctagaggccatatgaccgagtacaagcccacggtgcgcctcgccacccgcgacgacgtccccagggccgtacgcaccctcgccgccgcgttcgccgactaccccgccacgcgccacaccgtcgatccggaccgccacatcgagcgggtcaccgagctgcaagaactcttcctcacgcgcgtcgggctcgacatcggcaaggtgtgggtcgcggacgacggcgccgcggtggcggtctggaccacgccggagagcgtcgaagcgggggcggtgttcgccgagatcggcccgcgcatggccgagttgagcggttcccggctggccgcgcagcaacagatggaaggcctcctggcgccgcaccggcccaaggagcccgcgtggttcctggccaccgtcggcgtctcgcccgaccaccagggcaagggtctgggcagcgccgtcgtgctccccggagtggaggcggccgagcgcgccggggtgcccgccttcctggagacctccgcgccccgcaacctccccttctacgagcggctcggcttcaccgtcaccgccgacgtcgaggtgcccgaaggaccgcgcacctggtgcatgacccgcaagcccggtgcctga

SEQ ID NO: 17642 - DNA, 2925 bp, synthetic construct
  source 1..2925: mol_type = other DNA
atggccttaccagtgaccgccttgctcctgccgctggccttgctgctccacgccgccaggccgctcgagatccagaaccctgatcctgccgtgtaccagctgcgggatagcaagagcagcgacaagagcgtgtgtctgttcaccgacttcgacagccagaccaacgtgtcccagagcaaggactccgacgtgtacatcaccgataagtgcgtgctggacatgcggagcatggacttcaagagcaactccgccgtggcctggtccaacaagtccgatttcgcctgcgccaacgccttcaacaacagcattatccccgaggacacattcttcccaagccccgagagcagcgactccaccgaccacgtgaagcccaaagagacagagaacaccaagcagcccagcaagagctgccacaagcccaaggccatcgtgcacaccgagaaagtgaacatgatgagcctgaccgtgctgggcctgcggatgctgttcgccaaaaccgtggccgtgaacttcctgctgaccgccaagctgttcttcctcagggccaagcgatctggatctggagcaacaaacttctcactactcaaacaagcaggtgacgtggaggagaatcccgggcctactagcaccatggccttaccagtgaccgccttgctcctgccgctggccttgctgctccacgccgccaggccggacgagatcgtgctgacacagagccccgccaccctgtcactgtctccaggcgaaagagccaccctgagctgtagcgccagcagcagcgtgtcctacatgcactggtatcagcagaagcccggccaggcccccagactgctgatctacgataccagcaagctggcctccggcatccccgccagattttctggcagcggctccggcaccgacttcaccctgacaatcagcagcctggaacccgaggacgtggccgtgtactactgttttcaaggcagcgtgtaccccttcaccttcggccagggcaccaagctggaaatcaagagaggtggcggtggctcgggcggtggtgggtcgggtggcggcggatctcaggtgcagctccaggaatctggccctggcctcgtgaagcctagccagaccctgagcctgacctgtaccgtgtctggcggcagcatcagcacaagcggcatgggcgtgggctggatcagacagcaccctggcaagggcctggaatggatcggccacatttggtgggacgacgacaagcggtacaaccccgccctgaagtccagagtgaccatcagcgtggacaccagcaagaaccagttcagcctgaagctgagcagcgtgacagccgccgataccgccgtgtattattgcgcccggatggaactgtggtcctactacttcgactactggggccagggaaccctcgtgaccgtgtctagtacgcgtgaggaggacctgaagaacgtgttcccacctgaggtggccgtgttcgagcctagcgaggccgagatcagccacacccagaaagccaccctcgtgtgcctggctaccggcttctaccccgaccatgtggaactgtcttggtgggtcaacggcaaagaggtgcacagcggcgtgtgtaccgacccccagccactgaaagaacagcccgccctgaacgacagccggtactgcctgagcagcagactgagagtgtccgccaccttctggcagaacccccggaaccacttcagatgccaggtgcagttctacggcctgagcgagaacgacgagtggacccaggacagagccaagcccgtgacccagatcgtgtctgccgaagcctggggcagagccgatgatgtgattaagatccactggcaggaaaagaagtccaacaccatcctgggcagccaggaaggcaacaccatgaagaccaacgacacctacatgaagttcagctggctgaccgtgcccgagaagtccctggacaaagaacacagatgcatcgtgcggcacgaaaacaacaagaacggcgtggaccaggaaatcatcttcccacccatcaagaccgatgtgattacaatggaccccaaggacaactgctccaaggacgccaacgataccctgctgctccagctgaccaacaccagcgcctactacatgtacttgttgctgctgctgaagtccgtggtgtacttcgccatcatcacatgctgcctgctgcggagaaccgccttctgctgcaacggcgagaagtctcgcgccaagagaagcggatctggcgtgaagcagaccctgaatttcgacctgctgaagctggctggcgacgtggaatccaacccaggcccttctagaggccatatgaccgagtacaagcccacggtgcgcctcgccacccgcgacgacgtccccagggccgtacgcaccctcgccgccgcgttcgccgactaccccgccacgcgccacaccgtcgatccggaccgccacatcgagcgggtcaccgagctgcaagaactcttcctcacgcgcgtcgggctcgacatcggcaaggtgtgggtcgcggacgacggcgccgcggtggcggtctggaccacgccggagagcgtcgaagcgggggcggtgttcgccgagatcggcccgcgcatggccgagttgagcggttcccggctggccgcgcagcaacagatggaaggcctcctggcgccgcaccggcccaaggagcccgcgtggttcctggccaccgtcggcgtctcgcccgaccaccagggcaagggtctgggcagcgccgtcgtgctccccggagtggaggcggccgagcgcgccggggtgcccgccttcctggagacctccgcgccccgcaacctccccttctacgagcggctcggcttcaccgtcaccgccgacgtcgaggtgcccgaaggaccgcgcacctggtgcatgacccgcaagcccggtgcctga

SEQ ID NO: 17643 - DNA, 2913 bp, synthetic construct
  source 1..2913: mol_type = other DNA
atggccttaccagtgaccgccttgctcctgccgctggccttgctgctccacgccgccaggccgctcgagatccagaaccctgatcctgccgtgtaccagctgcgggatagcaagagcagcgacaagagcgtgtgtctgttcaccgacttcgacagccagaccaacgtgtcccagagcaaggactccgacgtgtacatcaccgataagtgcgtgctggacatgcggagcatggacttcaagagcaactccgccgtggcctggtccaacaagtccgatttcgcctgcgccaacgccttcaacaacagcattatccccgaggacacattcttcccaagccccgagagcagcgactccaccgaccacgtgaagcccaaagagacagagaacaccaagcagcccagcaagagctgccacaagcccaaggccatcgtgcacaccgagaaagtgaacatgatgagcctgaccgtgctgggcctgcggatgctgttcgccaaaaccgtggccgtgaacttcctgctgaccgccaagctgttcttcctcagggccaagcgatctggatctggagcaacaaacttctcactactcaaacaagcaggtgacgtggaggagaatcccgggcctactagcatggccttaccagtgaccgccttgctcctgccgctggccttgctgctccacgccgccaggccggacatccagatgacacagagccctagcagcctgtctgccagcgtgggagacagagtgaccatcacctgtagagccagccaggacatcagcaactacctgaactggtatcagcagaagcccggcaaggcccctaagctgctgatctactacaccagcagactgcacagcggcgtgcccagcagattttctggctctggcagcggcaccgacttcaccctgacaatatctagcctccagcctgaggacttcgccacctactattgccagcagggcaacaccctgccttacacatttggacagggcaccaaggtggaaatcaagagaggcggaggcggaagtggaggcggaggatctggcggcggaggctctgaagtgcagctggttgaatcaggtggcggcctggttcaacctggcggatctctgagactgagctgtgccgccagcggcttcaccttcagcgactactttatgagctgggtccgacaggcccctggcaaaggacttgaatgggtcgccaccatcagcaatggcggcacctacacttactaccccgacagcgtgaagggcagattcaccatctccagagacaacagcaagaacaccctgtacctccagatgaactccctgagagccgaggacaccgccgtgtactactgcgccagattcgacggctacatcttcgactattggggccagggcaccctggtcacagtctcttctacgcgtgaggaggacctgaagaacgtgttcccacctgaggtggccgtgttcgagcctagcgaggccgagatcagccacacccagaaagccaccctcgtgtgcctggctaccggcttctaccccgaccatgtggaactgtcttggtgggtcaacggcaaagaggtgcacagcggcgtgtgtaccgacccccagccactgaaagaacagcccgccctgaacgacagccggtactgcctgagcagcagactgagagtgtccgccaccttctggcagaacccccggaaccacttcagatgccaggtgcagttctacggcctgagcgagaacgacgagtggacccaggacagagccaagcccgtgacccagatcgtgtctgccgaagcctggggcagagccgatgatgtgattaagatccactggcaggaaaagaagtccaacaccatcctgggcagccaggaaggcaacaccatgaagaccaacgacacctacatgaagttcagctggctgaccgtgcccgagaagtccctggacaaagaacacagatgcatcgtgcggcacgaaaacaacaagaacggcgtggaccaggaaatcatcttcccacccatcaagaccgatgtgattacaatggaccccaaggacaactgctccaaggacgccaacgataccctgctgctccagctgaccaacaccagcgcctactacatgtacttgttgctgctgctgaagtccgtggtgtacttcgccatcatcacatgctgcctgctgcggagaaccgccttctgctgcaacggcgagaagtctcgcgccaagagaagcggatctggcgtgaagcagaccctgaatttcgacctgctgaagctggctggcgacgtggaatccaacccaggcccttctagaggccatatgaccgagtacaagcccacggtgcgcctcgccacccgcgacgacgtccccagggccgtacgcaccctcgccgccgcgttcgccgactaccccgccacgcgccacaccgtcgatccggaccgccacatcgagcgggtcaccgagctgcaagaactcttcctcacgcgcgtcgggctcgacatcggcaaggtgtgggtcgcggacgacggcgccgcggtggcggtctggaccacgccggagagcgtcgaagcgggggcggtgttcgccgagatcggcccgcgcatggccgagttgagcggttcccggctggccgcgcagcaacagatggaaggcctcctggcgccgcaccggcccaaggagcccgcgtggttcctggccaccgtcggcgtctcgcccgaccaccagggcaagggtctgggcagcgccgtcgtgctccccggagtggaggcggccgagcgcgccggggtgcccgccttcctggagacctccgcgccccgcaacctccccttctacgagcggctcggcttcaccgtcaccgccgacgtcgaggtgcccgaaggaccgcgcacctggtgcatgacccgcaagcccggtgcctga

SEQ ID NO: 17644 - DNA, 2925 bp, synthetic construct
  source 1..2925: mol_type = other DNA
atggccttaccagtgaccgccttgctcctgccgctggccttgctgctccacgccgccaggccgctcgagatccagaaccctgatcctgccgtgtaccagctgcgggatagcaagagcagcgacaagagcgtgtgtctgttcaccgacttcgacagccagaccaacgtgtcccagagcaaggactccgacgtgtacatcaccgataagtgcgtgctggacatgcggagcatggacttcaagagcaactccgccgtggcctggtccaacaagtccgatttcgcctgcgccaacgccttcaacaacagcattatccccgaggacacattcttcccaagccccgagagcagcgactccaccgaccacgtgaagcccaaagagacagagaacaccaagcagcccagcaagagctgccacaagcccaaggccatcgtgcacaccgagaaagtgaacatgatgagcctgaccgtgctgggcctgcggatgctgttcgccaaaaccgtggccgtgaacttcctgctgaccgccaagctgttcttcctcagggccaagcgatctggatctggagcaacaaacttctcactactcaaacaagcaggtgacgtggaggagaatcccgggcctactagcatggccttaccagtgaccgccttgctcctgccgctggccttgctgctccacgccgccaggccggacatccagatgacacagagccctagcagcctgtctgccagcgtgggagacagagtgaccatcacatgcaaggccagcgaccacatcaacaactggctggcctggtatcagcagaagcctggacaggcccctaagctgctgatctacggcgctaccacactggaaacaggcgtgcccagcagattttctggcagcggctctggcaccgactacaccctgacaatatccagcctccagcctgaggacttcgccacctactactgtcagcagagctggaacaccccttggacattcggccagggcaccaagctggaaatcaagagaggcggaggcggaagtggaggcggaggatctggcggcggaggctctcaagttcagcttcaacagcctggcgctgagctggtcaaacctggcgcttctgtgaagatgagctgcaaagccagcggctacgccttcagcagctactggatcaactggatgaagcagaaacccggccagggactcgaatggatcggccaaatctatcccggcgacggcgacaccaactacaacggcaagttcaagggcagagccacactgaccgccgatacctctagcagcacagcctacatgcagctgagcagcctgaccagcgaagatagcgccgtgtacttctgtgcccggtccatcacaacagtcgtgggctgcgctatggactattggggccagggaacaagcgtgaccgtgtctagtacgcgtgaggaggacctgaagaacgtgttcccacctgaggtggccgtgttcgagcctagcgaggccgagatcagccacacccagaaagccaccctcgtgtgcctggctaccggcttctaccccgaccatgtggaactgtcttggtgggtcaacggcaaagaggtgcacagcggcgtgtgtaccgacccccagccactgaaagaacagcccgccctgaacgacagccggtactgcctgagcagcagactgagagtgtccgccaccttctggcagaacccccggaaccacttcagatgccaggtgcagttctacggcctgagcgagaacgacgagtggacccaggacagagccaagcccgtgacccagatcgtgtctgccgaagcctggggcagagccgatgatgtgattaagatccactggcaggaaaagaagtccaacaccatcctgggcagccaggaaggcaacaccatgaagaccaacgacacctacatgaagttcagctggctgaccgtgcccgagaagtccctggacaaagaacacagatgcatcgtgcggcacgaaaacaacaagaacggcgtggaccaggaaatcatcttcccacccatcaagaccgatgtgattacaatggaccccaaggacaactgctccaaggacgccaacgataccctgctgctccagctgaccaacaccagcgcctactacatgtacttgttgctgctgctgaagtccgtggtgtacttcgccatcatcacatgctgcctgctgcggagaaccgccttctgctgcaacggcgagaagtctcgcgccaagagaagcggatctggcgtgaagcagaccctgaatttcgacctgctgaagctggctggcgacgtggaatccaacccaggcccttctagaggccatatgaccgagtacaagcccacggtgcgcctcgccacccgcgacgacgtccccagggccgtacgcaccctcgccgccgcgttcgccgactaccccgccacgcgccacaccgtcgatccggaccgccacatcgagcgggtcaccgagctgcaagaactcttcctcacgcgcgtcgggctcgacatcggcaaggtgtgggtcgcggacgacggcgccgcggtggcggtctggaccacgccggagagcgtcgaagcgggggcggtgttcgccgagatcggcccgcgcatggccgagttgagcggttcccggctggccgcgcagcaacagatggaaggcctcctggcgccgcaccggcccaaggagcccgcgtggttcctggccaccgtcggcgtctcgcccgaccaccagggcaagggtctgggcagcgccgtcgtgctccccggagtggaggcggccgagcgcgccggggtgcccgccttcctggagacctccgcgccccgcaacctccccttctacgagcggctcggcttcaccgtcaccgccgacgtcgaggtgcccgaaggaccgcgcacctggtgcatgacccgcaagcccggtgcctga

SEQ ID NO: 17645 - DNA, 2931 bp, synthetic construct
  source 1..2931: mol_type = other DNA
atggccttaccagtgaccgccttgctcctgccgctggccttgctgctccacgccgccaggccgctcgagatccagaaccctgatcctgccgtgtaccagctgcgggatagcaagagcagcgacaagagcgtgtgtctgttcaccgacttcgacagccagaccaacgtgtcccagagcaaggactccgacgtgtacatcaccgataagtgcgtgctggacatgcggagcatggacttcaagagcaactccgccgtggcctggtccaacaagtccgatttcgcctgcgccaacgccttcaacaacagcattatccccgaggacacattcttcccaagccccgagagcagcgactccaccgaccacgtgaagcccaaagagacagagaacaccaagcagcccagcaagagctgccacaagcccaaggccatcgtgcacaccgagaaagtgaacatgatgagcctgaccgtgctgggcctgcggatgctgttcgccaaaaccgtggccgtgaacttcctgctgaccgccaagctgttcttcctcagggccaagcgatctggatctggagcaacaaacttctcactactcaaacaagcaggtgacgtggaggagaatcccgggcctactagcatggccttaccagtgaccgccttgctcctgccgctggccttgctgctccacgccgccaggccgcagatcgtgctgtctcagtctcctgccatcctgagcgcttccccaggcgagaaagtgaccatgacctgtagagccagcagcagcgtgtcctacatgcactggtatcagcagaagcccggcagcagccctaagccttggatctacgccaccagcaatctggcctctggcgtgccagccagattttctggctctggcagcggcaccagctacagcttcacaatcagcagagtggaagccgaggacgccgccacctactattgtcagcagtggaccttcaatcctcctaccttcggcggaggcacccggctggaaatcaaaagaacagtggctgctggcggaggcggaagtggaggcggaggatctggcggcggaggctctcaggcttatctgcaacagagcggagccgaactcgtcagacctggcgcttctgtgaagatgagctgcaaggccagcggctacaccttcaccagctataatatgcactgggtcaagcagacccctcggcagggactcgaatggatcggcggaatctatcccggcaacggcgacacctcctacaaccagaagttcaagggcaaagccacactgaccgtgggcaagagcagcagcaccgcctatatgcagctcagcagcctgaccagcgaggacagcgccgtgtacttctgcgccagatacgactacaactacgctatggactactggggccagggcaccagcgtgacagttagctctgccagcacgcgtgaggaggacctgaagaacgtgttcccacctgaggtggccgtgttcgagcctagcgaggccgagatcagccacacccagaaagccaccctcgtgtgcctggctaccggcttctaccccgaccatgtggaactgtcttggtgggtcaacggcaaagaggtgcacagcggcgtgtgtaccgacccccagccactgaaagaacagcccgccctgaacgacagccggtactgcctgagcagcagactgagagtgtccgccaccttctggcagaacccccggaaccacttcagatgccaggtgcagttctacggcctgagcgagaacgacgagtggacccaggacagagccaagcccgtgacccagatcgtgtctgccgaagcctggggcagagccgatgatgtgattaagatccactggcaggaaaagaagtccaacaccatcctgggcagccaggaaggcaacaccatgaagaccaacgacacctacatgaagttcagctggctgaccgtgcccgagaagtccctggacaaagaacacagatgcatcgtgcggcacgaaaacaacaagaacggcgtggaccaggaaatcatcttcccacccatcaagaccgatgtgattacaatggaccccaaggacaactgctccaaggacgccaacgataccctgctgctccagctgaccaacaccagcgcctactacatgtacttgttgctgctgctgaagtccgtggtgtacttcgccatcatcacatgctgcctgctgcggagaaccgccttctgctgcaacggcgagaagtctcgcgccaagagaagcggatctggcgtgaagcagaccctgaatttcgacctgctgaagctggctggcgacgtggaatccaacccaggcccttctagaggccatatgaccgagtacaagcccacggtgcgcctcgccacccgcgacgacgtccccagggccgtacgcaccctcgccgccgcgttcgccgactaccccgccacgcgccacaccgtcgatccggaccgccacatcgagcgggtcaccgagctgcaagaactcttcctcacgcgcgtcgggctcgacatcggcaaggtgtgggtcgcggacgacggcgccgcggtggcggtctggaccacgccggagagcgtcgaagcgggggcggtgttcgccgagatcggcccgcgcatggccgagttgagcggttcccggctggccgcgcagcaacagatggaaggcctcctggcgccgcaccggcccaaggagcccgcgtggttcctggccaccgtcggcgtctcgcccgaccaccagggcaagggtctgggcagcgccgtcgtgctccccggagtggaggcggccgagcgcgccggggtgcccgccttcctggagacctccgcgccccgcaacctccccttctacgagcggctcggcttcaccgtcaccgccgacgtcgaggtgcccgaaggaccgcgcacctggtgcatgacccgcaagcccggtgcctga

SEQ ID NO: 17646 - DNA, 2925 bp, synthetic construct
  source 1..2925: mol_type = other DNA
atggccttaccagtgaccgccttgctcctgccgctggccttgctgctccacgccgccaggccgctcgagatccagaaccctgatcctgccgtgtaccagctgcgggatagcaagagcagcgacaagagcgtgtgtctgttcaccgacttcgacagccagaccaacgtgtcccagagcaaggactccgacgtgtacatcaccgataagtgcgtgctggacatgcggagcatggacttcaagagcaactccgccgtggcctggtccaacaagtccgatttcgcctgcgccaacgccttcaacaacagcattatccccgaggacacattcttcccaagccccgagagcagcgactccaccgaccacgtgaagcccaaagagacagagaacaccaagcagcccagcaagagctgccacaagcccaaggccatcgtgcacaccgagaaagtgaacatgatgagcctgaccgtgctgggcctgcggatgctgttcgccaaaaccgtggccgtgaacttcctgctgaccgccaagctgttcttcctcagggccaagcgatctggatctggagcaacaaacttctcactactcaaacaagcaggtgacgtggaggagaatcccgggcctactagcatggccttaccagtgaccgccttgctcctgccgctggccttgctgctccacgccgccaggccggagatcgtgctgacacagagccctgccaccctgtctctgagccctggcgaaagagccaccctgagctgtagagccagccagagcgtgtccagctacctggcctggtatcagcagaagcccggccaggctccccggctgctgatctacgatgccagcaatagagccaccggcatccccgccagattttccggctctggcagcggcaccgacttcaccctgaccatcagctccctggaacccgaggacttcgccgtgtactactgccagcagcggagcaactggcccatcacattcggccagggcacccggctggaaatcaaaggcggaggcggaagtggaggcggaggatctggcggcggaggctctgaggtgcagcttgttgagtctggcggaggactggtgcagcccgatagaagcctgagactgtcttgtgccgccagcggcttcaccttccacgattatgccatgcactgggtccgacaggcccctggcaaaggacttgaatgggtgtccaccatctcttggaacagcggcacaatcggctacgccgactctgtgaagggcagattcaccatcagccgggacaacgccaagaacagcctgtacctccagatgaactccctgagagccgaggacacagccctgtactactgcgccaaggacatccagtacggcaactactactacggcatggacgtgtggggccagggcacaacagtgacagtctcttctacgcgtgaggaggacctgaagaacgtgttcccacctgaggtggccgtgttcgagcctagcgaggccgagatcagccacacccagaaagccaccctcgtgtgcctggctaccggcttctaccccgaccatgtggaactgtcttggtgggtcaacggcaaagaggtgcacagcggcgtgtgtaccgacccccagccactgaaagaacagcccgccctgaacgacagccggtactgcctgagcagcagactgagagtgtccgccaccttctggcagaacccccggaaccacttcagatgccaggtgcagttctacggcctgagcgagaacgacgagtggacccaggacagagccaagcccgtgacccagatcgtgtctgccgaagcctggggcagagccgatgatgtgattaagatccactggcaggaaaagaagtccaacaccatcctgggcagccaggaaggcaacaccatgaagaccaacgacacctacatgaagttcagctggctgaccgtgcccgagaagtccctggacaaagaacacagatgcatcgtgcggcacgaaaacaacaagaacggcgtggaccaggaaatcatcttcccacccatcaagaccgatgtgattacaatggaccccaaggacaactgctccaaggacgccaacgataccctgctgctccagctgaccaacaccagcgcctactacatgtacttgttgctgctgctgaagtccgtggtgtacttcgccatcatcacatgctgcctgctgcggagaaccgccttctgctgcaacggcgagaagtctcgcgccaagagaagcggatctggcgtgaagcagaccctgaatttcgacctgctgaagctggctggcgacgtggaatccaacccaggcccttctagaggccatatgaccgagtacaagcccacggtgcgcctcgccacccgcgacgacgtccccagggccgtacgcaccctcgccgccgcgttcgccgactaccccgccacgcgccacaccgtcgatccggaccgccacatcgagcgggtcaccgagctgcaagaactcttcctcacgcgcgtcgggctcgacatcggcaaggtgtgggtcgcggacgacggcgccgcggtggcggtctggaccacgccggagagcgtcgaagcgggggcggtgttcgccgagatcggcccgcgcatggccgagttgagcggttcccggctggccgcgcagcaacagatggaaggcctcctggcgccgcaccggcccaaggagcccgcgtggttcctggccaccgtcggcgtctcgcccgaccaccagggcaagggtctgggcagcgccgtcgtgctccccggagtggaggcggccgagcgcgccggggtgcccgccttcctggagacctccgcgccccgcaacctccccttctacgagcggctcggcttcaccgtcaccgccgacgtcgaggtgcccgaaggaccgcgcacctggtgcatgacccgcaagcccggtgcctga

SEQ ID NO: 17647 - DNA, 2919 bp, synthetic construct
  source 1..2919: mol_type = other DNA
atggccttaccagtgaccgccttgctcctgccgctggccttgctgctccacgccgccaggccgctcgagatccagaaccctgatcctgccgtgtaccagctgcgggatagcaagagcagcgacaagagcgtgtgtctgttcaccgacttcgacagccagaccaacgtgtcccagagcaaggactccgacgtgtacatcaccgataagtgcgtgctggacatgcggagcatggacttcaagagcaactccgccgtggcctggtccaacaagtccgatttcgcctgcgccaacgccttcaacaacagcattatccccgaggacacattcttcccaagccccgagagcagcgactccaccgaccacgtgaagcccaaagagacagagaacaccaagcagcccagcaagagctgccacaagcccaaggccatcgtgcacaccgagaaagtgaacatgatgagcctgaccgtgctgggcctgcggatgctgttcgccaaaaccgtggccgtgaacttcctgctgaccgccaagctgttcttcctcagggccaagcgatctggatctggagcaacaaacttctcactactcaaacaagcaggtgacgtggaggagaatcccgggcctactagcatggccttaccagtgaccgccttgctcctgccgctggccttgctgctccacgccgccaggccggacatccagatgacccagagccccagcagcctgtctgccagcgtgggcgacagagtgaccatcacctgtagagccagccaggacgtgaacaccgccgtggcctggtatcagcagaagcctggcaaggcccccaagctgctgatctacagcgccagcttcctggaaagcggcgtgcccagcagattcagcggaagcagaagcggcaccgacttcaccctgaccatcagctccctccagcccgaggacttcgccacctactactgccagcagcactacaccacccctcccaccttcggccagaccaaggtggaaatcaagagaggcggaggcggaagtggaggcggaggatctggcggcggaggctctgaagtgcaactggtggaatctggcggcggactggtgcagcctggcggatctctgagactgagctgtgccgccagcggcttcaacatcaaggacacctacatccactgggtgcgccaggcccctggaaagggactggaatgggtggcccggatctaccccaccaacggctacaccagatacgccgacagcgtgaagggccggttcaccatcagcgccgacaccagcaagaataccgcctacctccagatgaacagcctgcgggccgaggataccgccgtgtactactgctcaagatggggaggcgacggcttctacgctatggacgtgtggggccagggcacccttgtgaccgtgtcatctacgcgtgaggaggacctgaagaacgtgttcccacctgaggtggccgtgttcgagcctagcgaggccgagatcagccacacccagaaagccaccctcgtgtgcctggctaccggcttctaccccgaccatgtggaactgtcttggtgggtcaacggcaaagaggtgcacagcggcgtgtgtaccgacccccagccactgaaagaacagcccgccctgaacgacagccggtactgcctgagcagcagactgagagtgtccgccaccttctggcagaacccccggaaccacttcagatgccaggtgcagttctacggcctgagcgagaacgacgagtggacccaggacagagccaagcccgtgacccagatcgtgtctgccgaagcctggggcagagccgatgatgtgattaagatccactggcaggaaaagaagtccaacaccatcctgggcagccaggaaggcaacaccatgaagaccaacgacacctacatgaagttcagctggctgaccgtgcccgagaagtccctggacaaagaacacagatgcatcgtgcggcacgaaaacaacaagaacggcgtggaccaggaaatcatcttcccacccatcaagaccgatgtgattacaatggaccccaaggacaactgctccaaggacgccaacgataccctgctgctccagctgaccaacaccagcgcctactacatgtacttgttgctgctgctgaagtccgtggtgtacttcgccatcatcacatgctgcctgctgcggagaaccgccttctgctgcaacggcgagaagtctcgcgccaagagaagcggatctggcgtgaagcagaccctgaatttcgacctgctgaagctggctggcgacgtggaatccaacccaggcccttctagaggccatatgaccgagtacaagcccacggtgcgcctcgccacccgcgacgacgtccccagggccgtacgcaccctcgccgccgcgttcgccgactaccccgccacgcgccacaccgtcgatccggaccgccacatcgagcgggtcaccgagctgcaagaactcttcctcacgcgcgtcgggctcgacatcggcaaggtgtgggtcgcggacgacggcgccgcggtggcggtctggaccacgccggagagcgtcgaagcgggggcggtgttcgccgagatcggcccgcgcatggccgagttgagcggttcccggctggccgcgcagcaacagatggaaggcctcctggcgccgcaccggcccaaggagcccgcgtggttcctggccaccgtcggcgtctcgcccgaccaccagggcaagggtctgggcagcgccgtcgtgctccccggagtggaggcggccgagcgcgccggggtgcccgccttcctggagacctccgcgccccgcaacctccccttctacgagcggctcggcttcaccgtcaccgccgacgtcgaggtgcccgaaggaccgcgcacctggtgcatgacccgcaagcccggtgcctga

SEQ ID NO: 17648 - DNA, 2556 bp, synthetic construct
  source 1..2556: mol_type = other DNA
atggccttaccagtgaccgccttgctcctgccgctggccttgctgctccacgccgccaggccgctcgagatccagaaccctgatcctgccgtgtaccagctgcgggatagcaagagcagcgacaagagcgtgtgtctgttcaccgacttcgacagccagaccaacgtgtcccagagcaaggactccgacgtgtacatcaccgataagtgcgtgctggacatgcggagcatggacttcaagagcaactccgccgtggcctggtccaacaagtccgatttcgcctgcgccaacgccttcaacaacagcattatccccgaggacacattcttcccaagccccgagagcagcgactccaccgaccacgtgaagcccaaagagacagagaacaccaagcagcccagcaagagctgccacaagcccaaggccatcgtgcacaccgagaaagtgaacatgatgagcctgaccgtgctgggcctgcggatgctgttcgccaaaaccgtggccgtgaacttcctgctgaccgccaagctgttcttcctcagggccaagcgatctggatctggagcaacaaacttctcactactcaaacaagcaggtgacgtggaggagaatcccgggcctactagcatggccctgcccgtgacagccctgctgctgcctctggctctgctgctgcacgccgccagacccgatgaattcgaggtgcaactggtggaaagcggcggaggcctggtgcaggctggcggatctctgagactgagctgtgccgccagcggcatcaccttcagcatcaacacaatgggctggtacagacaggcccctggcaagcagagggaactggtggccctgatctccagcatcggcgacacctactacgccgacagcgtgaagggccggttcaccatcagccgggacaacgccaagaacaccgtgtacctccagatgaacagcctgaagcccgaggacaccgccgtgtactactgcaagcggttcagaacagccgcccagggcaccgattattggggccagggaacacaagtgaccgtgtcctctacgcgtgaggaggacctgaagaacgtgttcccacctgaggtggccgtgttcgagcctagcgaggccgagatcagccacacccagaaagccaccctcgtgtgcctggctaccggcttctaccccgaccatgtggaactgtcttggtgggtcaacggcaaagaggtgcacagcggcgtgtgtaccgacccccagccactgaaagaacagcccgccctgaacgacagccggtactgcctgagcagcagactgagagtgtccgccaccttctggcagaacccccggaaccacttcagatgccaggtgcagttctacggcctgagcgagaacgacgagtggacccaggacagagccaagcccgtgacccagatcgtgtctgccgaagcctggggcagagccgatgatgtgattaagatccactggcaggaaaagaagtccaacaccatcctgggcagccaggaaggcaacaccatgaagaccaacgacacctacatgaagttcagctggctgaccgtgcccgagaagtccctggacaaagaacacagatgcatcgtgcggcacgaaaacaacaagaacggcgtggaccaggaaatcatcttcccacccatcaagaccgatgtgattacaatggaccccaaggacaactgctccaaggacgccaacgataccctgctgctccagctgaccaacaccagcgcctactacatgtacttgttgctgctgctgaagtccgtggtgtacttcgccatcatcacatgctgcctgctgcggagaaccgccttctgctgcaacggcgagaagtctcgcgccaagagaagcggatctggcgtgaagcagaccctgaatttcgacctgctgaagctggctggcgacgtggaatccaacccaggcccttctagaggccatatgaccgagtacaagcccacggtgcgcctcgccacccgcgacgacgtccccagggccgtacgcaccctcgccgccgcgttcgccgactaccccgccacgcgccacaccgtcgatccggaccgccacatcgagcgggtcaccgagctgcaagaactcttcctcacgcgcgtcgggctcgacatcggcaaggtgtgggtcgcggacgacggcgccgcggtggcggtctggaccacgccggagagcgtcgaagcgggggcggtgttcgccgagatcggcccgcgcatggccgagttgagcggttcccggctggccgcgcagcaacagatggaaggcctcctggcgccgcaccggcccaaggagcccgcgtggttcctggccaccgtcggcgtctcgcccgaccaccagggcaagggtctgggcagcgccgtcgtgctccccggagtggaggcggccgagcgcgccggggtgcccgccttcctggagacctccgcgccccgcaacctccccttctacgagcggctcggcttcaccgtcaccgccgacgtcgaggtgcccgaaggaccgcgcacctggtgcatgacccgcaagcccggtgcctga

SEQ ID NO: 17649 - DNA, 2556 bp, synthetic construct; identical to SEQ ID NO: 17648
  source 1..2556: mol_type = other DNA

SEQ ID NO: 17650 - DNA, 3351 bp, synthetic construct
  source 1..3351: mol_type = other DNA
atggccttaccagtgaccgccttgctcctgccgctggccttgctgctccacgccgccaggccgctcgagatccagaaccctgatcctgccgtgtaccagctgcgggatagcaagagcagcgacaagagcgtgtgtctgttcaccgacttcgacagccagaccaacgtgtcccagagcaaggactccgacgtgtacatcaccgataagtgcgtgctggacatgcggagcatggacttcaagagcaactccgccgtggcctggtccaacaagtccgatttcgcctgcgccaacgccttcaacaacagcattatccccgaggacacattcttcccaagccccgagagcagcgactccaccgaccacgtgaagcccaaagagacagagaacaccaagcagcccagcaagagctgccacaagcccaaggccatcgtgcacaccgagaaagtgaacatgatgagcctgaccgtgctgggcctgcggatgctgttcgccaaaaccgtggccgtgaacttcctgctgaccgccaagctgttcttcctcagggccaagcgatctggatctggagcaacaaacttctcactactcaaacaagcaggtgacgtggaggagaatcccgggcctactagcatggccttaccagtgaccgccttgctcctgccgctggccttgctgctccacgccgccaggccgcaggtccagctcgtcgagtccggcggcggcctcgtccaggccggcgactccgtcaccctctcctgcaccgcctccggccgcaccttctcctcctacgccctcgcctggttccgccagcgccccggcaaggagcgcgagttcgtcgccggcctccgctggggcggccccaccaactacgccgactccgtcaaggaccgcttcaccatctccggcgactccgccaagcacaccatgtacctccagatgaactccctcaagcccgaggacaccgccgtctactactgcggctacaaccccggcggctgggccgtcccctcccagtacgagtacgactcctggggccagggcacccaggtcaccgtctcctccggtaccggcggaggcggatctggcggcggaggtagcggtggcggaggatctgaattcgacatccagatgacacagagccctagcagcctgtctgccagcgtgggagacagagtgaccatcacatgcaaggccagcgaccacatcaacaactggctggcctggtatcagcagaagcctggacaggcccctaagctgctgatctacggcgctaccacactggaaacaggcgtgcccagcagattttctggcagcggctctggcaccgactacaccctgacaatatccagcctccagcctgaggacttcgccacctactactgtcagcagagctggaacaccccttggacattcggccagggcaccaagctggaaatcaagagaggcggaggcggaagtggaggcggaggatctggcggcggaggctctcaagttcagcttcaacagcctggcgctgagctggtcaaacctggcgcttctgtgaagatgagctgcaaagccagcggctacgccttcagcagctactggatcaactggatgaagcagaaacccggccagggactcgaatggatcggccaaatctatcccggcgacggcgacaccaactacaacggcaagttcaagggcagagccacactgaccgccgatacctctagcagcacagcctacatgcagctgagcagcctgaccagcgaagatagcgccgtgtacttctgtgcccggtccatcacaacagtcgtgggctgcgctatggactattggggccagggaacaagcgtgaccgtgtctagtacgcgtgaggaggacctgaagaacgtgttcccacctgaggtggccgtgttcgagcctagcgaggccgagatcagccacacccagaaagccaccctcgtgtgcctggctaccggcttctaccccgaccatgtggaactgtcttggtgggtcaacggcaaagaggtgcacagcggcgtgtgtaccgacccccagccactgaaagaacagcccgccctgaacgacagccggtactgcctgagcagcagactgagagtgtccgccaccttctggcagaacccccggaaccacttcagatgccaggtgcagttctacggcctgagcgagaacgacgagtggacccaggacagagccaagcccgtgacccagatcgtgtctgccgaagcctggggcagagccgatgatgtgattaagatccactggcaggaaaagaagtccaacaccatcctgggcagccaggaaggcaacaccatgaagaccaacgacacctacatgaagttcagctggctgaccgtgcccgagaagtccctggacaaagaacacagatgcatcgtgcggcacgaaaacaacaagaacggcgtggaccaggaaatcatcttcccacccatcaagaccgatgtgattacaatggaccccaaggacaactgctccaaggacgccaacgataccctgctgctccagctgaccaacaccagcgcctactacatgtacttgttgctgctgctgaagtccgtggtgtacttcgccatcatcacatgctgcctgctgcggagaaccgccttctgctgcaacggcgagaagtctcgcgccaagagaagcggatctggcgtgaagcagaccctgaatttcgacctgctgaagctggctggcgacgtggaatccaacccaggcccttctagaggccatatgaccgagtacaagcccacggtgcgcctcgccacccgcgacgacgtccccagggccgtacgcaccctcgccgccgcgttcgccgactaccccgccacgcgccacaccgtcgatccggaccgccacatcgagcgggtcaccgagctgcaagaactcttcctcacgcgcgtcgggctcgacatcggcaaggtgtgggtcgcggacgacggcgccgcggtggcggtctggaccacgccggagagcgtcgaagcgggggcggtgttcgccgagatcggcccgcgcatggccgagttgagcggttcccggctggccgcgcagcaacagatggaaggcctcctggcgccgcaccggcccaaggagcccgcgtggttcctggccaccgtcggcgtctcgcccgaccaccagggcaagggtctgggcagcgccgtcgtgctccccggagtggaggcggccgagcgcgccggggtgcccgccttcctggagacctccgcgccccgcaacctccccttctacgagcggctcggcttcaccgtcaccgccgacgtcgaggtgcccgaaggaccgcgcacctggtgcatgacccgcaagcccggtgcctga

SEQ ID NO: 17651 - DNA, 3738 bp, synthetic construct
  source 1..3738: mol_type = other DNA
atggccttaccagtgaccgccttgctcctgccgctggccttgctgctccacgccgccaggccgctcgagatccagaaccctgatcctgccgtgtaccagctgcgggatagcaagagcagcgacaagagcgtgtgtctgttcaccgacttcgacagccagaccaacgtgtcccagagcaaggactccgacgtgtacatcaccgataagtgcgtgctggacatgcggagcatggacttcaagagcaactccgccgtggcctggtccaacaagtccgatttcgcctgcgccaacgccttcaacaacagcattatccccgaggacacattcttcccaagccccgagagcagcgactccaccgaccacgtgaagcccaaagagacagagaacaccaagcagcccagcaagagctgccacaagcccaaggccatcgtgcacaccgagaaagtgaacatgatgagcctgaccgtgctgggcctgcggatgctgttcgccaaaaccgtggccgtgaacttcctgctgaccgccaagctgttcttcctcagggccaagcgatctggatctggagcaacaaacttctcactactcaaacaagcaggtgacgtggaggagaatcccgggcctactagcatggccttaccagtgaccgccttgctcctgccgctggccttgctgctccacgccgccaggccggaggttcagctgcttgagtctggcggaggactggttcaacctggcggaagcctgagactgtcttgtgccgccagcggcttcacctttagcagctacgccatgagctgggtccgacaggctcctggcaaaggactggaatgggtgtccagcatcagcggcagcggcgactacatctactacgccgatagcgtgaagggcagattcaccatcagccgggacatcagcaagaacaccctgtacctccagatgaacagcctgagagccgaggacaccgccgtgtactactgtgccaaagaaggcaccggcgctaacagcagcctggccgattatagaggccagggcacactggtcaccgtgtctagtggcggaggaagcggcggaggatctcaggtccagctcgtcgagtccggcggcggcctcgtccaggccggcgactccgtcaccctctcctgcaccgcctccggccgcaccttctcctcctacgccctcgcctggttccgccagcgccccggcaaggagcgcgagttcgtcgccggcctccgctggggcggccccaccaactacgccgactccgtcaaggaccgcttcaccatctccggcgactccgccaagcacaccatgtacctccagatgaactccctcaagcccgaggacaccgccgtctactactgcggctacaaccccggcggctgggccgtcccctcccagtacgagtacgactcctggggccagggcacccaggtcaccgtctcctccggtaccggcggaggcggatctggcggcggaggtagcggtggcggaggatctgaattcgacatccagatgacacagagccctagcagcctgtctgccagcgtgggagacagagtgaccatcacatgcaaggccagcgaccacatcaacaactggctggcctggtatcagcagaagcctggacaggcccctaagctgctgatctacggcgctaccacactggaaacaggcgtgcccagcagattttctggcagcggctctggcaccgactacaccctgacaatatccagcctccagcctgaggacttcgccacctactactgtcagcagagctggaacaccccttggacattcggccagggcaccaagctggaaatcaagagaggcggaggcggaagtggaggcggaggatctggcggcggaggctctcaagttcagcttcaacagcctggcgctgagctggtcaaacctggcgcttctgtgaagatgagctgcaaagccagcggctacgccttcagcagctactggatcaactggatgaagcagaaacccggccagggactcgaatggatcggccaaatctatcccggcgacggcgacaccaactacaacggcaagttcaagggcagagccacactgaccgccgatacctctagcagcacagcctacatgcagctgagcagcctgaccagcgaagatagcgccgtgtacttctgtgcccggtccatcacaacagtcgtgggctgcgctatggactattggggccagggaacaagcgtgaccgtgtctagtacgcgtgaggaggacctgaagaacgtgttcccacctgaggtggccgtgttcgagcctagcgaggccgagatcagccacacccagaaagccaccctcgtgtgcctggctaccggcttctaccccgaccatgtggaactgtcttggtgggtcaacggcaaagaggtgcacagcggcgtgtgtaccgacccccagccactgaaagaacagcccgccctgaacgacagccggtactgcctgagcagcagactgagagtgtccgccaccttctggcagaacccccggaaccacttcagatgccaggtgcagttctacggcctgagcgagaacgacgagtggacccaggacagagccaagcccgtgacccagatcgtgtctgccgaagcctggggcagagccgatgatgtgattaagatccactggcaggaaaagaagtccaacaccatcctgggcagccaggaaggcaacaccatgaagaccaacgacacctacatgaagttcagctggctgaccgtgcccgagaagtccctggacaaagaacacagatgcatcgtgcggcacgaaaacaacaagaacggcgtggaccaggaaatcatcttcccacccatcaagaccgatgtgattacaatggaccccaaggacaactgctccaaggacgccaacgataccctgctgctccagctgaccaacaccagcgcctactacatgtacttgttgctgctgctgaagtccgtggtgtacttcgccatcatcacatgctgcctgctgcggagaaccgccttctgctgcaacggcgagaagtctcgcgccaagagaagcggatctggcgtgaagcagaccctgaatttcgacctgctgaagctggctggcgacgtggaatccaacccaggcccttctagaggccatatgaccgagtacaagcccacggtgcgcctcgccacccgcgacgacgtccccagggccgtacgcaccctcgccgccgcgttcgccgactaccccgccacgcgccacaccgtcgatccggaccgccacatcgagcgggtcaccgagctgcaagaactcttcctcacgcgcgtcgggctcgacatcggcaaggtgtgggtcgcggacgacggcgccgcggtggcggtctggaccacgccggagagcgtcgaagcgggggcggtgttcgccgagatcggcccgcgcatggccgagttgagcggttcccggctggccgcgcagcaacagatggaaggcctcctggcgccgcaccggcccaaggagcccgcgtggttcctggccaccgtcggcgtctcgcccgaccaccagggcaagggtctgggcagcgccgtcgtgctccccggagtggaggcggccgagcgcgccggggtgcccgccttcctggagacctccgcgccccgcaacctccccttctacgagcggctcggcttcaccgtcaccgccgacgtcgaggtgcccgaaggaccgcgcacctggtgcatgacccgcaagcccggtgcctga

SEQ ID NO: 17652 - DNA, 3732 bp, synthetic construct
  source 1..3732: mol_type = other DNA
atggccttaccagtgaccgccttgctcctgccgctggccttgctgctccacgccgccaggccgctcgagatccagaaccctgatcctgccgtgtaccagctgcgggatagcaagagcagcgacaagagcgtgtgtctgttcaccgacttcgacagccagaccaacgtgtcccagagcaaggactccgacgtgtacatcaccgataagtgcgtgctggacatgcggagcatggacttcaagagcaactccgccgtggcctggtccaacaagtccgatttcgcctgcgccaacgccttcaacaacagcattatccccgaggacacattcttcccaagccccgagagcagcgactccaccgaccacgtgaagcccaaagagacagagaacaccaagcagcccagcaagagctgccacaagcccaaggccatcgtgcacaccgagaaagtgaacatgatgagcctgaccgtgctgggcctgcggatgctgttcgccaaaaccgtggccgtgaacttcctgctgaccgccaagctgttcttcctcagggccaagcgatctggatctggagcaacaaacttctcactactcaaacaagcaggtgacgtggaggagaatcccgggcctactagcatggccttaccagtgaccgccttgctcctgccgctggccttgctgctccacgccgccaggccgggcgtgacacagagccccacacacctgattaagaccagaggccagcaggccacactgagatgcagccctatcagcggccacaccagcgtgtactggtatcagcaggctctcggactgggcctccagttcctgctttggtacgacgagggcgaagagagaaaccggggcaacttccctcctcggttttccggcagacagttccccaactacagcagcgagctgaacgtgaacgccctggaactggaagatagcgccctgtacctgtgtgcctcttctcttggtggacctcgcggactggctggactgagaggggatgagcagtttttcggccctggcaccagactgaccgtgctggaaggcggaggaagcggcggaggatctcaggtccagctcgtcgagtccggcggcggcctcgtccaggccggcgactccgtcaccctctcctgcaccgcctccggccgcaccttctcctcctacgccctcgcctggttccgccagcgccccggcaaggagcgcgagttcgtcgccggcctccgctggggcggccccaccaactacgccgactccgtcaaggaccgcttcaccatctccggcgactccgccaagcacaccatgtacctccagatgaactccctcaagcccgaggacaccgccgtctactactgcggctacaaccccggcggctgggccgtcccctcccagtacgagtacgactcctggggccagggcacccaggtcaccgtctcctccggtaccggcggaggcggatctggcggcggaggtagcggtggcggaggatctgaattcgacatccagatgacacagagccctagcagcctgtctgccagcgtgggagacagagtgaccatcacatgcaaggccagcgaccacatcaacaactggctggcctggtatcagcagaagcctggacaggcccctaagctgctgatctacggcgctaccacactggaaacaggcgtgcccagcagattttctggcagcggctctggcaccgactacaccctgacaatatccagcctccagcctgaggacttcgccacctactactgtcagcagagctggaacaccccttggacattcggccagggcaccaagctggaaatcaagagaggcggaggcggaagtggaggcggaggatctggcggcggaggctctcaagttcagcttcaacagcctggcgctgagctggtcaaacctggcgcttctgtgaagatgagctgcaaagccagcggctacgccttcagcagctactggatcaactggatgaagcagaaacccggccagggactcgaatggatcggccaaatctatcccggcgacggcgacaccaactacaacggcaagttcaagggcagagccacactgaccgccgatacctctagcagcacagcctacatgcagctgagcagcctgaccagcgaagatagcgccgtgtacttctgtgcccggtccatcacaacagtcgtgggctgcgctatggactattggggccagggaacaagcgtgaccgtgtctagtacgcgtgaggaggacctgaagaacgtgttcccacctgaggtggccgtgttcgagcctagcgaggccgagatcagccacacccagaaagccaccctcgtgtgcctggctaccggcttctaccccgaccatgtggaactgtcttggtgggtcaacggcaaagaggtgcacagcggcgtgtgtaccgacccccagccactgaaagaacagcccgccctgaacgacagccggtactgcctgagcagcagactgagagtgtccgccaccttctggcagaacccccggaaccacttcagatgccaggtgcagttctacggcctgagcgagaacgacgagtggacccaggacagagccaagcccgtgacccagatcgtgtctgccgaagcctggggcagagccgatgatgtgattaagatccactggcaggaaaagaagtccaacaccatcctgggcagccaggaaggcaacaccatgaagaccaacgacacctacatgaagttcagctggctgaccgtgcccgagaagtccctggacaaagaacacagatgcatcgtgcggcacgaaaacaacaagaacggcgtggaccaggaaatcatcttcccacccatcaagaccgatgtgattacaatggaccccaaggacaactgctccaaggacgccaacgataccctgctgctccagctgaccaacaccagcgcctactacatgtacttgttgctgctgctgaagtccgtggtgtacttcgccatcatcacatgctgcctgctgcggagaaccgccttctgctgcaacggcgagaagtctcgcgccaagagaagcggatctggcgtgaagcagaccctgaatttcgacctgctgaagctggctggcgacgtggaatccaacccaggcccttctagaggccatatgaccgagtacaagcccacggtgcgcctcgccacccgcgacgacgtccccagggccgtacgcaccctcgccgccgcgttcgccgactaccccgccacgcgccacaccgtcgatccggaccgccacatcgagcgggtcaccgagctgcaagaactcttcctcacgcgcgtcgggctcgacatcggcaaggtgtgggtcgcggacgacggcgccgcggtggcggtctggaccacgccggagagcgtcgaagcgggggcggtgttcgccgagatcggcccgcgcatggccgagttgagcggttcccggctggccgcgcagcaacagatggaaggcctcctggcgccgcaccggcccaaggagcccgcgtggttcctggccaccgtcggcgtctcgcccgaccaccagggcaagggtctgggcagcgccgtcgtgctccccggagtggaggcggccgagcgcgccggggtgcccgccttcctggagacctccgcgccccgcaacctccccttctacgagcggctcggcttcaccgtcaccgccgacgtcgaggtgcccgaaggaccgcgcacctggtgcatgacccgcaagcccggtgcctga

SEQ ID NO: 17653 - DNA, 3012 bp, synthetic construct
  source 1..3012: mol_type = other DNA
atggccttaccagtgaccgccttgctcctgccgctggccttgctgctccacgccgccaggccgctcgagatccagaaccctgatcctgccgtgtaccagctgcgggatagcaagagcagcgacaagagcgtgtgtctgttcaccgacttcgacagccagaccaacgtgtcccagagcaaggactccgacgtgtacatcaccgataagtgcgtgctggacatgcggagcatggacttcaagagcaactccgccgtggcctggtccaacaagtccgatttcgcctgcgccaacgccttcaacaacagcattatccccgaggacacattcttcccaagccccgagagcagcgactccaccgaccacgtgaagcccaaagagacagagaacaccaagcagcccagcaagagctgccacaagcccaaggccatcgtgcacaccgagaaagtgaacatgatgagcctgaccgtgctgggcctgcggatgctgttcgccaaaaccgtggccgtgaacttcctgctgaccgccaagctgttcttcctcagggccaagcgatctggatctggagcaacaaacttctcactactcaaacaagcaggtgacgtggaggagaatcccgggcctactagcatggccttaccagtgaccgccttgctcctgccgctggccttgctgctccacgccgccaggccgggcgtgacacagagccccacacacctgattaagaccagaggccagcaggccacactgagatgcagccctatcagcggccacaccagcgtgtactggtatcagcaggctctcggactgggcctccagttcctgctttggtacgacgagggcgaagagagaaaccggggcaacttccctcctcggttttccggcagacagttccccaactacagcagcgagctgaacgtgaacgccctggaactggaagatagcgccctgtacctgtgtgcctcttctcttggtggacctcgcggactggctggactgagaggggatgagcagtttttcggccctggcaccagactgaccgtgctggaaggcggaggaagcggcggaggatctggcgtgacacagagccccacacacctgattaagaccagaggccagcaggccacactgagatgcagccctatcagcggccacaccagcgtgtactggtatcagcaggctctcggactgggcctccagttcctgctttggtacgacgagggcgaagagagaaaccggggcaacttccctcctcggttttccggcagacagttccccaactacagcagcgagctgaacgtgaacgccctggaactggaagatagcgccctgtacctgtgtgccagctctctcggcggagatgaactgggagccgatggcaacgagcagttctttggccctggcaccagactgaccgtgctggaaggtaccggcggaggcggatctggcggcggaggtagcggtggcggaggatctgaattcgacatccagatgacacagagccctagcagcctgtctgccagcgtgggagacagagtgaccatcacatgcaaggccagcgaccacatcaacaactggctggcctggtatcagcagaagcctggacaggcccctaagctgctgatctacggcgctaccacactggaaacaggcgtgcccagcagattttctggcagcggctctggcaccgactacaccctgacaatatccagcctccagcctgaggacttcgccacctactactgtcagcagagctggaacaccccttggacattcggccagggcaccaagctggaaatcaagagaggcggaggcggaagtggaggcggaggatctggcggcggaggctctcaagttcagcttcaacagcctggcgctgagctggtcaaacctggcgcttctgtgaagatgagctgcaaagccagcggctacgccttcagcagctactggatcaactggatgaagcagaaacccggccagggactcgaatggatcggccaaatctatcccggcgacggcgacaccaactacaacggcaagttcaagggcagagccacactgaccgccgatacctctagcagcacagcctacatgcagctgagcagcctgaccagcgaagatagcgccgtgtacttctgtgcccggtccatcacaacagtcgtgggctgcgctatggactattggggccagggaacaagcgtgaccgtgtctagtacgcgtgaggaggacctgaagaacgtgttcccacctgaggtggccgtgttcgagcctagcgaggccgagatcagccacacccagaaagccaccctcgtgtgcctggctaccggcttctaccccgaccatgtggaactgtcttggtgggtcaacggcaaagaggtgcacagcggcgtgtgtaccgacccccagccactgaaagaacagcccgccctgaacgacagccggtactgcctgagcagcagactgagagtgtccgccaccttctggcagaacccccggaaccacttcagatgccaggtgcagttctacggcctgagcgagaacgacgagtggacccaggacagagccaagcccgtgacccagatcgtgtctgccgaagcctggggcagagccgatgatgtgattaagatccactggcaggaaaagaagtccaacaccatcctgggcagccaggaaggcaacaccatgaagaccaacgacacctacatgaagttcagctggctgaccgtgcccgagaagtccctggacaaagaacacagatgcatcgtgcggcacgaaaacaacaagaacggcgtggaccaggaaatcatcttcccacccatcaagaccgatgtgattacaatggaccccaaggacaactgctccaaggacgccaacgataccctgctgctccagctgaccaacaccagcgcctactacatgtacttgttgctgctgctgaagtccgtggtgtacttcgccatcatcacatgctgcctgctgcggagaaccgccttctgctgcaacggcgagaagtct

SEQ ID NO: 17654 - DNA, 2574 bp, synthetic construct
  source 1..2574: mol_type = other DNA
atggccttaccagtgaccgccttgctcctgccgctggccttgctgctccacgccgccaggccgctcgagatccagaaccctgatcctgccgtgtaccagctgcgggatagcaagagcagcgacaagagcgtgtgtctgttcaccgacttcgacagccagaccaacgtgtcccagagcaaggactccgacgtgtacatcaccgataagtgcgtgctggacatgcggagcatggacttcaagagcaactccgccgtggcctggtccaacaagtccgatttcgcctgcgccaacgccttcaacaacagcattatccccgaggacacattcttcccaagccccgagagcagcgactccaccgaccacgtgaagcccaaagagacagagaacaccaagcagcccagcaagagctgccacaagcccaaggccatcgtgcacaccgagaaagtgaacatgatgagcctgaccgtgctgggcctgcggatgctgttcgccaaaaccgtggccgtgaacttcctgctgaccgccaagctgttcttcctcagggccaagcgatctggatctggagcaacaaacttctcactactcaaacaagcaggtgacgtggaggagaatcccgggcctactagcatggccctgcccgtgacagccctgctgctgcctctggctctgctgctgcacgccgccagacccgatgaattcggctctgacctgggcatcaagctgctgttcgccgctgccaagggccaggacgacgaagtgcggattctgctggctgctggggccgacgtgaacgccaaggatttcgagggctacacccccctgcacgtggccgcctatgatggacacctggaaatcgtggaagtgctgctgaaggctggcgctgatgtgaatgccaaagacagccagggccggacccctctgcatgaagccgcctacagcggccatctggaaattgtggaagtgctgctgaaagccggggcagacgtgaacgctcaggacgacgctggcgagacaccagccgatctggctgcagcttggggccacgaagatatcgccgaggtgctgcagaagacgcgtgaggaggacctgaagaacgtgttcccacctgaggtggccgtgttcgagcctagcgaggccgagatcagccacacccagaaagccaccctcgtgtgcctggctaccggcttctaccccgaccatgtggaactgtcttggtgggtcaacggcaaagaggtgcacagcggcgtgtgtaccgacccccagccactgaaagaacagcccgccctgaacgacagccggtactgcctgagcagcagactgagagtgtccgccaccttctggcagaacccccggaaccacttcagatgccaggtgcagttctacggcctgagcgagaacgacgagtggacccaggacagagccaagcccgtgacccagatcgtgtctgccgaagcctggggcagagccgatgatgtgattaagatccactggcaggaaaagaagtccaacaccatcctgggcagccaggaaggcaacaccatgaagaccaacgacacctacatgaagttcagctggctgaccgtgcccgagaagtccctggacaaagaacacagatgcatcgtgcggcacgaaaacaacaagaacggcgtggaccaggaaatcatcttcccacccatcaagaccgatgtgattacaatggaccccaaggacaactgctccaaggacgccaacgataccctgctgctccagctgaccaacaccagcgcctactacatgtacttgttgctgctgctgaagtccgtggtgtacttcgccatcatcacatgctgcctgctgcggagaaccgccttctgctgcaacggcgagaagtctcgcgccaagagaagcggatctggcgtgaagcagaccctgaatttcgacctgctgaagctggctggcgacgtggaatccaacccaggcccttctagaggccatatgaccgagtacaagcccacggtgcgcctcgccacccgcgacgacgtccccagggccgtacgcaccctcgccgccgcgttcgccgactaccccgccacgcgccacaccgtcgatccggaccgccacatcgagcgggtcaccgagctgcaagaactcttcctcacgcgcgtcgggctcgacatcggcaaggtgtgggtcgcggacgacggcgccgcggtggcggtctggaccacgccggagagcgtcgaagcgggggcggtgttcgccgagatcggcccgcgcatggccgagttgagcggttcccggctggccgcgcagcaacagatggaaggcctcctggcgccgcaccggcccaaggagcccgcgtggttcctggccaccgtcggcgtctcgcccgaccaccagggcaagggtctgggcagcgccgtcgtgctccccggagtggaggcggccgagcgcgccggggtgcccgccttcctggagacctccgcgccccgcaacctccccttctacgagcggctcggcttcaccgtcaccgccgacgtcgaggtgcccgaaggaccgcgcacctggtgcatgacccgcaagcccggtgcctga

SEQ ID NO: 17655 - DNA, 2361 bp, synthetic construct
  source 1..2361: mol_type = other DNA
atggccttaccagtgaccgccttgctcctgccgctggccttgctgctccacgccgccaggccgctcgagatccagaaccctgatcctgccgtgtaccagctgcgggatagcaagagcagcgacaagagcgtgtgtctgttcaccgacttcgacagccagaccaacgtgtcccagagcaaggactccgacgtgtacatcaccgataagtgcgtgctggacatgcggagcatggacttcaagagcaactccgccgtggcctggtccaacaagtccgatttcgcctgcgccaacgccttcaacaacagcattatccccgaggacacattcttcccaagccccgagagcagcgactccaccgaccacgtgaagcccaaagagacagagaacaccaagcagcccagcaagagctgccacaagcccaaggccatcgtgcacaccgagaaagtgaacatgatgagcctgaccgtgctgggcctgcggatgctgttcgccaaaaccgtggccgtgaacttcctgctgaccgccaagctgttcttcctcagggccaagcgatctggatctggagcaacaaacttctcactactcaaacaagcaggtgacgtggaggagaatcccgggcctactagcatggactggatttggcgcatccttttccttgtcggcgctgctaccggcgcccattccttcgaaggcagcggattcgaatacgccaaagagatgcggaacgcctactgggagatcgccctgctgcccaatctgaccaaccagcagaagagagcccccatcagaaagctgtacgacgacccctcccagagcagcgagctgctgtctgaggctaaaaaactgaacgatagccagacgcgtgaggaggacctgaagaacgtgttcccacctgaggtggccgtgttcgagcctagcgaggccgagatcagccacacccagaaagccaccctcgtgtgcctggctaccggcttctaccccgaccatgtggaactgtcttggtgggtcaacggcaaagaggtgcacagcggcgtgtgtaccgacccccagccactgaaagaacagcccgccctgaacgacagccggtactgcctgagcagcagactgagagtgtccgccaccttctggcagaacccccggaaccacttcagatgccaggtgcagttctacggcctgagcgagaacgacgagtggacccaggacagagccaagcccgtgacccagatcgtgtctgccgaagcctggggcagagccgatgatgtgattaagatccactggcaggaaaagaagtccaacaccatcctgggcagccaggaaggcaacaccatgaagaccaacgacacctacatgaagttcagctggctgaccgtgcccgagaagtccctggacaaagaacacagatgcatcgtgcggcacgaaaacaacaagaacggcgtggaccaggaaatcatcttcccacccatcaagaccgatgtgattacaatggaccccaaggacaactgctccaaggacgccaacgataccctgctgctccagctgaccaacaccagcgcctactacatgtacttgttgctgctgctgaagtccgtggtgtacttcgccatcatcacatgctgcctgctgcggagaaccgccttctgctgcaacggcgagaagtctcgcgccaagagaagcggatctggcgtgaagcagaccctgaatttcgacctgctgaagctggctggcgacgtggaatccaacccaggcccttctagaggccatatgaccgagtacaagcccacggtgcgcctcgccacccgcgacgacgtccccagggccgtacgcaccctcgccgccgcgttcgccgactaccccgccacgcgccacaccgtcgatccggaccgccacatcgagcgggtcaccgagctgcaagaactcttcctcacgcgcgtcgggctcgacatcggcaaggtgtgggtcgcggacgacggcgccgcggtggcggtctggaccacgccggagagcgtcgaagcgggggcggtgttcgccgagatcggcccgcgcatggccgagttgagcggttcccggctggccgcgcagcaacagatggaaggcctcctggcgccgcaccggcccaaggagcccgcgtggttcctggccaccgtcggcgtctcgcccgaccaccagggcaagggtctgggcagcgccgtcgtgctccccggagtggaggcggccgagcgcgccggggtgcccgccttcctggagacctccgcgccccgcaacctccccttctacgagcggctcggcttcaccgtcaccgccgacgtcgaggtgcccgaaggaccgcgcacctggtgcatgacccgcaagcccggtgcctga

SEQ ID NO: 17656 - DNA, 3027 bp, synthetic construct
  source 1..3027: mol_type = other DNA
atggccttaccagtgaccgccttgctcctgccgctggccttgctgctccacgccgccaggccgctcgagatccagaaccctgatcctgccgtgtaccagctgcgggatagcaagagcagcgacaagagcgtgtgtctgttcaccgacttcgacagccagaccaacgtgtcccagagcaaggactccgacgtgtacatcaccgataagtgcgtgctggacatgcggagcatggacttcaagagcaactccgccgtggcctggtccaacaagtccgatttcgcctgcgccaacgccttcaacaacagcattatccccgaggacacattcttcccaagccccgagagcagcgactccaccgaccacgtgaagcccaaagagacagagaacaccaagcagcccagcaagagctgccacaagcccaaggccatcgtgcacaccgagaaagtgaacatgatgagcctgaccgtgctgggcctgcggatgctgttcgccaaaaccgtggccgtgaacttcctgctgaccgccaagctgttcttcctcagggccaagcgatctggatctggagcaacaaacttctcactactcaaacaagcaggtgacgtggaggagaatcccgggcctactagcatggccctgcccgtgacagccctgctgctgcctctggctctgctgctgcacgccgccagacccgatgaattcgaggtgcaactggtggaaagcggcggaggcctggtgcaggctggcggatctctgagactgagctgtgccgccagcggcatcaccttcagcatcaacacaatgggctggtacagacaggcccctggcaagcagagggaactggtggccctgatctccagcatcggcgacacctactacgccgacagcgtgaagggccggttcaccatcagccgggacaacgccaagaacaccgtgtacctccagatgaacagcctgaagcccgaggacaccgccgtgtactactgcaagcggttcagaacagccgcccagggcaccgattattggggccagggaacacaagtgaccgtgtcctctctcgagggaggaggcggctccgggggaggcggaagtggaggcggaggatctgggtctggaggaagcggatctggaggctcagggtcagggggctcaggcagtggaggctctttcgaagtgcaactggtggaatctgggggcggactggtgcagccaggcggaagtctgaggctgtcttgtgccgcctccggcagcatcttcggcttcaacgacatggcctggtatcggcaggctcccggaaaacagcgcgagctggtggctctgattagcagagtgggcgtgaccagcagcgccgactctgtgaagggcagattcacaatctccagagtgaacgccaaggatacagtgtacctccagatgaactctctgaaacctgaggatacagcagtgtactattgctacatggaccagcggctggacggcagcacactggcctactggggacagggaactcaagtgacagtgtctagcacgcgtgaggaggacctgaagaacgtgttcccacctgaggtggccgtgttcgagcctagcgaggccgagatcagccacacccagaaagccaccctcgtgtgcctggctaccggcttctaccccgaccatgtggaactgtcttggtgggtcaacggcaaagaggtgcacagcggcgtgtgtaccgacccccagccactgaaagaacagcccgccctgaacgacagccggtactgcctgagcagcagactgagagtgtccgccaccttctggcagaacccccggaaccacttcagatgccaggtgcagttctacggcctgagcgagaacgacgagtggacccaggacagagccaagcccgtgacccagatcgtgtctgccgaagcctggggcagagccgatgatgtgattaagatccactggcaggaaaagaagtccaacaccatcctgggcagccaggaaggcaacaccatgaagaccaacgacacctacatgaagttcagctggctgaccgtgcccgagaagtccctggacaaagaacacagatgcatcgtgcggcacgaaaacaacaagaacggcgtggaccaggaaatcatcttcccacccatcaagaccgatgtgattacaatggaccccaaggacaactgctccaaggacgccaacgataccctgctgctccagctgaccaacaccagcgcctactacatgtacttgttgctgctgctgaagtccgtggtgtacttcgccatcatcacatgctgcctgctgcggagaaccgccttctgctgcaacggcgagaagtctcgcgccaagagaagcggatctggcgtgaagcagaccctgaatttcgacctgctgaagctggctggcgacgtggaatccaacccaggcccttctagaggccatatgaccgagtacaagcccacggtgcgcctcgccacccgcgacgacgtccccagggccgtacgcaccctcgccgccgcgttcgccgactaccccgccacgcgccacaccgtcgatccggaccgccacatcgagcgggtcaccgagctgcaagaactcttcctcacgcgcgtcgggctcgacatcggcaaggtgtgggtcgcggacgacggcgccgcggtggcggtctggaccacgccggagagcgtcgaagcgggggcggtgttcgccgagatcggcccgcgcatggccgagttgagcggttcccggctggccgcgcagcaacagatggaaggcctcctggcgccgcaccggcccaaggagcccgcgtggttcctggccaccgtcggcgtctcgcccgaccaccagggcaagggtctgggcagcgccgtcgtgctccccggagtggaggcggccgagcgcgccggggtgcccgccttcctggagacctccgcgccccgcaacctccccttctacgagcggctcggcttcaccgtcaccgccgacgtcgaggtgcccgaaggaccgcgcacctggtgcatgacccgcaagcccggtgcctga

SEQ ID NO: 17657 - DNA, 2769 bp, synthetic construct
  source 1..2769: mol_type = other DNA
atggccttaccagtgaccgccttgctcctgccgctggccttgctgctccacgccgccaggccgctcgagatccagaaccctgatcctgccgtgtaccagctgcgggatagcaagagcagcgacaagagcgtgtgtctgttcaccgacttcgacagccagaccaacgtgtcccagagcaaggactccgacgtgtacatcaccgataagtgcgtgctggacatgcggagcatggacttcaagagcaactccgccgtggcctggtccaacaagtccgatttcgcctgcgccaacgccttcaacaacagcattatccccgaggacacattcttcccaagccccgagagcagcgactccaccgaccacgtgaagcccaaagagacagagaacaccaagcagcccagcaagagctgccacaagcccaaggccatcgtgcacaccgagaaagtgaacatgatgagcctgaccgtgctgggcctgcggatgctgttcgccaaaaccgtggccgtgaacttcctgctgaccgccaagctgttcttcctcagggccaagcgatctggatctggagcaacaaacttctcactactcaaacaagcaggtgacgtggaggagaatcccgggcctactagcatggcccttccagtcactgccttgctgttgcctctggcgctcctgctccacgccgctagaccgggcatgagaaccgaggacctgcctaaggccgtggtgttcctggaaccccagtggtacagagtgctggaaaaggacagcgtgaccctgaagtgccagggcgcctacagccccgaggacaatagcacccagtggttccacaacgagagcctgatctccagccaggccagcagctacttcatcgacgccgccaccgtggacgacagcggcgagtatagatgccagaccaacctgagcaccctgagcgaccccgtgcagctggaagtgcacatcggatggctgctgctgcaggcccccagatgggtgttcaaagaagaggaccccatccacctgagatgccactcttggaagaacaccgccctgcacaaagtgacctacctgcagaacggcaagggcagaaagtacttccaccacaacagcgacttctacatccccaaggccaccctgaaggactccggctcctacttctgcagaggcctcgtgggcagcaagaacgtgtccagcgagacagtgaacatcaccatcacccagggcctggccgtgtctaccatcagcagctttttcccacccggctaccagacgcgtgaggaggacctgaagaacgtgttcccacctgaggtggccgtgttcgagcctagcgaggccgagatcagccacacccagaaagccaccctcgtgtgcctggctaccggcttctaccccgaccatgtggaactgtcttggtgggtcaacggcaaagaggtgcacagcggcgtgtgtaccgacccccagccactgaaagaacagcccgccctgaacgacagccggtactgcctgagcagcagactgagagtgtccgccaccttctggcagaacccccggaaccacttcagatgccaggtgcagttctacggcctgagcgagaacgacgagtggacccaggacagagccaagcccgtgacccagatcgtgtctgccgaagcctggggcagagccgatgatgtgattaagatccactggcaggaaaagaagtccaacaccatcctgggcagccaggaaggcaacaccatgaagaccaacgacacctacatgaagttcagctggctgaccgtgcccgagaagtccctggacaaagaacacagatgcatcgtgcggcacgaaaacaacaagaacggcgtggaccaggaaatcatcttcccacccatcaagaccgatgtgattacaatggaccccaaggacaactgctccaaggacgccaacgataccctgctgctccagctgaccaacaccagcgcctactacatgtacttgttgctgctgctgaagtccgtggtgtacttcgccatcatcacatgctgcctgctgcggagaaccgccttctgctgcaacggcgagaagtctcgcgccaagagaagcggatctggcgtgaagcagaccctgaatttcgacctgctgaagctggctggcgacgtggaatccaacccaggcccttctagaggccatatgaccgagtacaagcccacggtgcgcctcgccacccgcgacgacgtccccagggccgtacgcaccctcgccgccgcgttcgccgactaccccgccacgcgccacaccgtcgatccggaccgccacatcgagcgggtcaccgagctgcaagaactcttcctcacgcgcgtcgggctcgacatcggcaaggtgtgggtcgcggacgacggcgccgcggtggcggtctggaccacgccggagagcgtcgaagcgggggcggtgttcgccgagatcggcccgcgcatggccgagttgagcggttcccggctggccgcgcagcaacagatggaaggcctcctggcgccgcaccggcccaaggagcccgcgtggttcctggccaccgtcggcgtctcgcccgaccaccagggcaagggtctgggcagcgccgtcgtgctccccggagtggaggcggccgagcgcgccggggtgcccgccttcctggagacctccgcgccccgcaacctccccttctacgagcggctcggcttcaccgtcaccgccgacgtcgaggtgcccgaaggaccgcgcacctggtgcatgacccgcaagcccggtgcctga

SEQ ID NO: 17658 - DNA, 1650 bp, synthetic construct
  source 1..1650: mol_type = other DNA
atggccttaccagtgaccgccttgctcctgccgctggccttgctgctccacgccgccaggccgctcgagatccagaaccctgatcctgccgtgtaccagctgcgggatagcaagagcagcgacaagagcgtgtgtctgttcaccgacttcgacagccagaccaacgtgtcccagagcaaggactccgacgtgtacatcaccgataagtgcgtgctggacatgcggagcatggacttcaagagcaactccgccgtggcctggtccaacaagtccgatttcgcctgcgccaacgccttcaacaacagcattatccccgaggacacattcttcccaagccccgagagcagcgactccaccgaccacgtgaagcccaaagagacagagaacaccaagcagcccagcaagagctgccacaagcccaaggccatcgtgcacaccgagaaagtgaacatgatgagcctgaccgtgctgggcctgcggatgctgttcgccaaaaccgtggccgtgaacttcctgctgaccgccaagctgttcttcctcagggccaagcgatctggatctggagcaacaaacttctcactactcaaacaagcaggtgacgtggaggagaatcccgggcctactagcgccaccatggccttaccagtgaccgccttgctcctgccgctggccttgctgctccacgccgccaggccgatggaccccgacctggaaatcagagccgccttcctgcggcagagaaacacagccctgagaacagaggtggccgagctggaacaagaggtgcagcggctggaaaacgaggtgtcccagtacgagacaagatacggccctctcggaggcggaaaaacgcgtgaggaggacctgaagaacgtgttcccacctgaggtggccgtgttcgagcctagcgaggccgagatcagccacacccagaaagccaccctcgtgtgcctggctaccggcttctaccccgaccatgtggaactgtcttggtgggtcaacggcaaagaggtgcacagcggcgtgtgtaccgacccccagccactgaaagaacagcccgccctgaacgacagccggtactgcctgagcagcagactgagagtgtccgccaccttctggcagaacccccggaaccacttcagatgccaggtgcagttctacggcctgagcgagaacgacgagtggacccaggacagagccaagcccgtgacccagatcgtgtctgccgaagcctggggcagagccgatgatgtgattaagatccactggcaggaaaagaagtccaacaccatcctgggcagccaggaaggcaacaccatgaagaccaacgacacctacatgaagttcagctggctgaccgtgcccgagaagtccctggacaaagaacacagatgcatcgtgcggcacgaaaacaacaagaacggcgtggaccaggaaatcatcttcccacccatcaagaccgatgtgattacaatggaccccaaggacaactgctccaaggacgccaacgataccctgctgctccagctgaccaacaccagcgcctactacatgtacttgttgctgctgctgaagtccgtggtgtacttcgccatcatcacatgctgcctgctgcggagaaccgccttctgctgcaacggcgagaagtct

SEQ ID NO: 17659 - DNA, 1650 bp, synthetic construct
  source 1..1650: mol_type = other DNA
atggccttaccagtgaccgccttgctcctgccgctggccttgctgctccacgccgccaggccgctcgagatccagaaccctgatcctgccgtgtaccagctgcgggatagcaagagcagcgacaagagcgtgtgtctgttcaccgacttcgacagccagaccaacgtgtcccagagcaaggactccgacgtgtacatcaccgataagtgcgtgctggacatgcggagcatggacttcaagagcaactccgccgtggcctggtccaacaagtccgatttcgcctgcgccaacgccttcaacaacagcattatccccgaggacacattcttcccaagccccgagagcagcgactccaccgaccacgtgaagcccaaagagacagagaacaccaagcagcccagcaagagctgccacaagcccaaggccatcgtgcacaccgagaaagtgaacatgatgagcctgaccgtgctgggcctgcggatgctgttcgccaaaaccgtggccgtgaacttcctgctgaccgccaagctgttcttcctcagggccaagcgatctggatctggagcaacaaacttctcactactcaaacaagcaggtgacgtggaggagaatcccgggcctactagcgccaccatggccttaccagtgaccgccttgctcctgccgctggccttgctgctccacgccgccaggccgatggaccctgatctcgaaattgaggccgcctttctggaacgcgagaacactgccctggaaaccagggtcgcagagctgagacagagagtgcagagactgcggaacagagtgtctcagtaccgcaccagatatggcccactcggcggaggtaaaacgcgtgaggaggacctgaagaacgtgttcccacctgaggtggccgtgttcgagcctagcgaggccgagatcagccacacccagaaagccaccctcgtgtgcctggctaccggcttctaccccgaccatgtggaactgtcttggtgggtcaacggcaaagaggtgcacagcggcgtgtgtaccgacccccagccactgaaagaacagcccgccctgaacgacagccggtactgcctgagcagcagactgagagtgtccgccaccttctggcagaacccccggaaccacttcagatgccaggtgcagttctacggcctgagcgagaacgacgagtggacccaggacagagccaagcccgtgacccagatcgtgtctgccgaagcctggggcagagccgatgatgtgattaagatccactggcaggaaaagaagtccaacaccatcctgggcagccaggaaggcaacaccatgaagaccaacgacacctacatgaagttcagctggctgaccgtgcccgagaagtccctggacaaagaacacagatgcatcgtgcggcacgaaaacaacaagaacggcgtggaccaggaaatcatcttcccacccatcaagaccgatgtgattacaatggaccccaaggacaactgctccaaggacgccaacgataccctgctgctccagctgaccaacaccagcgcctactacatgtacttgttgctgctgctgaagtccgtggtgtacttcgccatcatcacatgctgcctgctgcggagaaccgccttctgctgcaacggcgagaagtct

SEQ ID NO: 17660 - DNA, 2355 bp, synthetic construct
  source 1..2355: mol_type = other DNA
atggccttaccagtgaccgccttgctcctgccgctggccttgctgctccacgccgccaggccgctcgagatccagaaccctgatcctgccgtgtaccagctgcgggatagcaagagcagcgacaagagcgtgtgtctgttcaccgacttcgacagccagaccaacgtgtcccagagcaaggactccgacgtgtacatcaccgataagtgcgtgctggacatgcggagcatggacttcaagagcaactccgccgtggcctggtccaacaagtccgatttcgcctgcgccaacgccttcaacaacagcattatccccgaggacacattcttcccaagccccgagagcagcgactccaccgaccacgtgaagcccaaagagacagagaacaccaagcagcccagcaagagctgccacaagcccaaggccatcgtgcacaccgagaaagtgaacatgatgagcctgaccgtgctgggcctgcggatgctgttcgccaaaaccgtggccgtgaacttcctgctgaccgccaagctgttcttcctcagggccaagcgatctggatctggagcaacaaacttctcactactcaaacaagcaggtgacgtggaggagaatcccgggcctactagcgccaccatggccttaccagtgaccgccttgctcctgccgctggccttgctgctccacgccgccaggccgctgttcaatcaagaggtgcagatccctctgaccgagagctactgtggcccctgtcctaagaactggatctgctacaagaacaactgctaccagttcttcgacgagagcaagaattggtacgagagccaggccagctgcatgagccagaatgccagcctgctgaaggtgtacagcaaagaggaccaggacctgctgaaactggtcaagagcgcccactggatgggccttgtgcacatccccaccaatggctcttggcagtgggaggacggcagcattctgagccctaacctgctgaccatcatcgagatgcagaagggcgactgcgccctgtacgccagcagctttaagggctacatcgagaattgcagcaccccgaacacctacatctgtatgcagagaaccgtttctggcggaggcggctctggaggaggcggaagtggcggcggaggcgacctctttaatcaagaagtccagattccactcaccgaatcctactgcggaccttgtccaaaaaattggatttgttataagaacaactgttatcaattctttgatgagtctaaaaattggtatgagtcccaggcttcctgcatgtctcagaacgcttctctgctgaaagtctactctaaagaagatcaggatctcctgaagctcgtcaagtctgcccattggatggggctcgtccacattcctaccaacggaagctggcaatgggaagatggctccatcctgtctccaaatctgctcacgattattgaaatgcagaaaggggattgtgctctctacgccagctccttcaagggatatattgagaactgtagcacgcccaatacttatatctgtatgcaacggaccgtgacgcgtgaggaggacctgaagaacgtgttcccacctgaggtggccgtgttcgagcctagcgaggccgagatcagccacacccagaaagccaccctcgtgtgcctggctaccggcttctaccccgaccatgtggaactgtcttggtgggtcaacggcaaagaggtgcacagcggcgtgtgtaccgacccccagccactgaaagaacagcccgccctgaacgacagccggtactgcctgagcagcagactgagagtgtccgccaccttctggcagaacccccggaaccacttcagatgccaggtgcagttctacggcctgagcgagaacgacgagtggacccaggacagagccaagcccgtgacccagatcgtgtctgccgaagcctggggcagagccgatgatgtgattaagatccactggcaggaaaagaagtccaacaccatcctgggcagccaggaaggcaacaccatgaagaccaacgacacctacatgaagttcagctggctgaccgtgcccgagaagtccctggacaaagaacacagatgcatcgtgcggcacgaaaacaacaagaacggcgtggaccaggaaatcatcttcccacccatcaagaccgatgtgattacaatggaccccaaggacaactgctccaaggacgccaacgataccctgctgctccagctgaccaacaccagcgcctactacatgtacttgttgctgctgctgaagtccgtggtgtacttcgccatcatcacatgctgcctgctgcggagaaccgccttctgctgcaacggcgagaagtct

SEQ ID NO: 17661 - DNA, 2355 bp, synthetic construct
  source 1..2355: mol_type = other DNA
atggccttaccagtgaccgccttgctcctgccgctggccttgctgctccacgccgccaggccgctcgagatccagaaccctgatcctgccgtgtaccagctgcgggatagcaagagcagcgacaagagcgtgtgtctgttcaccgacttcgacagccagaccaacgtgtcccagagcaaggactccgacgtgtacatcaccgataagtgcgtgctggacatgcggagcatggacttcaagagcaactccgccgtggcctggtccaacaagtccgatttcgcctgcgccaacgccttcaacaacagcattatccccgaggacacattcttcccaagccccgagagcagcgactccaccgaccacgtgaagcccaaagagacagagaacaccaagcagcccagcaagagctgccacaagcccaaggccatcgtgcacaccgagaaagtgaacatgatgagcctgaccgtgctgggcctgcggatgctgttcgccaaaaccgtggccgtgaacttcctgctgaccgccaagctgttcttcctcagggccaagcgatctggatctggagcaacaaacttctcactactcaaacaagcaggtgacgtggaggagaatcccgggcctactagcgccaccatggccttaccagtgaccgccttgctcctgccgctggccttgctgctccacgccgccaggccgctgttcaatcaagaggtgcagatccctctgaccgagagctactgtggcccctgtcctaagaactggatctgctacaagaacaactgctaccagttcttcgacgagagcaagaattggtacgagagccaggccagctgcatgagccagaatgccagcctgctgaaggtgtacagcaaagaggaccaggacctgctgaaactggtcaagagcgcccactggatgggccttgtgcacatccccaccaatggctcttggcagtgggaggacggcagcattctgagccctaacctgctgaccatcatcgagatgcagaagggcgactgcgccctgtacgccagcagctttaagggcttcatcgagaattgcagcaccccgaacacctacatctgtatgcagagaaccgttggcggaggcggaagtggaggcggaggatctggcggcggaggctctgacctctttaatcaagaagtccagattccactcaccgaatcctactgcggaccttgtccaaaaaattggatttgttataagaacaactgttatcaattctttgatgagtctaaaaattggtatgagtcccaggcttcctgcatgtctcagaacgcttctctgctgaaagtctactctaaagaagatcaggatctcctgaagctcgtcaagtctgcccattggatggggctcgtccacattcctaccaacggaagctggcaatgggaagatggctccatcctgtctccaaatctgctcacgattattgaaatgcagaaaggggattgtgctctctacgccagctccttcaagggatttattgagaactgtagcacgcccaatacttatatctgtatgcaacggaccgtgacgcgtgaggaggacctgaagaacgtgttcccacctgaggtggccgtgttcgagcctagcgaggccgagatcagccacacccagaaagccaccctcgtgtgcctggctaccggcttctaccccgaccatgtggaactgtcttggtgggtcaacggcaaagaggtgcacagcggcgtgtgtaccgacccccagccactgaaagaacagcccgccctgaacgacagccggtactgcctgagcagcagactgagagtgtccgccaccttctggcagaacccccggaaccacttcagatgccaggtgcagttctacggcctgagcgagaacgacgagtggacccaggacagagccaagcccgtgacccagatcgtgtctgccgaagcctggggcagagccgatgatgtgattaagatccactggcaggaaaagaagtccaacaccatcctgggcagccaggaaggcaacaccatgaagaccaacgacacctacatgaagttcagctggctgaccgtgcccgagaagtccctggacaaagaacacagatgcatcgtgcggcacgaaaacaacaagaacggcgtggaccaggaaatcatcttcccacccatcaagaccgatgtgattacaatggaccccaaggacaactgctccaaggacgccaacgataccctgctgctccagctgaccaacaccagcgcctactacatgtacttgttgctgctgctgaagtccgtggtgtacttcgccatcatcacatgctgcctgctgcggagaaccgccttctgctgcaacggcgagaagtct

SEQ ID NO: 17662 - DNA, 2433 bp, synthetic construct
  source 1..2433: mol_type = other DNA
atggccttaccagtgaccgccttgctcctgccgctggccttgctgctccacgccgccaggccgctcgagatccagaaccctgatcctgccgtgtaccagctgcgggatagcaagagcagcgacaagagcgtgtgtctgttcaccgacttcgacagccagaccaacgtgtcccagagcaaggactccgacgtgtacatcaccgataagtgcgtgctggacatgcggagcatggacttcaagagcaactccgccgtggcctggtccaacaagtccgatttcgcctgcgccaacgccttcaacaacagcattatccccgaggacacattcttcccaagccccgagagcagcgactccaccgaccacgtgaagcccaaagagacagagaacaccaagcagcccagcaagagctgccacaagcccaaggccatcgtgcacaccgagaaagtgaacatgatgagcctgaccgtgctgggcctgcggatgctgttcgccaaaaccgtggccgtgaacttcctgctgaccgccaagctgttcttcctcagggccaagcgatctggatctggagcaacaaacttctcactactcaaacaagcaggtgacgtggaggagaatcccgggcctactagcatggccttaccagtgaccgccttgctcctgccgctggccttgctgctccacgccgccaggccgatggaccccgacctggaaatcagagccgccttcctgcggcagagaaacacagccctgagaacagaggtggccgagctggaacaagaggtgcagcggctggaaaacgaggtgtcccagtacgagacaagatacggccctctcggaggcggaaaaggtaccggcggaggcggatctggcggcggaggtagcggtggcggaggatctgaattcgacatccagatgacacagagccctagcagcctgtctgccagcgtgggagacagagtgaccatcacatgcaaggccagcgaccacatcaacaactggctggcctggtatcagcagaagcctggacaggcccctaagctgctgatctacggcgctaccacactggaaacaggcgtgcccagcagattttctggcagcggctctggcaccgactacaccctgacaatatccagcctccagcctgaggacttcgccacctactactgtcagcagagctggaacaccccttggacattcggccagggcaccaagctggaaatcaagagaggcggaggcggaagtggaggcggaggatctggcggcggaggctctcaagttcagcttcaacagcctggcgctgagctggtcaaacctggcgcttctgtgaagatgagctgcaaagccagcggctacgccttcagcagctactggatcaactggatgaagcagaaacccggccagggactcgaatggatcggccaaatctatcccggcgacggcgacaccaactacaacggcaagttcaagggcagagccacactgaccgccgatacctctagcagcacagcctacatgcagctgagcagcctgaccagcgaagatagcgccgtgtacttctgtgcccggtccatcacaacagtcgtgggctgcgctatggactattggggccagggaacaagcgtgaccgtgtctagtacgcgtgaggaggacctgaagaacgtgttcccacctgaggtggccgtgttcgagcctagcgaggccgagatcagccacacccagaaagccaccctcgtgtgcctggctaccggcttctaccccgaccatgtggaactgtcttggtgggtcaacggcaaagaggtgcacagcggcgtgtgtaccgacccccagccactgaaagaacagcccgccctgaacgacagccggtactgcctgagcagcagactgagagtgtccgccaccttctggcagaacccccggaaccacttcagatgccaggtgcagttctacggcctgagcgagaacgacgagtggacccaggacagagccaagcccgtgacccagatcgtgtctgccgaagcctggggcagagccgatgatgtgattaagatccactggcaggaaaagaagtccaacaccatcctgggcagccaggaaggcaacaccatgaagaccaacgacacctacatgaagttcagctggctgaccgtgcccgagaagtccctggacaaagaacacagatgcatcgtgcggcacgaaaacaacaagaacggcgtggaccaggaaatcatcttcccacccatcaagaccgatgtgattacaatggaccccaaggacaactgctccaaggacgccaacgataccctgctgctccagctgaccaacaccagcgcctactacatgtacttgttgctgctgctgaagtccgtggtgtacttcgccatcatcacatgctgcctgctgcggagaaccgccttctgctgcaacggcgagaagtct

SEQ ID NO: 17663 - DNA, 3138 bp, synthetic construct
  source 1..3138: mol_type = other DNA
atggccttaccagtgaccgccttgctcctgccgctggccttgctgctccacgccgccaggccgctcgagatccagaaccctgatcctgccgtgtaccagctgcgggatagcaagagcagcgacaagagcgtgtgtctgttcaccgacttcgacagccagaccaacgtgtcccagagcaaggactccgacgtgtacatcaccgataagtgcgtgctggacatgcggagcatggacttcaagagcaactccgccgtggcctggtccaacaagtccgatttcgcctgcgccaacgccttcaacaacagcattatccccgaggacacattcttcccaagccccgagagcagcgactccaccgaccacgtgaagcccaaagagacagagaacaccaagcagcccagcaagagctgccacaagcccaaggccatcgtgcacaccgagaaagtgaacatgatgagcctgaccgtgctgggcctgcggatgctgttcgccaaaaccgtggccgtgaacttcctgctgaccgccaagctgttcttcctcagggccaagcgatctggatctggagcaacaaacttctcactactcaaacaagcaggtgacgtggaggagaatcccgggcctactagcatggccttaccagtgaccgccttgctcctgccgctggccttgctgctccacgccgccaggccgctgttcaatcaagaggtgcagatccctctgaccgagagctactgtggcccctgtcctaagaactggatctgctacaagaacaactgctaccagttcttcgacgagagcaagaattggtacgagagccaggccagctgcatgagccagaatgccagcctgctgaaggtgtacagcaaagaggaccaggacctgctgaaactggtcaagagcgcccactggatgggccttgtgcacatccccaccaatggctcttggcagtgggaggacggcagcattctgagccctaacctgctgaccatcatcgagatgcagaagggcgactgcgccctgtacgccagcagctttaagggcttcatcgagaattgcagcaccccgaacacctacatctgtatgcagagaaccgttggcggaggcggaagtggaggcggaggatctggcggcggaggctctgacctctttaatcaagaagtccagattccactcaccgaatcctactgcggaccttgtccaaaaaattggatttgttataagaacaactgttatcaattctttgatgagtctaaaaattggtatgagtcccaggcttcctgcatgtctcagaacgcttctctgctgaaagtctactctaaagaagatcaggatctcctgaagctcgtcaagtctgcccattggatggggctcgtccacattcctaccaacggaagctggcaatgggaagatggctccatcctgtctccaaatctgctcacgattattgaaatgcagaaaggggattgtgctctctacgccagctccttcaagggatttattgagaactgtagcacgcccaatacttatatctgtatgcaacggaccgtgggtaccggcggaggcggatctggcggcggaggtagcggtggcggaggatctgaattcgacatccagatgacacagagccctagcagcctgtctgccagcgtgggagacagagtgaccatcacatgcaaggccagcgaccacatcaacaactggctggcctggtatcagcagaagcctggacaggcccctaagctgctgatctacggcgctaccacactggaaacaggcgtgcccagcagattttctggcagcggctctggcaccgactacaccctgacaatatccagcctccagcctgaggacttcgccacctactactgtcagcagagctggaacaccccttggacattcggccagggcaccaagctggaaatcaagagaggcggaggcggaagtggaggcggaggatctggcggcggaggctctcaagttcagcttcaacagcctggcgctgagctggtcaaacctggcgcttctgtgaagatgagctgcaaagccagcggctacgccttcagcagctactggatcaactggatgaagcagaaacccggccagggactcgaatggatcggccaaatctatcccggcgacggcgacaccaactacaacggcaagttcaagggcagagccacactgaccgccgatacctctagcagcacagcctacatgcagctgagcagcctgaccagcgaagatagcgccgtgtacttctgtgcccggtccatcacaacagtcgtgggctgcgctatggactattggggccagggaacaagcgtgaccgtgtctagtacgcgtgaggaggacctgaagaacgtgttcccacctgaggtggccgtgttcgagcctagcgaggccgagatcagccacacccagaaagccaccctcgtgtgcctggctaccggcttctaccccgaccatgtggaactgtcttggtgggtcaacggcaaagaggtgcacagcggcgtgtgtaccgacccccagccactgaaagaacagcccgccctgaacgacagccggtactgcctgagcagcagactgagagtgtccgccaccttctggcagaacccccggaaccacttcagatgccaggtgcagttctacggcctgagcgagaacgacgagtggacccaggacagagccaagcccgtgacccagatcgtgtctgccgaagcctggggcagagccgatgatgtgattaagatccactggcaggaaaagaagtccaacaccatcctgggcagccaggaaggcaacaccatgaagaccaacgacacctacatgaagttcagctggctgaccgtgcccgagaagtccctggacaaagaacacagatgcatcgtgcggcacgaaaacaacaagaacggcgtggaccaggaaatcatcttcccacccatcaagaccgatgtgattacaatggaccccaaggacaactgctccaaggacgccaacgataccctgctgctccagctgaccaacaccagcgcctactacatgtacttgttgctgctgctgaagtccgtggtgtacttcgccatcatcacatgctgcctgctgcggagaaccgccttctgctgcaacggcgagaagtct

SEQ ID NO: 17664 - DNA, 2253 bp, synthetic construct
  source 1..2253: mol_type = other DNA
atggccttaccagtgaccgccttgctcctgccgctggccttgctgctccacgccgccaggccgctcgagatccagaaccctgatcctgccgtgtaccagctgcgggatagcaagagcagcgacaagagcgtgtgtctgttcaccgacttcgacagccagaccaacgtgtcccagagcaaggactccgacgtgtacatcaccgataagtgcgtgctggacatgcggagcatggacttcaagagcaactccgccgtggcctggtccaacaagtccgatttcgcctgcgccaacgccttcaacaacagcattatccccgaggacacattcttcccaagccccgagagcagcgactccaccgaccacgtgaagcccaaagagacagagaacaccaagcagcccagcaagagctgccacaagcccaaggccatcgtgcacaccgagaaagtgaacatgatgagcctgaccgtgctgggcctgcggatgctgttcgccaaaaccgtggccgtgaacttcctgctgaccgccaagctgttcttcctcagggccaagcgatctggatctggagcaacaaacttctcactactcaaacaagcaggtgacgtggaggagaatcccgggcctactagcatggccttaccagtgaccgccttgctcctgccgctggccttgctgctccacgccgccaggccgcagtctgtgctgacacagcctcctagtgtgtctggcgctcctggacagagagtgaccatctcttgtaccggcagcagcagcaatatcggagccggctatgacgtgcactggtatcagcagctccctggcacagcccctaaactgctgatcttcggcaacagcaacagacccagcggcgtgcccgatagattcagcggctttaagagcggcacaagcgccagcctggctatcactggactgcaagccgaggacgaggccgactacttctgccagagctacgatagcagcctgagcggcagcggagtgtttggcacaggcaccaaagtgacagtgcttggcggcggaggcggaagtggaggcggaggatctggcggcggaggctctcaaatgcaactggttcaaagcggcggtggcctggtgcaacctggaagaagtctgagactgagctgtgccgccagcggcttcaccttcgatgattacgccatgcactgggtccgacaggcccctggaaaaggactggaatgggtgtccggcatctcctggaatagcggctctatcggctacgccgacagcgtgaagggcagattcaccatcagccgggacaacgccaagaacagcctgtacctccagatgaactccctgagagccgaggatacagccctgtactactgcgccaaggacatccacagcggcagctactacggcctgctgtactacgctatggacgtgtggggccagggcacaaccgtgacagtttcttctacgcgtgaggaggacctgaagaacgtgttcccacctgaggtggccgtgttcgagcctagcgaggccgagatcagccacacccagaaagccaccctcgtgtgcctggctaccggcttctaccccgaccatgtggaactgtcttggtgggtcaacggcaaagaggtgcacagcggcgtgtgtaccgacccccagccactgaaagaacagcccgccctgaacgacagccggtactgcctgagcagcagactgagagtgtccgccaccttctggcagaacccccggaaccacttcagatgccaggtgcagttctacggcctgagcgagaacgacgagtggacccaggacagagccaagcccgtgacccagatcgtgtctgccgaagcctggggcagagccgatgatgtgattaagatccactggcaggaaaagaagtccaacaccatcctgggcagccaggaaggcaacaccatgaagaccaacgacacctacatgaagttcagctggctgaccgtgcccgagaagtccctggacaaagaacacagatgcatcgtgcggcacgaaaacaacaagaacggcgtggaccaggaaatcatcttcccacccatcaagaccgatgtgattacaatggaccccaaggacaactgctccaaggacgccaacgataccctgctgctccagctgaccaacaccagcgcctactacatgtacttgttgctgctgctgaagtccgtggtgtacttcgccatcatcacatgctgcctgctgcggagaaccgccttctgctgcaacggcgagaagtct

SEQ ID NO: 17665 - DNA, 1764 bp, synthetic construct
  source 1..1764: mol_type = other DNA
atggccttaccagtgaccgccttgctcctgccgctggccttgctgctccacgccgccaggccgctcgagatccagaaccctgatcctgccgtgtaccagctgcgggatagcaagagcagcgacaagagcgtgtgtctgttcaccgacttcgacagccagaccaacgtgtcccagagcaaggactccgacgtgtacatcaccgataagtgcgtgctggacatgcggagcatggacttcaagagcaactccgccgtggcctggtccaacaagtccgatttcgcctgcgccaacgccttcaacaacagcattatccccgaggacacattcttcccaagccccgagagcagcgactccaccgaccacgtgaagcccaaagagacagagaacaccaagcagcccagcaagagctgccacaagcccaaggccatcgtgcacaccgagaaagtgaacatgatgagcctgaccgtgctgggcctgcggatgctgttcgccaaaaccgtggccgtgaacttcctgctgaccgccaagctgttcttcctcagggccaagcgatctggatctggagcaacaaacttctcactactcaaacaagcaggtgacgtggaggagaatcccgggcctactagcatggccttaccagtgaccgccttgctcctgccgctggccttgctgctccacgccgccaggccgatgtgtatgccctgcttcaccaccgaccatcagatggcccggaagtgcgacgattgctgtggcggaaaaggcagaggcaagtgctacggccctcagtgcttgtgtagactcgagggcggaggcggaagtggaggcggaggatctggcggcggaggctctttcgaagtgtgtatgccttgttttaccacggatcaacaaatggctcgcaagtgttctgactgctgcggaggcaaaggccggggaaagtgttatggcccacagtgtctgtgccggacgcgtgaggaggacctgaagaacgtgttcccacctgaggtggccgtgttcgagcctagcgaggccgagatcagccacacccagaaagccaccctcgtgtgcctggctaccggcttctaccccgaccatgtggaactgtcttggtgggtcaacggcaaagaggtgcacagcggcgtgtgtaccgacccccagccactgaaagaacagcccgccctgaacgacagccggtactgcctgagcagcagactgagagtgtccgccaccttctggcagaacccccggaaccacttcagatgccaggtgcagttctacggcctgagcgagaacgacgagtggacccaggacagagccaagcccgtgacccagatcgtgtctgccgaagcctggggcagagccgatgatgtgattaagatccactggcaggaaaagaagtccaacaccatcctgggcagccaggaaggcaacaccatgaagaccaacgacacctacatgaagttcagctggctgaccgtgcccgagaagtccctggacaaagaacacagatgcatcgtgcggcacgaaaacaacaagaacggcgtggaccaggaaatcatcttcccacccatcaagaccgatgtgattacaatggaccccaaggacaactgctccaaggacgccaacgataccctgctgctccagctgaccaacaccagcgcctactacatgtacttgttgctgctgctgaagtccgtggtgtacttcgccatcatcacatgctgcctgctgcggagaaccgccttctgctgcaacggcgagaagtct

SEQ ID NO: 17666 - DNA, 2394 bp, synthetic construct
  source 1..2394: mol_type = other DNA
atggccttaccagtgaccgccttgctcctgccgctggccttgctgctccacgccgccaggccgctcgagatccagaaccctgatcctgccgtgtaccagctgcgggatagcaagagcagcgacaagagcgtgtgtctgttcaccgacttcgacagccagaccaacgtgtcccagagcaaggactccgacgtgtacatcaccgataagtgcgtgctggacatgcggagcatggacttcaagagcaactccgccgtggcctggtccaacaagtccgatttcgcctgcgccaacgccttcaacaacagcattatccccgaggacacattcttcccaagccccgagagcagcgactccaccgaccacgtgaagcccaaagagacagagaacaccaagcagcccagcaagagctgccacaagcccaaggccatcgtgcacaccgagaaagtgaacatgatgagcctgaccgtgctgggcctgcggatgctgttcgccaaaaccgtggccgtgaacttcctgctgaccgccaagctgttcttcctcagggccaagcgatctggatctggagcaacaaacttctcactactcaaacaagcaggtgacgtggaggagaatcccgggcctactagcatggccttaccagtgaccgccttgctcctgccgctggccttgctgctccacgccgccaggccgttcgaagtgtgtatgccttgttttaccacggatcaacaaatggctcgcaagtgttctgactgctgcggaggcaaaggccggggaaagtgttatggcccacagtgtctgtgccggggtaccggcggaggcggatctggcggcggaggtagcggtggcggaggatctgaattcgacatccagatgacacagagccctagcagcctgtctgccagcgtgggagacagagtgaccatcacatgcaaggccagcgaccacatcaacaactggctggcctggtatcagcagaagcctggacaggcccctaagctgctgatctacggcgctaccacactggaaacaggcgtgcccagcagattttctggcagcggctctggcaccgactacaccctgacaatatccagcctccagcctgaggacttcgccacctactactgtcagcagagctggaacaccccttggacattcggccagggcaccaagctggaaatcaagagaggcggaggcggaagtggaggcggaggatctggcggcggaggctctcaagttcagcttcaacagcctggcgctgagctggtcaaacctggcgcttctgtgaagatgagctgcaaagccagcggctacgccttcagcagctactggatcaactggatgaagcagaaacccggccagggactcgaatggatcggccaaatctatcccggcgacggcgacaccaactacaacggcaagttcaagggcagagccacactgaccgccgatacctctagcagcacagcctacatgcagctgagcagcctgaccagcgaagatagcgccgtgtacttctgtgcccggtccatcacaacagtcgtgggctgcgctatggactattggggccagggaacaagcgtgaccgtgtctagtacgcgtgaggaggacctgaagaacgtgttcccacctgaggtggccgtgttcgagcctagcgaggccgagatcagccacacccagaaagccaccctcgtgtgcctggctaccggcttctaccccgaccatgtggaactgtcttggtgggtcaacggcaaagaggtgcacagcggcgtgtgtaccgacccccagccactgaaagaacagcccgccctgaacgacagccggtactgcctgagcagcagactgagagtgtccgccaccttctggcagaacccccggaaccacttcagatgccaggtgcagttctacggcctgagcgagaacgacgagtggacccaggacagagccaagcccgtgacccagatcgtgtctgccgaagcctggggcagagccgatgatgtgattaagatccactggcaggaaaagaagtccaacaccatcctgggcagccaggaaggcaacaccatgaagaccaacgacacctacatgaagttcagctggctgaccgtgcccgagaagtccctggacaaagaacacagatgcatcgtgcggcacgaaaacaacaagaacggcgtggaccaggaaatcatcttcccacccatcaagaccgatgtgattacaatggaccccaaggacaactgctccaaggacgccaacgataccctgctgctccagctgaccaacaccagcgcctactacatgtacttgttgctgctgctgaagtccgtggtgtacttcgccatcatcacatgctgcctgctgcggagaaccgccttctgctgcaacggcgagaagtct

SEQ ID NO: 17667 - DNA, 2784 bp, synthetic construct
  source 1..2784: mol_type = other DNA
atggccttaccagtgaccgccttgctcctgccgctggccttgctgctccacgccgccaggccgctcgagatccagaaccctgatcctgccgtgtaccagctgcgggatagcaagagcagcgacaagagcgtgtgtctgttcaccgacttcgacagccagaccaacgtgtcccagagcaaggactccgacgtgtacatcaccgataagtgcgtgctggacatgcggagcatggacttcaagagcaactccgccgtggcctggtccaacaagtccgatttcgcctgcgccaacgccttcaacaacagcattatccccgaggacacattcttcccaagccccgagagcagcgactccaccgaccacgtgaagcccaaagagacagagaacaccaagcagcccagcaagagctgccacaagcccaaggccatcgtgcacaccgagaaagtgaacatgatgagcctgaccgtgctgggcctgcggatgctgttcgccaaaaccgtggccgtgaacttcctgctgaccgccaagctgttcttcctcagggccaagcgatctggatctggagcaacaaacttctcactactcaaacaagcaggtgacgtggaggagaatcccgggcctactagcatggccttaccagtgaccgccttgctcctgccgctggccttgctgctccacgccgccaggccgttcgaaagccccgtagctcctgcctgtgaccccagactcctaaataaactgctgcgtgactcccacctccttcacagccgactgagtcagtgtcccgacgtggaccctttgtctatccctgttctgctgcctgctgtggactttagcctgggagaatggaaaacccagacggaacagagcaaggcacaggacattctaggggcagtgtcccttctactggagggagtgatggcagcacgaggacagttggaaccctcctgcctctcatccctcctgggacagctttctgggcaggttcgcctcctcttgggggccctgcagggcctcctaggaacccagcttcctctacagggcaggaccacagctcacaaggaccccaatgccctcttcttgagcttgcaacaactgcttcggggaaaggtgcgcttcctgcttctggtagaaggtcccaccctctgtgtcagacggaccctgccaaccacagctgtcccaagcagtacttctggtaccggcggaggcggatctggcggcggaggtagcggtggcggaggatctgaattcgacatccagatgacacagagccctagcagcctgtctgccagcgtgggagacagagtgaccatcacatgcaaggccagcgaccacatcaacaactggctggcctggtatcagcagaagcctggacaggcccctaagctgctgatctacggcgctaccacactggaaacaggcgtgcccagcagattttctggcagcggctctggcaccgactacaccctgacaatatccagcctccagcctgaggacttcgccacctactactgtcagcagagctggaacaccccttggacattcggccagggcaccaagctggaaatcaagagaggcggaggcggaagtggaggcggaggatctggcggcggaggctctcaagttcagcttcaacagcctggcgctgagctggtcaaacctggcgcttctgtgaagatgagctgcaaagccagcggctacgccttcagcagctactggatcaactggatgaagcagaaacccggccagggactcgaatggatcggccaaatctatcccggcgacggcgacaccaactacaacggcaagttcaagggcagagccacactgaccgccgatacctctagcagcacagcctacatgcagctgagcagcctgaccagcgaagatagcgccgtgtacttctgtgcccggtccatcacaacagtcgtgggctgcgctatggactattggggccagggaacaagcgtgaccgtgtctagtacgcgtgaggaggacctgaagaacgtgttcccacctgaggtggccgtgttcgagcctagcgaggccgagatcagccacacccagaaagccaccctcgtgtgcctggctaccggcttctaccccgaccatgtggaactgtcttggtgggtcaacggcaaagaggtgcacagcggcgtgtgtaccgacccccagccactgaaagaacagcccgccctgaacgacagccggtactgcctgagcagcagactgagagtgtccgccaccttctggcagaacccccggaaccacttcagatgccaggtgcagttctacggcctgagcgagaacgacgagtggacccaggacagagccaagcccgtgacccagatcgtgtctgccgaagcctggggcagagccgatgatgtgattaagatccactggcaggaaaagaagtccaacaccatcctgggcagccaggaaggcaacaccatgaagaccaacgacacctacatgaagttcagctggctgaccgtgcccgagaagtccctggacaaagaacacagatgcatcgtgcggcacgaaaacaacaagaacggcgtggaccaggaaatcatcttcccacccatcaagaccgatgtgattacaatggaccccaaggacaactgctccaaggacgccaacgataccctgctgctccagctgaccaacaccagcgcctactacatgtacttgttgctgctgctgaagtccgtggtgtacttcgccatcatcacatgctgcctgctgcggagaaccgccttctgctgcaacggcgagaagtct

SEQ ID NO: 17668 - DNA, 2505 bp, synthetic construct
  source 1..2505: mol_type = other DNA
atggccttaccagtgaccgccttgctcctgccgctggccttgctgctccacgccgccaggccgctcgagatccagaaccctgatcctgccgtgtaccagctgcgggatagcaagagcagcgacaagagcgtgtgtctgttcaccgacttcgacagccagaccaacgtgtcccagagcaaggactccgacgtgtacatcaccgataagtgcgtgctggacatgcggagcatggacttcaagagcaactccgccgtggcctggtccaacaagtccgatttcgcctgcgccaacgccttcaacaacagcattatccccgaggacacattcttcccaagccccgagagcagcgactccaccgaccacgtgaagcccaaagagacagagaacaccaagcagcccagcaagagctgccacaagcccaaggccatcgtgcacaccgagaaagtgaacatgatgagcctgaccgtgctgggcctgcggatgctgttcgccaaaaccgtggccgtgaacttcctgctgaccgccaagctgttcttcctcagggccaagcgatctggatctggagcaacaaacttctcactactcaaacaagcaggtgacgtggaggagaatcccgggcctactagcatggccttaccagtgaccgccttgctcctgccgctggccttgctgctccacgccgccaggccgttcgaaatgggcagctgggaagagttcgagctgagactgaacgccatcgaggaacggctgtatgccctcggaggatctgaagccgagctggcctacttcgagtacgtgatcgccgacttcgagggcaacctgcagcggtacaaaggcaagggcaaccctgaagtggaagccctgtacttcgaggccgacgccatcttcgaggaactggtggcctacagacacaacggtaccggcggaggcggatctggcggcggaggtagcggtggcggaggatctgaattcgacatccagatgacacagagccctagcagcctgtctgccagcgtgggagacagagtgaccatcacatgcaaggccagcgaccacatcaacaactggctggcctggtatcagcagaagcctggacaggcccctaagctgctgatctacggcgctaccacactggaaacaggcgtgcccagcagattttctggcagcggctctggcaccgactacaccctgacaatatccagcctccagcctgaggacttcgccacctactactgtcagcagagctggaacaccccttggacattcggccagggcaccaagctggaaatcaagagaggcggaggcggaagtggaggcggaggatctggcggcggaggctctcaagttcagcttcaacagcctggcgctgagctggtcaaacctggcgcttctgtgaagatgagctgcaaagccagcggctacgccttcagcagctactggatcaactggatgaagcagaaacccggccagggactcgaatggatcggccaaatctatcccggcgacggcgacaccaactacaacggcaagttcaagggcagagccacactgaccgccgatacctctagcagcacagcctacatgcagctgagcagcctgaccagcgaagatagcgccgtgtacttctgtgcccggtccatcacaacagtcgtgggctgcgctatggactattggggccagggaacaagcgtgaccgtgtctagtacgcgtgaggaggacctgaagaacgtgttcccacctgaggtggccgtgttcgagcctagcgaggccgagatcagccacacccagaaagccaccctcgtgtgcctggctaccggcttctaccccgaccatgtggaactgtcttggtgggtcaacggcaaagaggtgcacagcggcgtgtgtaccgacccccagccactgaaagaacagcccgccctgaacgacagccggtactgcctgagcagcagactgagagtgtccgccaccttctggcagaacccccggaaccacttcagatgccaggtgcagttctacggcctgagcgagaacgacgagtggacccaggacagagccaagcccgtgacccagatcgtgtctgccgaagcctggggcagagccgatgatgtgattaagatccactggcaggaaaagaagtccaacaccatcctgggcagccaggaaggcaacaccatgaagaccaacgacacctacatgaagttcagctggctgaccgtgcccgagaagtccctggacaaagaacacagatgcatcgtgcggcacgaaaacaacaagaacggcgtggaccaggaaatcatcttcccacccatcaagaccgatgtgattacaatggaccccaaggacaactgctccaaggacgccaacgataccctgctgctccagctgaccaacaccagcgcctactacatgtacttgttgctgctgctgaagtccgtggtgtacttcgccatcatcacatgctgcctgctgcggagaaccgccttctgctgcaacggcgagaagtct

SEQ ID NO: 17669 - DNA, 2610 bp, synthetic construct
  source 1..2610: mol_type = other DNA
atggccttaccagtgaccgccttgctcctgccgctggccttgctgctccacgccgccaggccgctcgaggaggacctgaagaacgtgttcccacctgaggtggccgtgttcgagcctagcgaggccgagatcagccacacccagaaagccaccctcgtgtgcctggctaccggcttctaccccgaccatgtggaactgtcttggtgggtcaacggcaaagaggtgcacagcggcgtgtctaccgacccccagccactgaaagaacagcccgccctgaacgacagccggtactgcctgagcagcagactgagagtgtccgccaccttctggcagaacccccggaaccacttcagatgccaggtgcagttctacggcctgagcgagaacgacgagtggacccaggacagagccaagcccgtgacccagatcgtgtctgccgaagcctggggcagagccgattgcggctttaccagcgagagctaccagcagggcgtgctgagcgccaccaacctgagcgtgatcggcttcagaatcctgctgctgaaagtggccggctttaacctgctgatgaccctgcggctgtggtccagcagggccaagcgatctggatctggagcaacaaacttctcactactcaaacaagcaggtgacgtggaggagaatcccgggcctactagcatggccttaccagtgaccgccttgctcctgccgctggccttgctgctccacgccgccaggccggacatccagatgacacagactacatcctccctgtctgcctctctgggagacagagtcaccatcagttgcagggcaagtcaggacattagtaaatatttaaattggtatcagcagaaaccagatggaactgttaaactcctgatctaccatacatcaagattacactcaggagtcccatcaaggttcagtggcagtgggtctggaacagattattctctcaccattagcaacctggagcaagaagatattgccacttacttttgccaacagggtaatacgcttccgtacacgttcggaggggggaccaagctggagatcacaggtggcggtggctcgggcggtggtgggtcgggtggcggcggatctgaggtgaaactgcaggagtcaggacctggcctggtggcgccctcacagagcctgtccgtcacatgcactgtctcaggggtctcattacccgactatggtgtaagctggattcgccagcctccacgaaagggtctggagtggctgggagtaatatggggtagtgaaaccacatactataattcagctctcaaatccagactgaccatcatcaaggacaactccaagagccaagttttcttaaaaatgaacagtctgcaaactgatgacacagccatttactactgtgccaaacattattactacggtggtagctatgctatggactactggggtcaaggaacctcagtcaccgtctcctcaacgcgtatccagaaccctgatcctgccgtgtaccagctgcgggatagcaagagcagcgacaagagcgtgtgtctgttcaccgacttcgacagccagaccaacgtgtcccagagcaaggactccgacgtgtacatcaccgataagaccgtgctggacatgcggagcatggacttcaagagcaactccgccgtggcctggtccaacaagtccgatttcgcctgcgccaacgccttcaacaacagcattatccccgaggacacattcttcccaagccccgagagcagctgcgacgtgaagctggtggaaaagagcttcgagacagacaccaacctgaacttccagatcctgtacgagatcctgctgggcaaggccaccctgtacgccgtgctggtgtctgccctggtgctgatggctatggtcaagcggaaggacagccggggacgcgccaagagaagcggatctggcgtgaagcagaccctgaatttcgacctgctgaagctggctggcgacgtggaatccaacccaggcccttctagaggccatatgaccgagtacaagcccacggtgcgcctcgccacccgcgacgacgtccccagggccgtacgcaccctcgccgccgcgttcgccgactaccccgccacgcgccacaccgtcgatccggaccgccacatcgagcgggtcaccgagctgcaagaactcttcctcacgcgcgtcgggctcgacatcggcaaggtgtgggtcgcggacgacggcgccgcggtggcggtctggaccacgccggagagcgtcgaagcgggggcggtgttcgccgagatcggcccgcgcatggccgagttgagcggttcccggctggccgcgcagcaacagatggaaggcctcctggcgccgcaccggcccaaggagcccgcgtggttcctggccaccgtcggcgtctcgcccgaccaccagggcaagggtctgggcagcgccgtcgtgctccccggagtggaggcggccgagcgcgccggggtgcccgccttcctggagacctccgcgccccgcaacctccccttctacgagcggctcggcttcaccgtcaccgccgacgtcgaggtgcccgaaggaccgcgcacctggtgcatgacccgcaagcccggtgcctga

SEQ ID NO: 17670 - DNA, 2613 bp, synthetic construct
  source 1..2613: mol_type = other DNA
atggccttaccagtgaccgccttgctcctgccgctggccttgctgctccacgccgccaggccgctcgaggaggacctgaagaacgtgttcccacctgaggtggccgtgttcgagcctagcgaggccgagatcagccacacccagaaagccaccctcgtgtgcctggctaccggcttctaccccgaccatgtggaactgtcttggtgggtcaacggcaaagaggtgcacagcggcgtgtctaccgacccccagccactgaaagaacagcccgccctgaacgacagccggtactgcctgagcagcagactgagagtgtccgccaccttctggcagaacccccggaaccacttcagatgccaggtgcagttctacggcctgagcgagaacgacgagtggacccaggacagagccaagcccgtgacccagatcgtgtctgccgaagcctggggcagagccgattgcggctttaccagcgagagctaccagcagggcgtgctgagcgccaccaacctgagcgtgatcggcttcagaatcctgctgctgaaagtggccggctttaacctgctgatgaccctgcggctgtggtccagcagggccaagcgatctggatctggagcaacaaacttctcactactcaaacaagcaggtgacgtggaggagaatcccgggcctactagcaccatggccttaccagtgaccgccttgctcctgccgctggccttgctgctccacgccgccaggccggagatcgtgatgacccagagccctgccaccctgtctctgagccctggcgaaagagccaccctgagctgtagagccagccaggacatcagcaagtacctgaactggtatcagcagaagcccggccaggcccccagactgctgatctaccacaccagcagactgcacagcggcatccccgccagattttctggctctggcagcggcaccgactacaccctgacaatcagcagcctccagcccgaggacttcgccgtgtacttctgtcagcaaggcaacaccctgccctacaccttcggccagggcaccaagctggaaatcaagggcggaggcggaagtggaggcggaggatctggcggcggaggctctcaggtgcaactccaggaatctggccctggcctcgtgaagcccagcgagacactgagcctgacctgtaccgtgtccggcgtgtccctgcctgactatggcgtgtcctggatcagacagccccctggcaagggcctggaatggatcggagtgatttggggcagcgaaaccacctactacaacagctccctgaagtccagagtgaccatctccaaggacaactccaagaaccaggtgtccctgaagctgagcagcgtgacagccgccgacaccgccgtgtattactgcgccaagcactactactacggcggcagctacgctatggactactggggccagggaaccctcgtgaccgtgtctagtacgcgtatccagaaccctgatcctgccgtgtaccagctgcgggatagcaagagcagcgacaagagcgtgtgtctgttcaccgacttcgacagccagaccaacgtgtcccagagcaaggactccgacgtgtacatcaccgataagaccgtgctggacatgcggagcatggacttcaagagcaactccgccgtggcctggtccaacaagtccgatttcgcctgcgccaacgccttcaacaacagcattatccccgaggacacattcttcccaagccccgagagcagctgcgacgtgaagctggtggaaaagagcttcgagacagacaccaacctgaacttccagatcctgtacgagatcctgctgggcaaggccaccctgtacgccgtgctggtgtctgccctggtgctgatggctatggtcaagcggaaggacagccggggacgcgccaagagaagcggatctggcgtgaagcagaccctgaatttcgacctgctgaagctggctggcgacgtggaatccaacccaggcccttctagaggccatatgaccgagtacaagcccacggtgcgcctcgccacccgcgacgacgtccccagggccgtacgcaccctcgccgccgcgttcgccgactaccccgccacgcgccacaccgtcgatccggaccgccacatcgagcgggtcaccgagctgcaagaactcttcctcacgcgcgtcgggctcgacatcggcaaggtgtgggtcgcggacgacggcgccgcggtggcggtctggaccacgccggagagcgtcgaagcgggggcggtgttcgccgagatcggcccgcgcatggccgagttgagcggttcccggctggccgcgcagcaacagatggaaggcctcctggcgccgcaccggcccaaggagcccgcgtggttcctggccaccgtcggcgtctcgcccgaccaccagggcaagggtctgggcagcgccgtcgtgctccccggagtggaggcggccgagcgcgccggggtgcccgccttcctggagacctccgcgccccgcaacctccccttctacgagcggctcggcttcaccgtcaccgccgacgtcgaggtgcccgaaggaccgcgcacctggtgcatgacccgcaagcccggtgcctga

SEQ ID NO: 17671 - DNA, 2616 bp, synthetic construct
  source 1..2616: mol_type = other DNA
atggccttaccagtgaccgccttgctcctgccgctggccttgctgctccacgccgccaggccgctcgaggaggacctgaagaacgtgttcccacctgaggtggccgtgttcgagcctagcgaggccgagatcagccacacccagaaagccaccctcgtgtgcctggctaccggcttctaccccgaccatgtggaactgtcttggtgggtcaacggcaaagaggtgcacagcggcgtgtctaccgacccccagccactgaaagaacagcccgccctgaacgacagccggtactgcctgagcagcagactgagagtgtccgccaccttctggcagaacccccggaaccacttcagatgccaggtgcagttctacggcctgagcgagaacgacgagtggacccaggacagagccaagcccgtgacccagatcgtgtctgccgaagcctggggcagagccgattgcggctttaccagcgagagctaccagcagggcgtgctgagcgccaccaacctgagcgtgatcggcttcagaatcctgctgctgaaagtggccggctttaacctgctgatgaccctgcggctgtggtccagcagggccaagcgatctggatctggagcaacaaacttctcactactcaaacaagcaggtgacgtggaggagaatcccgggcctactagcaccatggccttaccagtgaccgccttgctcctgccgctggccttgctgctccacgccgccaggccggacgagatcgtgctgacacagagccccgccaccctgtcactgtctccaggcgaaagagccaccctgagctgtagcgccagcagcagcgtgtcctacatgcactggtatcagcagaagcccggccaggcccccagactgctgatctacgataccagcaagctggcctccggcatccccgccagattttctggcagcggctccggcaccgacttcaccctgacaatcagcagcctggaacccgaggacgtggccgtgtactactgttttcaaggcagcgtgtaccccttcaccttcggccagggcaccaagctggaaatcaagagaggtggcggtggctcgggcggtggtgggtcgggtggcggcggatctcaggtgcagctccaggaatctggccctggcctcgtgaagcctagccagaccctgagcctgacctgtaccgtgtctggcggcagcatcagcacaagcggcatgggcgtgggctggatcagacagcaccctggcaagggcctggaatggatcggccacatttggtgggacgacgacaagcggtacaaccccgccctgaagtccagagtgaccatcagcgtggacaccagcaagaaccagttcagcctgaagctgagcagcgtgacagccgccgataccgccgtgtattattgcgcccggatggaactgtggtcctactacttcgactactggggccagggaaccctcgtgaccgtgtctagtacgcgtatccagaaccctgatcctgccgtgtaccagctgcgggatagcaagagcagcgacaagagcgtgtgtctgttcaccgacttcgacagccagaccaacgtgtcccagagcaaggactccgacgtgtacatcaccgataagaccgtgctggacatgcggagcatggacttcaagagcaactccgccgtggcctggtccaacaagtccgatttcgcctgcgccaacgccttcaacaacagcattatccccgaggacacattcttcccaagccccgagagcagctgcgacgtgaagctggtggaaaagagcttcgagacagacaccaacctgaacttccagatcctgtacgagatcctgctgggcaaggccaccctgtacgccgtgctggtgtctgccctggtgctgatggctatggtcaagcggaaggacagccggggacgcgccaagagaagcggatctggcgtgaagcagaccctgaatttcgacctgctgaagctggctggcgacgtggaatccaacccaggcccttctagaggccatatgaccgagtacaagcccacggtgcgcctcgccacccgcgacgacgtccccagggccgtacgcaccctcgccgccgcgttcgccgactaccccgccacgcgccacaccgtcgatccggaccgccacatcgagcgggtcaccgagctgcaagaactcttcctcacgcgcgtcgggctcgacatcggcaaggtgtgggtcgcggacgacggcgccgcggtggcggtctggaccacgccggagagcgtcgaagcgggggcggtgttcgccgagatcggcccgcgcatggccgagttgagcggttcccggctggccgcgcagcaacagatggaaggcctcctggcgccgcaccggcccaaggagcccgcgtggttcctggccaccgtcggcgtctcgcccgaccaccagggcaagggtctgggcagcgccgtcgtgctccccggagtggaggcggccgagcgcgccggggtgcccgccttcctggagacctccgcgccccgcaacctccccttctacgagcggctcggcttcaccgtcaccgccgacgtcgaggtgcccgaaggaccgcgcacctggtgcatgacccgcaagcccggtgcctga

SEQ ID NO: 17672 - DNA, 2604 bp, synthetic construct
  source 1..2604: mol_type = other DNA
atggccttaccagtgaccgccttgctcctgccgctggccttgctgctccacgccgccaggccgctcgaggaggacctgaagaacgtgttcccacctgaggtggccgtgttcgagcctagcgaggccgagatcagccacacccagaaagccaccctcgtgtgcctggctaccggcttctaccccgaccatgtggaactgtcttggtgggtcaacggcaaagaggtgcacagcggcgtgtctaccgacccccagccactgaaagaacagcccgccctgaacgacagccggtactgcctgagcagcagactgagagtgtccgccaccttctggcagaacccccggaaccacttcagatgccaggtgcagttctacggcctgagcgagaacgacgagtggacccaggacagagccaagcccgtgacccagatcgtgtctgccgaagcctggggcagagccgattgcggctttaccagcgagagctaccagcagggcgtgctgagcgccaccaacctgagcgtgatcggcttcagaatcctgctgctgaaagtggccggctttaacctgctgatgaccctgcggctgtggtccagcagggccaagcgatctggatctggagcaacaaacttctcactactcaaacaagcaggtgacgtggaggagaatcccgggcctactagcatggccttaccagtgaccgccttgctcctgccgctggccttgctgctccacgccgccaggccggacatccagatgacacagagccctagcagcctgtctgccagcgtgggagacagagtgaccatcacctgtagagccagccaggacatcagcaactacctgaactggtatcagcagaagcccggcaaggcccctaagctgctgatctactacaccagcagactgcacagcggcgtgcccagcagattttctggctctggcagcggcaccgacttcaccctgacaatatctagcctccagcctgaggacttcgccacctactattgccagcagggcaacaccctgccttacacatttggacagggcaccaaggtggaaatcaagagaggcggaggcggaagtggaggcggaggatctggcggcggaggctctgaagtgcagctggttgaatcaggtggcggcctggttcaacctggcggatctctgagactgagctgtgccgccagcggcttcaccttcagcgactactttatgagctgggtccgacaggcccctggcaaaggacttgaatgggtcgccaccatcagcaatggcggcacctacacttactaccccgacagcgtgaagggcagattcaccatctccagagacaacagcaagaacaccctgtacctccagatgaactccctgagagccgaggacaccgccgtgtactactgcgccagattcgacggctacatcttcgactattggggccagggcaccctggtcacagtctcttctacgcgtatccagaaccctgatcctgccgtgtaccagctgcgggatagcaagagcagcgacaagagcgtgtgtctgttcaccgacttcgacagccagaccaacgtgtcccagagcaaggactccgacgtgtacatcaccgataagaccgtgctggacatgcggagcatggacttcaagagcaactccgccgtggcctggtccaacaagtccgatttcgcctgcgccaacgccttcaacaacagcattatccccgaggacacattcttcccaagccccgagagcagctgcgacgtgaagctggtggaaaagagcttcgagacagacaccaacctgaacttccagatcctgtacgagatcctgctgggcaaggccaccctgtacgccgtgctggtgtctgccctggtgctgatggctatggtcaagcggaaggacagccggggacgcgccaagagaagcggatctggcgtgaagcagaccctgaatttcgacctgctgaagctggctggcgacgtggaatccaacccaggcccttctagaggccatatgaccgagtacaagcccacggtgcgcctcgccacccgcgacgacgtccccagggccgtacgcaccctcgccgccgcgttcgccgactaccccgccacgcgccacaccgtcgatccggaccgccacatcgagcgggtcaccgagctgcaagaactcttcctcacgcgcgtcgggctcgacatcggcaaggtgtgggtcgcggacgacggcgccgcggtggcggtctggaccacgccggagagcgtcgaagcgggggcggtgttcgccgagatcggcccgcgcatggccgagttgagcggttcccggctggccgcgcagcaacagatggaaggcctcctggcgccgcaccggcccaaggagcccgcgtggttcctggccaccgtcggcgtctcgcccgaccaccagggcaagggtctgggcagcgccgtcgtgctccccggagtggaggcggccgagcgcgccggggtgcccgccttcctggagacctccgcgccccgcaacctccccttctacgagcggctcggcttcaccgtcaccgccgacgtcgaggtgcccgaaggaccgcgcacctggtgcatgacccgcaagcccggtgcctga

SEQ ID NO: 17673 - DNA, 2616 bp, synthetic construct
  source 1..2616: mol_type = other DNA
atggccttaccagtgaccgccttgctcctgccgctggccttgctgctccacgccgccaggccgctcgaggaggacctgaagaacgtgttcccacctgaggtggccgtgttcgagcctagcgaggccgagatcagccacacccagaaagccaccctcgtgtgcctggctaccggcttctaccccgaccatgtggaactgtcttggtgggtcaacggcaaagaggtgcacagcggcgtgtctaccgacccccagccactgaaagaacagcccgccctgaacgacagccggtactgcctgagcagcagactgagagtgtccgccaccttctggcagaacccccggaaccacttcagatgccaggtgcagttctacggcctgagcgagaacgacgagtggacccaggacagagccaagcccgtgacccagatcgtgtctgccgaagcctggggcagagccgattgcggctttaccagcgagagctaccagcagggcgtgctgagcgccaccaacctgagcgtgatcggcttcagaatcctgctgctgaaagtggccggctttaacctgctgatgaccctgcggctgtggtccagcagggccaagcgatctggatctggagcaacaaacttctcactactcaaacaagcaggtgacgtggaggagaatcccgggcctactagcatggccttaccagtgaccgccttgctcctgccgctggccttgctgctccacgccgccaggccggacatccagatgacacagagccctagcagcctgtctgccagcgtgggagacagagtgaccatcacatgcaaggccagcgaccacatcaacaactggctggcctggtatcagcagaagcctggacaggcccctaagctgctgatctacggcgctaccacactggaaacaggcgtgcccagcagattttctggcagcggctctggcaccgactacaccctgacaatatccagcctccagcctgaggacttcgccacctactactgtcagcagagctggaacaccccttggacattcggccagggcaccaagctggaaatcaagagaggcggaggcggaagtggaggcggaggatctggcggcggaggctctcaagttcagcttcaacagcctggcgctgagctggtcaaacctggcgcttctgtgaagatgagctgcaaagccagcggctacgccttcagcagctactggatcaactggatgaagcagaaacccggccagggactcgaatggatcggccaaatctatcccggcgacggcgacaccaactacaacggcaagttcaagggcagagccacactgaccgccgatacctctagcagcacagcctacatgcagctgagcagcctgaccagcgaagatagcgccgtgtacttctgtgcccggtccatcacaacagtcgtgggctgcgctatggactattggggccagggaacaagcgtgaccgtgtctagtacgcgtatccagaaccctgatcctgccgtgtaccagctgcgggatagcaagagcagcgacaagagcgtgtgtctgttcaccgacttcgacagccagaccaacgtgtcccagagcaaggactccgacgtgtacatcaccgataagaccgtgctggacatgcggagcatggacttcaagagcaactccgccgtggcctggtccaacaagtccgatttcgcctgcgccaacgccttcaacaacagcattatccccgaggacacattcttcccaagccccgagagcagctgcgacgtgaagctggtggaaaagagcttcgagacagacaccaacctgaacttccagatcctgtacgagatcctgctgggcaaggccaccctgtacgccgtgctggtgtctgccctggtgctgatggctatggtcaagcggaaggacagccggggacgcgccaagagaagcggatctggcgtgaagcagaccctgaatttcgacctgctgaagctggctggcgacgtggaatccaacccaggcccttctagaggccatatgaccgagtacaagcccacggtgcgcctcgccacccgcgacgacgtccccagggccgtacgcaccctcgccgccgcgttcgccgactaccccgccacgcgccacaccgtcgatccggaccgccacatcgagcgggtcaccgagctgcaagaactcttcctcacgcgcgtcgggctcgacatcggcaaggtgtgggtcgcggacgacggcgccgcggtggcggtctggaccacgccggagagcgtcgaagcgggggcggtgttcgccgagatcggcccgcgcatggccgagttgagcggttcccggctggccgcgcagcaacagatggaaggcctcctggcgccgcaccggcccaaggagcccgcgtggttcctggccaccgtcggcgtctcgcccgaccaccagggcaagggtctgggcagcgccgtcgtgctccccggagtggaggcggccgagcgcgccggggtgcccgccttcctggagacctccgcgccccgcaacctccccttctacgagcggctcggcttcaccgtcaccgccgacgtcgaggtgcccgaaggaccgcgcacctggtgcatgacccgcaagcccggtgcctga

SEQ ID NO: 17674 - DNA, 2622 bp, synthetic construct
  source 1..2622: mol_type = other DNA
atggccttaccagtgaccgccttgctcctgccgctggccttgctgctccacgccgccaggccgctcgaggaggacctgaagaacgtgttcccacctgaggtggccgtgttcgagcctagcgaggccgagatcagccacacccagaaagccaccctcgtgtgcctggctaccggcttctaccccgaccatgtggaactgtcttggtgggtcaacggcaaagaggtgcacagcggcgtgtctaccgacccccagccactgaaagaacagcccgccctgaacgacagccggtactgcctgagcagcagactgagagtgtccgccaccttctggcagaacccccggaaccacttcagatgccaggtgcagttctacggcctgagcgagaacgacgagtggacccaggacagagccaagcccgtgacccagatcgtgtctgccgaagcctggggcagagccgattgcggctttaccagcgagagctaccagcagggcgtgctgagcgccaccaacctgagcgtgatcggcttcagaatcctgctgctgaaagtggccggctttaacctgctgatgaccctgcggctgtggtccagcagggccaagcgatctggatctggagcaacaaacttctcactactcaaacaagcaggtgacgtggaggagaatcccgggcctactagcatggccttaccagtgaccgccttgctcctgccgctggccttgctgctccacgccgccaggccgcagatcgtgctgtctcagtctcctgccatcctgagcgcttccccaggcgagaaagtgaccatgacctgtagagccagcagcagcgtgtcctacatgcactggtatcagcagaagcccggcagcagccctaagccttggatctacgccaccagcaatctggcctctggcgtgccagccagattttctggctctggcagcggcaccagctacagcttcacaatcagcagagtggaagccgaggacgccgccacctactattgtcagcagtggaccttcaatcctcctaccttcggcggaggcacccggctggaaatcaaaagaacagtggctgctggcggaggcggaagtggaggcggaggatctggcggcggaggctctcaggcttatctgcaacagagcggagccgaactcgtcagacctggcgcttctgtgaagatgagctgcaaggccagcggctacaccttcaccagctataatatgcactgggtcaagcagacccctcggcagggactcgaatggatcggcggaatctatcccggcaacggcgacacctcctacaaccagaagttcaagggcaaagccacactgaccgtgggcaagagcagcagcaccgcctatatgcagctcagcagcctgaccagcgaggacagcgccgtgtacttctgcgccagatacgactacaactacgctatggactactggggccagggcaccagcgtgacagttagctctgccagcacgcgtatccagaaccctgatcctgccgtgtaccagctgcgggatagcaagagcagcgacaagagcgtgtgtctgttcaccgacttcgacagccagaccaacgtgtcccagagcaaggactccgacgtgtacatcaccgataagaccgtgctggacatgcggagcatggacttcaagagcaactccgccgtggcctggtccaacaagtccgatttcgcctgcgccaacgccttcaacaacagcattatccccgaggacacattcttcccaagccccgagagcagctgcgacgtgaagctggtggaaaagagcttcgagacagacaccaacctgaacttccagatcctgtacgagatcctgctgggcaaggccaccctgtacgccgtgctggtgtctgccctggtgctgatggctatggtcaagcggaaggacagccggggacgcgccaagagaagcggatctggcgtgaagcagaccctgaatttcgacctgctgaagctggctggcgacgtggaatccaacccaggcccttctagaggccatatgaccgagtacaagcccacggtgcgcctcgccacccgcgacgacgtccccagggccgtacgcaccctcgccgccgcgttcgccgactaccccgccacgcgccacaccgtcgatccggaccgccacatcgagcgggtcaccgagctgcaagaactcttcctcacgcgcgtcgggctcgacatcggcaaggtgtgggtcgcggacgacggcgccgcggtggcggtctggaccacgccggagagcgtcgaagcgggggcggtgttcgccgagatcggcccgcgcatggccgagttgagcggttcccggctggccgcgcagcaacagatggaaggcctcctggcgccgcaccggcccaaggagcccgcgtggttcctggccaccgtcggcgtctcgcccgaccaccagggcaagggtctgggcagcgccgtcgtgctccccggagtggaggcggccgagcgcgccggggtgcccgccttcctggagacctccgcgccccgcaacctccccttctacgagcggctcggcttcaccgtcaccgccgacgtcgaggtgcccgaaggaccgcgcacctggtgcatgacccgcaagcccggtgcctga

SEQ ID NO: 17675 - DNA, 2616 bp, synthetic construct
  source 1..2616: mol_type = other DNA
atggccttaccagtgaccgccttgctcctgccgctggccttgctgctccacgccgccaggccgctcgaggaggacctgaagaacgtgttcccacctgaggtggccgtgttcgagcctagcgaggccgagatcagccacacccagaaagccaccctcgtgtgcctggctaccggcttctaccccgaccatgtggaactgtcttggtgggtcaacggcaaagaggtgcacagcggcgtgtctaccgacccccagccactgaaagaacagcccgccctgaacgacagccggtactgcctgagcagcagactgagagtgtccgccaccttctggcagaacccccggaaccacttcagatgccaggtgcagttctacggcctgagcgagaacgacgagtggacccaggacagagccaagcccgtgacccagatcgtgtctgccgaagcctggggcagagccgattgcggctttaccagcgagagctaccagcagggcgtgctgagcgccaccaacctgagcgtgatcggcttcagaatcctgctgctgaaagtggccggctttaacctgctgatgaccctgcggctgtggtccagcagggccaagcgatctggatctggagcaacaaacttctcactactcaaacaagcaggtgacgtggaggagaatcccgggcctactagcatggccttaccagtgaccgccttgctcctgccgctggccttgctgctccacgccgccaggccggagatcgtgctgacacagagccctgccaccctgtctctgagccctggcgaaagagccaccctgagctgtagagccagccagagcgtgtccagctacctggcctggtatcagcagaagcccggccaggctccccggctgctgatctacgatgccagcaatagagccaccggcatccccgccagattttccggctctggcagcggcaccgacttcaccctgaccatcagctccctggaacccgaggacttcgccgtgtactactgccagcagcggagcaactggcccatcacattcggccagggcacccggctggaaatcaaaggcggaggcggaagtggaggcggaggatctggcggcggaggctctgaggtgcagcttgttgagtctggcggaggactggtgcagcccgatagaagcctgagactgtcttgtgccgccagcggcttcaccttccacgattatgccatgcactgggtccgacaggcccctggcaaaggacttgaatgggtgtccaccatctcttggaacagcggcacaatcggctacgccgactctgtgaagggcagattcaccatcagccgggacaacgccaagaacagcctgtacctccagatgaactccctgagagccgaggacacagccctgtactactgcgccaaggacatccagtacggcaactactactacggcatggacgtgtggggccagggcacaacagtgacagtctcttctacgcgtatccagaaccctgatcctgccgtgtaccagctgcgggatagcaagagcagcgacaagagcgtgtgtctgttcaccgacttcgacagccagaccaacgtgtcccagagcaaggactccgacgtgtacatcaccgataagaccgtgctggacatgcggagcatggacttcaagagcaactccgccgtggcctggtccaacaagtccgatttcgcctgcgccaacgccttcaacaacagcattatccccgaggacacattcttcccaagccccgagagcagctgcgacgtgaagctggtggaaaagagcttcgagacagacaccaacctgaacttccagatcctgtacgagatcctgctgggcaaggccaccctgtacgccgtgctggtgtctgccctggtgctgatggctatggtcaagcggaaggacagccggggacgcgccaagagaagcggatctggcgtgaagcagaccctgaatttcgacctgctgaagctggctggcgacgtggaatccaacccaggcccttctagaggccatatgaccgagtacaagcccacggtgcgcctcgccacccgcgacgacgtccccagggccgtacgcaccctcgccgccgcgttcgccgactaccccgccacgcgccacaccgtcgatccggaccgccacatcgagcgggtcaccgagctgcaagaactcttcctcacgcgcgtcgggctcgacatcggcaaggtgtgggtcgcggacgacggcgccgcggtggcggtctggaccacgccggagagcgtcgaagcgggggcggtgttcgccgagatcggcccgcgcatggccgagttgagcggttcccggctggccgcgcagcaacagatggaaggcctcctggcgccgcaccggcccaaggagcccgcgtggttcctggccaccgtcggcgtctcgcccgaccaccagggcaagggtctgggcagcgccgtcgtgctccccggagtggaggcggccgagcgcgccggggtgcccgccttcctggagacctccgcgccccgcaacctccccttctacgagcggctcggcttcaccgtcaccgccgacgtcgaggtgcccgaaggaccgcgcacctggtgcatgacccgcaagcccggtgcctga

SEQ ID NO: 17676 - DNA, 2610 bp, synthetic construct
  source 1..2610: mol_type = other DNA
atggccttaccagtgaccgccttgctcctgccgctggccttgctgctccacgccgccaggccgctcgaggaggacctgaagaacgtgttcccacctgaggtggccgtgttcgagcctagcgaggccgagatcagccacacccagaaagccaccctcgtgtgcctggctaccggcttctaccccgaccatgtggaactgtcttggtgggtcaacggcaaagaggtgcacagcggcgtgtctaccgacccccagccactgaaagaacagcccgccctgaacgacagccggtactgcctgagcagcagactgagagtgtccgccaccttctggcagaacccccggaaccacttcagatgccaggtgcagttctacggcctgagcgagaacgacgagtggacccaggacagagccaagcccgtgacccagatcgtgtctgccgaagcctggggcagagccgattgcggctttaccagcgagagctaccagcagggcgtgctgagcgccaccaacctgagcgtgatcggcttcagaatcctgctgctgaaagtggccggctttaacctgctgatgaccctgcggctgtggtccagcagggccaagcgatctggatctggagcaacaaacttctcactactcaaacaagcaggtgacgtggaggagaatcccgggcctactagcatggccttaccagtgaccgccttgctcctgccgctggccttgctgctccacgccgccaggccggacatccagatgacccagagccccagcagcctgtctgccagcgtgggcgacagagtgaccatcacctgtagagccagccaggacgtgaacaccgccgtggcctggtatcagcagaagcctggcaaggcccccaagctgctgatctacagcgccagcttcctggaaagcggcgtgcccagcagattcagcggaagcagaagcggcaccgacttcaccctgaccatcagctccctccagcccgaggacttcgccacctactactgccagcagcactacaccacccctcccaccttcggccagaccaaggtggaaatcaagagaggcggaggcggaagtggaggcggaggatctggcggcggaggctctgaagtgcaactggtggaatctggcggcggactggtgcagcctggcggatctctgagactgagctgtgccgccagcggcttcaacatcaaggacacctacatccactgggtgcgccaggcccctggaaagggactggaatgggtggcccggatctaccccaccaacggctacaccagatacgccgacagcgtgaagggccggttcaccatcagcgccgacaccagcaagaataccgcctacctccagatgaacagcctgcgggccgaggataccgccgtgtactactgctcaagatggggaggcgacggcttctacgctatggacgtgtggggccagggcacccttgtgaccgtgtcatctacgcgtatccagaaccctgatcctgccgtgtaccagctgcgggatagcaagagcagcgacaagagcgtgtgtctgttcaccgacttcgacagccagaccaacgtgtcccagagcaaggactccgacgtgtacatcaccgataagaccgtgctggacatgcggagcatggacttcaagagcaactccgccgtggcctggtccaacaagtccgatttcgcctgcgccaacgccttcaacaacagcattatccccgaggacacattcttcccaagccccgagagcagctgcgacgtgaagctggtggaaaagagcttcgagacagacaccaacctgaacttccagatcctgtacgagatcctgctgggcaaggccaccctgtacgccgtgctggtgtctgccctggtgctgatggctatggtcaagcggaaggacagccggggacgcgccaagagaagcggatctggcgtgaagcagaccctgaatttcgacctgctgaagctggctggcgacgtggaatccaacccaggcccttctagaggccatatgaccgagtacaagcccacggtgcgcctcgccacccgcgacgacgtccccagggccgtacgcaccctcgccgccgcgttcgccgactaccccgccacgcgccacaccgtcgatccggaccgccacatcgagcgggtcaccgagctgcaagaactcttcctcacgcgcgtcgggctcgacatcggcaaggtgtgggtcgcggacgacggcgccgcggtggcggtctggaccacgccggagagcgtcgaagcgggggcggtgttcgccgagatcggcccgcgcatggccgagttgagcggttcccggctggccgcgcagcaacagatggaaggcctcctggcgccgcaccggcccaaggagcccgcgtggttcctggccaccgtcggcgtctcgcccgaccaccagggcaagggtctgggcagcgccgtcgtgctccccggagtggaggcggccgagcgcgccggggtgcccgccttcctggagacctccgcgccccgcaacctccccttctacgagcggctcggcttcaccgtcaccgccgacgtcgaggtgcccgaaggaccgcgcacctggtgcatgacccgcaagcccggtgcctga

SEQ ID NO: 17677 - DNA, 2247 bp, synthetic construct
  source 1..2247: mol_type = other DNA
atggccttaccagtgaccgccttgctcctgccgctggccttgctgctccacgccgccaggccgctcgaggaggacctgaagaacgtgttcccacctgaggtggccgtgttcgagcctagcgaggccgagatcagccacacccagaaagccaccctcgtgtgcctggctaccggcttctaccccgaccatgtggaactgtcttggtgggtcaacggcaaagaggtgcacagcggcgtgtctaccgacccccagccactgaaagaacagcccgccctgaacgacagccggtactgcctgagcagcagactgagagtgtccgccaccttctggcagaacccccggaaccacttcagatgccaggtgcagttctacggcctgagcgagaacgacgagtggacccaggacagagccaagcccgtgacccagatcgtgtctgccgaagcctggggcagagccgattgcggctttaccagcgagagctaccagcagggcgtgctgagcgccaccaacctgagcgtgatcggcttcagaatcctgctgctgaaagtggccggctttaacctgctgatgaccctgcggctgtggtccagcagggccaagcgatctggatctggagcaacaaacttctcactactcaaacaagcaggtgacgtggaggagaatcccgggcctactagcatggccctgcccgtgacagccctgctgctgcctctggctctgctgctgcacgccgccagacccgatgaattcgaggtgcaactggtggaaagcggcggaggcctggtgcaggctggcggatctctgagactgagctgtgccgccagcggcatcaccttcagcatcaacacaatgggctggtacagacaggcccctggcaagcagagggaactggtggccctgatctccagcatcggcgacacctactacgccgacagcgtgaagggccggttcaccatcagccgggacaacgccaagaacaccgtgtacctccagatgaacagcctgaagcccgaggacaccgccgtgtactactgcaagcggttcagaacagccgcccagggcaccgattattggggccagggaacacaagtgaccgtgtcctctacgcgtatccagaaccctgatcctgccgtgtaccagctgcgggatagcaagagcagcgacaagagcgtgtgtctgttcaccgacttcgacagccagaccaacgtgtcccagagcaaggactccgacgtgtacatcaccgataagaccgtgctggacatgcggagcatggacttcaagagcaactccgccgtggcctggtccaacaagtccgatttcgcctgcgccaacgccttcaacaacagcattatccccgaggacacattcttcccaagccccgagagcagctgcgacgtgaagctggtggaaaagagcttcgagacagacaccaacctgaacttccagatcctgtacgagatcctgctgggcaaggccaccctgtacgccgtgctggtgtctgccctggtgctgatggctatggtcaagcggaaggacagccggggacgcgccaagagaagcggatctggcgtgaagcagaccctgaatttcgacctgctgaagctggctggcgacgtggaatccaacccaggcccttctagaggccatatgaccgagtacaagcccacggtgcgcctcgccacccgcgacgacgtccccagggccgtacgcaccctcgccgccgcgttcgccgactaccccgccacgcgccacaccgtcgatccggaccgccacatcgagcgggtcaccgagctgcaagaactcttcctcacgcgcgtcgggctcgacatcggcaaggtgtgggtcgcggacgacggcgccgcggtggcggtctggaccacgccggagagcgtcgaagcgggggcggtgttcgccgagatcggcccgcgcatggccgagttgagcggttcccggctggccgcgcagcaacagatggaaggcctcctggcgccgcaccggcccaaggagcccgcgtggttcctggccaccgtcggcgtctcgcccgaccaccagggcaagggtctgggcagcgccgtcgtgctccccggagtggaggcggccgagcgcgccggggtgcccgccttcctggagacctccgcgccccgcaacctccccttctacgagcggctcggcttcaccgtcaccgccgacgtcgaggtgcccgaaggaccgcgcacctggtgcatgacccgcaagcccggtgcctga

SEQ ID NO: 17678 - DNA, 2247 bp, synthetic construct; identical to SEQ ID NO: 17677
  source 1..2247: mol_type = other DNA

SEQ ID NO: 17679 - DNA, 3042 bp, synthetic construct
  source 1..3042: mol_type = other DNA
atggccttaccagtgaccgccttgctcctgccgctggccttgctgctccacgccgccaggccgctcgaggaggacctgaagaacgtgttcccacctgaggtggccgtgttcgagcctagcgaggccgagatcagccacacccagaaagccaccctcgtgtgcctggctaccggcttctaccccgaccatgtggaactgtcttggtgggtcaacggcaaagaggtgcacagcggcgtgtctaccgacccccagccactgaaagaacagcccgccctgaacgacagccggtactgcctgagcagcagactgagagtgtccgccaccttctggcagaacccccggaaccacttcagatgccaggtgcagttctacggcctgagcgagaacgacgagtggacccaggacagagccaagcccgtgacccagatcgtgtctgccgaagcctggggcagagccgattgcggctttaccagcgagagctaccagcagggcgtgctgagcgccaccaacctgagcgtgatcggcttcagaatcctgctgctgaaagtggccggctttaacctgctgatgaccctgcggctgtggtccagcagggccaagcgatctggatctggagcaacaaacttctcactactcaaacaagcaggtgacgtggaggagaatcccgggcctactagcatggccttaccagtgaccgccttgctcctgccgctggccttgctgctccacgccgccaggccgcaggtccagctcgtcgagtccggcggcggcctcgtccaggccggcgactccgtcaccctctcctgcaccgcctccggccgcaccttctcctcctacgccctcgcctggttccgccagcgccccggcaaggagcgcgagttcgtcgccggcctccgctggggcggccccaccaactacgccgactccgtcaaggaccgcttcaccatctccggcgactccgccaagcacaccatgtacctccagatgaactccctcaagcccgaggacaccgccgtctactactgcggctacaaccccggcggctgggccgtcccctcccagtacgagtacgactcctggggccagggcacccaggtcaccgtctcctccggtaccggcggaggcggatctggcggcggaggtagcggtggcggaggatctgaattcgacatccagatgacacagagccctagcagcctgtctgccagcgtgggagacagagtgaccatcacatgcaaggccagcgaccacatcaacaactggctggcctggtatcagcagaagcctggacaggcccctaagctgctgatctacggcgctaccacactggaaacaggcgtgcccagcagattttctggcagcggctctggcaccgactacaccctgacaatatccagcctccagcctgaggacttcgccacctactactgtcagcagagctggaacaccccttggacattcggccagggcaccaagctggaaatcaagagaggcggaggcggaagtggaggcggaggatctggcggcggaggctctcaagttcagcttcaacagcctggcgctgagctggtcaaacctggcgcttctgtgaagatgagctgcaaagccagcggctacgccttcagcagctactggatcaactggatgaagcagaaacccggccagggactcgaatggatcggccaaatctatcccggcgacggcgacaccaactacaacggcaagttcaagggcagagccacactgaccgccgatacctctagcagcacagcctacatgcagctgagcagcctgaccagcgaagatagcgccgtgtacttctgtgcccggtccatcacaacagtcgtgggctgcgctatggactattggggccagggaacaagcgtgaccgtgtctagtacgcgtatccagaaccctgatcctgccgtgtaccagctgcgggatagcaagagcagcgacaagagcgtgtgtctgttcaccgacttcgacagccagaccaacgtgtcccagagcaaggactccgacgtgtacatcaccgataagaccgtgctggacatgcggagcatggacttcaagagcaactccgccgtggcctggtccaacaagtccgatttcgcctgcgccaacgccttcaacaacagcattatccccgaggacacattcttcccaagccccgagagcagctgcgacgtgaagctggtggaaaagagcttcgagacagacaccaacctgaacttccagatcctgtacgagatcctgctgggcaaggccaccctgtacgccgtgctggtgtctgccctggtgctgatggctatggtcaagcggaaggacagccggggacgcgccaagagaagcggatctggcgtgaagcagaccctgaatttcgacctgctgaagctggctggcgacgtggaatccaacccaggcccttctagaggccatatgaccgagtacaagcccacggtgcgcctcgccacccgcgacgacgtccccagggccgtacgcaccctcgccgccgcgttcgccgactaccccgccacgcgccacaccgtcgatccggaccgccacatcgagcgggtcaccgagctgcaagaactcttcctcacgcgcgtcgggctcgacatcggcaaggtgtgggtcgcggacgacggcgccgcggtggcggtctggaccacgccggagagcgtcgaagcgggggcggtgttcgccgagatcggcccgcgcatggccgagttgagcggttcccggctggccgcgcagcaacagatggaaggcctcctggcgccgcaccggcccaaggagcccgcgtggttcctggccaccgtcggcgtctcgcccgaccaccagggcaagggtctgggcagcgccgtcgtgctccccggagtggaggcggccgagcgcgccggggtgcccgccttcctggagacctccgcgccccgcaacctccccttctacgagcggctcggcttcaccgtcaccgccgacgtcgaggtgcccgaaggaccgcgcacctggtgcatgacccgcaagcccggtgcctga

SEQ ID NO: 17680 - DNA, 3429 bp, synthetic construct
  source 1..3429: mol_type = other DNA
atggccttaccagtgaccgccttgctcctgccgctggccttgctgctccacgccgccaggccgctcgaggaggacctgaagaacgtgttcccacctgaggtggccgtgttcgagcctagcgaggccgagatcagccacacccagaaagccaccctcgtgtgcctggctaccggcttctaccccgaccatgtggaactgtcttggtgggtcaacggcaaagaggtgcacagcggcgtgtctaccgacccccagccactgaaagaacagcccgccctgaacgacagccggtactgcctgagcagcagactgagagtgtccgccaccttctggcagaacccccggaaccacttcagatgccaggtgcagttctacggcctgagcgagaacgacgagtggacccaggacagagccaagcccgtgacccagatcgtgtctgccgaagcctggggcagagccgattgcggctttaccagcgagagctaccagcagggcgtgctgagcgccaccaacctgagcgtgatcggcttcagaatcctgctgctgaaagtggccggctttaacctgctgatgaccctgcggctgtggtccagcagggccaagcgatctggatctggagcaacaaacttctcactactcaaacaagcaggtgacgtggaggagaatcccgggcctactagcatggccttaccagtgaccgccttgctcctgccgctggccttgctgctccacgccgccaggccggaggttcagctgcttgagtctggcggaggactggttcaacctggcggaagcctgagactgtcttgtgccgccagcggcttcacctttagcagctacgccatgagctgggtccgacaggctcctggcaaaggactggaatgggtgtccagcatcagcggcagcggcgactacatctactacgccgatagcgtgaagggcagattcaccatcagccgggacatcagcaagaacaccctgtacctccagatgaacagcctgagagccgaggacaccgccgtgtactactgtgccaaagaaggcaccggcgctaacagcagcctggccgattatagaggccagggcacactggtcaccgtgtctagtggcggaggaagcggcggaggatctcaggtccagctcgtcgagtccggcggcggcctcgtccaggccggcgactccgtcaccctctcctgcaccgcctccggccgcaccttctcctcctacgccctcgcctggttccgccagcgccccggcaaggagcgcgagttcgtcgccggcctccgctggggcggccccaccaactacgccgactccgtcaaggaccgcttcaccatctccggcgactccgccaagcacaccatgtacctccagatgaactccctcaagcccgaggacaccgccgtctactactgcggctacaaccccggcggctgggccgtcccctcccagtacgagtacgactcctggggccagggcacccaggtcaccgtctcctccggtaccggcggaggcggatctggcggcggaggtagcggtggcggaggatctgaattcgacatccagatgacacagagccctagcagcctgtctgccagcgtgggagacagagtgaccatcacatgcaaggccagcgaccacatcaacaactggctggcctggtatcagcagaagcctggacaggcccctaagctgctgatctacggcgctaccacactggaaacaggcgtgcccagcagattttctggcagcggctctggcaccgactacaccctgacaatatccagcctccagcctgaggacttcgccacctactactgtcagcagagctggaacaccccttggacattcggccagggcaccaagctggaaatcaagagaggcggaggcggaagtggaggcggaggatctggcggcggaggctctcaagttcagcttcaacagcctggcgctgagctggtcaaacctggcgcttctgtgaagatgagctgcaaagccagcggctacgccttcagcagctactggatcaactggatgaagcagaaacccggccagggactcgaatggatcggccaaatctatcccggcgacggcgacaccaactacaacggcaagttcaagggcagagccacactgaccgccgatacctctagcagcacagcctacatgcagctgagcagcctgaccagcgaagatagcgccgtgtacttctgtgcccggtccatcacaacagtcgtgggctgcgctatggactattggggccagggaacaagcgtgaccgtgtctagtacgcgtatccagaaccctgatcctgccgtgtaccagctgcgggatagcaagagcagcgacaagagcgtgtgtctgttcaccgacttcgacagccagaccaacgtgtcccagagcaaggactccgacgtgtacatcaccgataagaccgtgctggacatgcggagcatggacttcaagagcaactccgccgtggcctggtccaacaagtccgatttcgcctgcgccaacgccttcaacaacagcattatccccgaggacacattcttcccaagccccgagagcagctgcgacgtgaagctggtggaaaagagcttcgagacagacaccaacctgaacttccagatcctgtacgagatcctgctgggcaaggccaccctgtacgccgtgctggtgtctgccctggtgctgatggctatggtcaagcggaaggacagccggggacgcgccaagagaagcggatctggcgtgaagcagaccctgaatttcgacctgctgaagctggctggcgacgtggaatccaacccaggcccttctagaggccatatgaccgagtacaagcccacggtgcgcctcgccacccgcgacgacgtccccagggccgtacgcaccctcgccgccgcgttcgccgactaccccgccacgcgccacaccgtcgatccggaccgccacatcgagcgggtcaccgagctgcaagaactcttcctcacgcgcgtcgggctcgacatcggcaaggtgtgggtcgcggacgacggcgccgcggtggcggtctggaccacgccggagagcgtcgaagcgggggcggtgttcgccgagatcggcccgcgcatggccgagttgagcggttcccggctggccgcgcagcaacagatggaaggcctcctggcgccgcaccggcccaaggagcccgcgtggttcctggccaccgtcggcgtctcgcccgaccaccagggcaagggtctgggcagcgccgtcgtgctccccggagtggaggcggccgagcgcgccggggtgcccgccttcctggagacctccgcgccccgcaacctccccttctacgagcggctcggcttcaccgtcaccgccgacgtcgaggtgcccgaaggaccgcgcacctggtgcatgacccgcaagcccggtgcctga

SEQ ID NO: 17681 - DNA, 3423 bp, synthetic construct
  source 1..3423: mol_type = other DNA
atggccttaccagtgaccgccttgctcctgccgctggccttgctgctccacgccgccaggccgctcgaggaggacctgaagaacgtgttcccacctgaggtggccgtgttcgagcctagcgaggccgagatcagccacacccagaaagccaccctcgtgtgcctggctaccggcttctaccccgaccatgtggaactgtcttggtgggtcaacggcaaagaggtgcacagcggcgtgtctaccgacccccagccactgaaagaacagcccgccctgaacgacagccggtactgcctgagcagcagactgagagtgtccgccaccttctggcagaacccccggaaccacttcagatgccaggtgcagttctacggcctgagcgagaacgacgagtggacccaggacagagccaagcccgtgacccagatcgtgtctgccgaagcctggggcagagccgattgcggctttaccagcgagagctaccagcagggcgtgctgagcgccaccaacctgagcgtgatcggcttcagaatcctgctgctgaaagtggccggctttaacctgctgatgaccctgcggctgtggtccagcagggccaagcgatctggatctggagcaacaaacttctcactactcaaacaagcaggtgacgtggaggagaatcccgggcctactagcatggccttaccagtgaccgccttgctcctgccgctggccttgctgctccacgccgccaggccgggcgtgacacagagccccacacacctgattaagaccagaggccagcaggccacactgagatgcagccctatcagcggccacaccagcgtgtactggtatcagcaggctctcggactgggcctccagttcctgctttggtacgacgagggcgaagagagaaaccggggcaacttccctcctcggttttccggcagacagttccccaactacagcagcgagctgaacgtgaacgccctggaactggaagatagcgccctgtacctgtgtgcctcttctcttggtggacctcgcggactggctggactgagaggggatgagcagtttttcggccctggcaccagactgaccgtgctggaaggcggaggaagcggcggaggatctcaggtccagctcgtcgagtccggcggcggcctcgtccaggccggcgactccgtcaccctctcctgcaccgcctccggccgcaccttctcctcctacgccctcgcctggttccgccagcgccccggcaaggagcgcgagttcgtcgccggcctccgctggggcggccccaccaactacgccgactccgtcaaggaccgcttcaccatctccggcgactccgccaagcacaccatgtacctccagatgaactccctcaagcccgaggacaccgccgtctactactgcggctacaaccccggcggctgggccgtcccctcccagtacgagtacgactcctggggccagggcacccaggtcaccgtctcctccggtaccggcggaggcggatctggcggcggaggtagcggtggcggaggatctgaattcgacatccagatgacacagagccctagcagcctgtctgccagcgtgggagacagagtgaccatcacatgcaaggccagcgaccacatcaacaactggctggcctggtatcagcagaagcctggacaggcccctaagctgctgatctacggcgctaccacactggaaacaggcgtgcccagcagattttctggcagcggctctggcaccgactacaccctgacaatatccagcctccagcctgaggacttcgccacctactactgtcagcagagctggaacaccccttggacattcggccagggcaccaagctggaaatcaagagaggcggaggcggaagtggaggcggaggatctggcggcggaggctctcaagttcagcttcaacagcctggcgctgagctggtcaaacctggcgcttctgtgaagatgagctgcaaagccagcggctacgccttcagcagctactggatcaactggatgaagcagaaacccggccagggactcgaatggatcggccaaatctatcccggcgacggcgacaccaactacaacggcaagttcaagggcagagccacactgaccgccgatacctctagcagcacagcctacatgcagctgagcagcctgaccagcgaagatagcgccgtgtacttctgtgcccggtccatcacaacagtcgtgggctgcgctatggactattggggccagggaacaagcgtgaccgtgtctagtacgcgtatccagaaccctgatcctgccgtgtaccagctgcgggatagcaagagcagcgacaagagcgtgtgtctgttcaccgacttcgacagccagaccaacgtgtcccagagcaaggactccgacgtgtacatcaccgataagaccgtgctggacatgcggagcatggacttcaagagcaactccgccgtggcctggtccaacaagtccgatttcgcctgcgccaacgccttcaacaacagcattatccccgaggacacattcttcccaagccccgagagcagctgcgacgtgaagctggtggaaaagagcttcgagacagacaccaacctgaacttccagatcctgtacgagatcctgctgggcaaggccaccctgtacgccgtgctggtgtctgccctggtgctgatggctatggtcaagcggaaggacagccggggacgcgccaagagaagcggatctggcgtgaagcagaccctgaatttcgacctgctgaagctggctggcgacgtggaatccaacccaggcccttctagaggccatatgaccgagtacaagcccacggtgcgcctcgccacccgcgacgacgtccccagggccgtacgcaccctcgccgccgcgttcgccgactaccccgccacgcgccacaccgtcgatccggaccgccacatcgagcgggtcaccgagctgcaagaactcttcctcacgcgcgtcgggctcgacatcggcaaggtgtgggtcgcggacgacggcgccgcggtggcggtctggaccacgccggagagcgtcgaagcgggggcggtgttcgccgagatcggcccgcgcatggccgagttgagcggttcccggctggccgcgcagcaacagatggaaggcctcctggcgccgcaccggcccaaggagcccgcgtggttcctggccaccgtcggcgtctcgcccgaccaccagggcaagggtctgggcagcgccgtcgtgctccccggagtggaggcggccgagcgcgccggggtgcccgccttcctggagacctccgcgccccgcaacctccccttctacgagcggctcggcttcaccgtcaccgccgacgtcgaggtgcccgaaggaccgcgcacctggtgcatgacccgcaagcccggtgcctga

SEQ ID NO: 17682 - DNA, 3405 bp, synthetic construct
  source 1..3405: mol_type = other DNA
atggccttaccagtgaccgccttgctcctgccgctggccttgctgctccacgccgccaggccgctcgaggaggacctgaagaacgtgttcccacctgaggtggccgtgttcgagcctagcgaggccgagatcagccacacccagaaagccaccctcgtgtgcctggctaccggcttctaccccgaccatgtggaactgtcttggtgggtcaacggcaaagaggtgcacagcggcgtgtctaccgacccccagccactgaaagaacagcccgccctgaacgacagccggtactgcctgagcagcagactgagagtgtccgccaccttctggcagaacccccggaaccacttcagatgccaggtgcagttctacggcctgagcgagaacgacgagtggacccaggacagagccaagcccgtgacccagatcgtgtctgccgaagcctggggcagagccgattgcggctttaccagcgagagctaccagcagggcgtgctgagcgccaccaacctgagcgtgatcggcttcagaatcctgctgctgaaagtggccggctttaacctgctgatgaccctgcggctgtggtccagcagggccaagcgatctggatctggagcaacaaacttctcactactcaaacaagcaggtgacgtggaggagaatcccgggcctactagcatggccttaccagtgaccgccttgctcctgccgctggccttgctgctccacgccgccaggccgggcgtgacacagagccccacacacctgattaagaccagaggccagcaggccacactgagatgcagccctatcagcggccacaccagcgtgtactggtatcagcaggctctcggactgggcctccagttcctgctttggtacgacgagggcgaagagagaaaccggggcaacttccctcctcggttttccggcagacagttccccaactacagcagcgagctgaacgtgaacgccctggaactggaagatagcgccctgtacctgtgtgcctcttctcttggtggacctcgcggactggctggactgagaggggatgagcagtttttcggccctggcaccagactgaccgtgctggaaggcggaggaagcggcggaggatctggcgtgacacagagccccacacacctgattaagaccagaggccagcaggccacactgagatgcagccctatcagcggccacaccagcgtgtactggtatcagcaggctctcggactgggcctccagttcctgctttggtacgacgagggcgaagagagaaaccggggcaacttccctcctcggttttccggcagacagttccccaactacagcagcgagctgaacgtgaacgccctggaactggaagatagcgccctgtacctgtgtgccagctctctcggcggagatgaactgggagccgatggcaacgagcagttctttggccctggcaccagactgaccgtgctggaaggtaccggcggaggcggatctggcggcggaggtagcggtggcggaggatctgaattcgacatccagatgacacagagccctagcagcctgtctgccagcgtgggagacagagtgaccatcacatgcaaggccagcgaccacatcaacaactggctggcctggtatcagcagaagcctggacaggcccctaagctgctgatctacggcgctaccacactggaaacaggcgtgcccagcagattttctggcagcggctctggcaccgactacaccctgacaatatccagcctccagcctgaggacttcgccacctactactgtcagcagagctggaacaccccttggacattcggccagggcaccaagctggaaatcaagagaggcggaggcggaagtggaggcggaggatctggcggcggaggctctcaagttcagcttcaacagcctggcgctgagctggtcaaacctggcgcttctgtgaagatgagctgcaaagccagcggctacgccttcagcagctactggatcaactggatgaagcagaaacccggccagggactcgaatggatcggccaaatctatcccggcgacggcgacaccaactacaacggcaagttcaagggcagagccacactgaccgccgatacctctagcagcacagcctacatgcagctgagcagcctgaccagcgaagatagcgccgtgtacttctgtgcccggtccatcacaacagtcgtgggctgcgctatggactattggggccagggaacaagcgtgaccgtgtctagtacgcgtatccagaaccctgatcctgccgtgtaccagctgcgggatagcaagagcagcgacaagagcgtgtgtctgttcaccgacttcgacagccagaccaacgtgtcccagagcaaggactccgacgtgtacatcaccgataagaccgtgctggacatgcggagcatggacttcaagagcaactccgccgtggcctggtccaacaagtccgatttcgcctgcgccaacgccttcaacaacagcattatccccgaggacacattcttcccaagccccgagagcagctgcgacgtgaagctggtggaaaagagcttcgagacagacaccaacctgaacttccagatcctgtacgagatcctgctgggcaaggccaccctgtacgccgtgctggtgtctgccctggtgctgatggctatggtcaagcggaaggacagccggggacgcgccaagagaagcggatctggcgtgaagcagaccctgaatttcgacctgctgaagctggctggcgacgtggaatccaacccaggcccttctagaggccatatgaccgagtacaagcccacggtgcgcctcgccacccgcgacgacgtccccagggccgtacgcaccctcgccgccgcgttcgccgactaccccgccacgcgccacaccgtcgatccggaccgccacatcgagcgggtcaccgagctgcaagaactcttcctcacgcgcgtcgggctcgacatcggcaaggtgtgggtcgcggacgacggcgccgcggtggcggtctggaccacgccggagagcgtcgaagcgggggcggtgttcgccgagatcggcccgcgcatggccgagttgagcggttcccggctggccgcgcagcaacagatggaaggcctcctggcgccgcaccggcccaaggagcccgcgtggttcctggccaccgtcggcgtctcgcccgaccaccagggcaagggtctgggcagcgccgtcgtgctccccggagtggaggcggccgagcgcgccggggtgcccgccttcctggagacctccgcgccccgcaacctccccttctacgagcggctcggcttcaccgtcaccgccgacgtcgaggtgcccgaaggaccgcgcacctggtgcatgacccgcaagcccggtgcctga

SEQ ID NO: 17683 - DNA, 2265 bp, synthetic construct
  source 1..2265: mol_type = other DNA
atggccttaccagtgaccgccttgctcctgccgctggccttgctgctccacgccgccaggccgctcgaggaggacctgaagaacgtgttcccacctgaggtggccgtgttcgagcctagcgaggccgagatcagccacacccagaaagccaccctcgtgtgcctggctaccggcttctaccccgaccatgtggaactgtcttggtgggtcaacggcaaagaggtgcacagcggcgtgtctaccgacccccagccactgaaagaacagcccgccctgaacgacagccggtactgcctgagcagcagactgagagtgtccgccaccttctggcagaacccccggaaccacttcagatgccaggtgcagttctacggcctgagcgagaacgacgagtggacccaggacagagccaagcccgtgacccagatcgtgtctgccgaagcctggggcagagccgattgcggctttaccagcgagagctaccagcagggcgtgctgagcgccaccaacctgagcgtgatcggcttcagaatcctgctgctgaaagtggccggctttaacctgctgatgaccctgcggctgtggtccagcagggccaagcgatctggatctggagcaacaaacttctcactactcaaacaagcaggtgacgtggaggagaatcccgggcctactagcatggccctgcccgtgacagccctgctgctgcctctggctctgctgctgcacgccgccagacccgatgaattcggctctgacctgggcatcaagctgctgttcgccgctgccaagggccaggacgacgaagtgcggattctgctggctgctggggccgacgtgaacgccaaggatttcgagggctacacccccctgcacgtggccgcctatgatggacacctggaaatcgtggaagtgctgctgaaggctggcgctgatgtgaatgccaaagacagccagggccggacccctctgcatgaagccgcctacagcggccatctggaaattgtggaagtgctgctgaaagccggggcagacgtgaacgctcaggacgacgctggcgagacaccagccgatctggctgcagcttggggccacgaagatatcgccgaggtgctgcagaagacgcgtatccagaaccctgatcctgccgtgtaccagctgcgggatagcaagagcagcgacaagagcgtgtgtctgttcaccgacttcgacagccagaccaacgtgtcccagagcaaggactccgacgtgtacatcaccgataagaccgtgctggacatgcggagcatggacttcaagagcaactccgccgtggcctggtccaacaagtccgatttcgcctgcgccaacgccttcaacaacagcattatccccgaggacacattcttcccaagccccgagagcagctgcgacgtgaagctggtggaaaagagcttcgagacagacaccaacctgaacttccagatcctgtacgagatcctgctgggcaaggccaccctgtacgccgtgctggtgtctgccctggtgctgatggctatggtcaagcggaaggacagccggggacgcgccaagagaagcggatctggcgtgaagcagaccctgaatttcgacctgctgaagctggctggcgacgtggaatccaacccaggcccttctagaggccatatgaccgagtacaagcccacggtgcgcctcgccacccgcgacgacgtccccagggccgtacgcaccctcgccgccgcgttcgccgactaccccgccacgcgccacaccgtcgatccggaccgccacatcgagcgggtcaccgagctgcaagaactcttcctcacgcgcgtcgggctcgacatcggcaaggtgtgggtcgcggacgacggcgccgcggtggcggtctggaccacgccggagagcgtcgaagcgggggcggtgttcgccgagatcggcccgcgcatggccgagttgagcggttcccggctggccgcgcagcaacagatggaaggcctcctggcgccgcaccggcccaaggagcccgcgtggttcctggccaccgtcggcgtctcgcccgaccaccagggcaagggtctgggcagcgccgtcgtgctccccggagtggaggcggccgagcgcgccggggtgcccgccttcctggagacctccgcgccccgcaacctccccttctacgagcggctcggcttcaccgtcaccgccgacgtcgaggtgcccgaaggaccgcgcacctggtgcatgacccgcaagcccggtgcctga

SEQ ID NO: 17684 - DNA, 2052 bp, synthetic construct
  source 1..2052: mol_type = other DNA
atggccttaccagtgaccgccttgctcctgccgctggccttgctgctccacgccgccaggccgctcgaggaggacctgaagaacgtgttcccacctgaggtggccgtgttcgagcctagcgaggccgagatcagccacacccagaaagccaccctcgtgtgcctggctaccggcttctaccccgaccatgtggaactgtcttggtgggtcaacggcaaagaggtgcacagcggcgtgtctaccgacccccagccactgaaagaacagcccgccctgaacgacagccggtactgcctgagcagcagactgagagtgtccgccaccttctggcagaacccccggaaccacttcagatgccaggtgcagttctacggcctgagcgagaacgacgagtggacccaggacagagccaagcccgtgacccagatcgtgtctgccgaagcctggggcagagccgattgcggctttaccagcgagagctaccagcagggcgtgctgagcgccaccaacctgagcgtgatcggcttcagaatcctgctgctgaaagtggccggctttaacctgctgatgaccctgcggctgtggtccagcagggccaagcgatctggatctggagcaacaaacttctcactactcaaacaagcaggtgacgtggaggagaatcccgggcctactagcatggactggatttggcgcatccttttccttgtcggcgctgctaccggcgcccattccttcgaaggcagcggattcgaatacgccaaagagatgcggaacgcctactgggagatcgccctgctgcccaatctgaccaaccagcagaagagagcccccatcagaaagctgtacgacgacccctcccagagcagcgagctgctgtctgaggctaaaaaactgaacgatagccagacgcgtatccagaaccctgatcctgccgtgtaccagctgcgggatagcaagagcagcgacaagagcgtgtgtctgttcaccgacttcgacagccagaccaacgtgtcccagagcaaggactccgacgtgtacatcaccgataagaccgtgctggacatgcggagcatggacttcaagagcaactccgccgtggcctggtccaacaagtccgatttcgcctgcgccaacgccttcaacaacagcattatccccgaggacacattcttcccaagccccgagagcagctgcgacgtgaagctggtggaaaagagcttcgagacagacaccaacctgaacttccagatcctgtacgagatcctgctgggcaaggccaccctgtacgccgtgctggtgtctgccctggtgctgatggctatggtcaagcggaaggacagccggggacgcgccaagagaagcggatctggcgtgaagcagaccctgaatttcgacctgctgaagctggctggcgacgtggaatccaacccaggcccttctagaggccatatgaccgagtacaagcccacggtgcgcctcgccacccgcgacgacgtccccagggccgtacgcaccctcgccgccgcgttcgccgactaccccgccacgcgccacaccgtcgatccggaccgccacatcgagcgggtcaccgagctgcaagaactcttcctcacgcgcgtcgggctcgacatcggcaaggtgtgggtcgcggacgacggcgccgcggtggcggtctggaccacgccggagagcgtcgaagcgggggcggtgttcgccgagatcggcccgcgcatggccgagttgagcggttcccggctggccgcgcagcaacagatggaaggcctcctggcgccgcaccggcccaaggagcccgcgtggttcctggccaccgtcggcgtctcgcccgaccaccagggcaagggtctgggcagcgccgtcgtgctccccggagtggaggcggccgagcgcgccggggtgcccgccttcctggagacctccgcgccccgcaacctccccttctacgagcggctcggcttcaccgtcaccgccgacgtcgaggtgcccgaaggaccgcgcacctggtgcatgacccgcaagcccggtgcctga

SEQ ID NO: 17685 - DNA, 2718 bp, synthetic construct
  source 1..2718: mol_type = other DNA
atggccttaccagtgaccgccttgctcctgccgctggccttgctgctccacgccgccaggccgctcgaggaggacctgaagaacgtgttcccacctgaggtggccgtgttcgagcctagcgaggccgagatcagccacacccagaaagccaccctcgtgtgcctggctaccggcttctaccccgaccatgtggaactgtcttggtgggtcaacggcaaagaggtgcacagcggcgtgtctaccgacccccagccactgaaagaacagcccgccctgaacgacagccggtactgcctgagcagcagactgagagtgtccgccaccttctggcagaacccccggaaccacttcagatgccaggtgcagttctacggcctgagcgagaacgacgagtggacccaggacagagccaagcccgtgacccagatcgtgtctgccgaagcctggggcagagccgattgcggctttaccagcgagagctaccagcagggcgtgctgagcgccaccaacctgagcgtgatcggcttcagaatcctgctgctgaaagtggccggctttaacctgctgatgaccctgcggctgtggtccagcagggccaagcgatctggatctggagcaacaaacttctcactactcaaacaagcaggtgacgtggaggagaatcccgggcctactagcatggccctgcccgtgacagccctgctgctgcctctggctctgctgctgcacgccgccagacccgatgaattcgaggtgcaactggtggaaagcggcggaggcctggtgcaggctggcggatctctgagactgagctgtgccgccagcggcatcaccttcagcatcaacacaatgggctggtacagacaggcccctggcaagcagagggaactggtggccctgatctccagcatcggcgacacctactacgccgacagcgtgaagggccggttcaccatcagccgggacaacgccaagaacaccgtgtacctccagatgaacagcctgaagcccgaggacaccgccgtgtactactgcaagcggttcagaacagccgcccagggcaccgattattggggccagggaacacaagtgaccgtgtcctctctcgagggaggaggcggctccgggggaggcggaagtggaggcggaggatctgggtctggaggaagcggatctggaggctcagggtcagggggctcaggcagtggaggctctttcgaagtgcaactggtggaatctgggggcggactggtgcagccaggcggaagtctgaggctgtcttgtgccgcctccggcagcatcttcggcttcaacgacatggcctggtatcggcaggctcccggaaaacagcgcgagctggtggctctgattagcagagtgggcgtgaccagcagcgccgactctgtgaagggcagattcacaatctccagagtgaacgccaaggatacagtgtacctccagatgaactctctgaaacctgaggatacagcagtgtactattgctacatggaccagcggctggacggcagcacactggcctactggggacagggaactcaagtgacagtgtctagcacgcgtatccagaaccctgatcctgccgtgtaccagctgcgggatagcaagagcagcgacaagagcgtgtgtctgttcaccgacttcgacagccagaccaacgtgtcccagagcaaggactccgacgtgtacatcaccgataagaccgtgctggacatgcggagcatggacttcaagagcaactccgccgtggcctggtccaacaagtccgatttcgcctgcgccaacgccttcaacaacagcattatccccgaggacacattcttcccaagccccgagagcagctgcgacgtgaagctggtggaaaagagcttcgagacagacaccaacctgaacttccagatcctgtacgagatcctgctgggcaaggccaccctgtacgccgtgctggtgtctgccctggtgctgatggctatggtcaagcggaaggacagccggggacgcgccaagagaagcggatctggcgtgaagcagaccctgaatttcgacctgctgaagctggctggcgacgtggaatccaacccaggcccttctagaggccatatgaccgagtacaagcccacggtgcgcctcgccacccgcgacgacgtccccagggccgtacgcaccctcgccgccgcgttcgccgactaccccgccacgcgccacaccgtcgatccggaccgccacatcgagcgggtcaccgagctgcaagaactcttcctcacgcgcgtcgggctcgacatcggcaaggtgtgggtcgcggacgacggcgccgcggtggcggtctggaccacgccggagagcgtcgaagcgggggcggtgttcgccgagatcggcccgcgcatggccgagttgagcggttcccggctggccgcgcagcaacagatggaaggcctcctggcgccgcaccggcccaaggagcccgcgtggttcctggccaccgtcggcgtctcgcccgaccaccagggcaagggtctgggcagcgccgtcgtgctccccggagtggaggcggccgagcgcgccggggtgcccgccttcctggagacctccgcgccccgcaacctccccttctacgagcggctcggcttcaccgtcaccgccgacgtcgaggtgcccgaaggaccgcgcacctggtgcatgacccgcaagcccggtgcctga

SEQ ID NO: 17686 - DNA, 2460 bp, synthetic construct
  source 1..2460: mol_type = other DNA
atggccttaccagtgaccgccttgctcctgccgctggccttgctgctccacgccgccaggccgctcgaggaggacctgaagaacgtgttcccacctgaggtggccgtgttcgagcctagcgaggccgagatcagccacacccagaaagccaccctcgtgtgcctggctaccggcttctaccccgaccatgtggaactgtcttggtgggtcaacggcaaagaggtgcacagcggcgtgtctaccgacccccagccactgaaagaacagcccgccctgaacgacagccggtactgcctgagcagcagactgagagtgtccgccaccttctggcagaacccccggaaccacttcagatgccaggtgcagttctacggcctgagcgagaacgacgagtggacccaggacagagccaagcccgtgacccagatcgtgtctgccgaagcctggggcagagccgattgcggctttaccagcgagagctaccagcagggcgtgctgagcgccaccaacctgagcgtgatcggcttcagaatcctgctgctgaaagtggccggctttaacctgctgatgaccctgcggctgtggtccagcagggccaagcgatctggatctggagcaacaaacttctcactactcaaacaagcaggtgacgtggaggagaatcccgggcctactagcatggcccttccagtcactgccttgctgttgcctctggcgctcctgctccacgccgctagaccgggcatgagaaccgaggacctgcctaaggccgtggtgttcctggaaccccagtggtacagagtgctggaaaaggacagcgtgaccctgaagtgccagggcgcctacagccccgaggacaatagcacccagtggttccacaacgagagcctgatctccagccaggccagcagctacttcatcgacgccgccaccgtggacgacagcggcgagtatagatgccagaccaacctgagcaccctgagcgaccccgtgcagctggaagtgcacatcggatggctgctgctgcaggcccccagatgggtgttcaaagaagaggaccccatccacctgagatgccactcttggaagaacaccgccctgcacaaagtgacctacctgcagaacggcaagggcagaaagtacttccaccacaacagcgacttctacatccccaaggccaccctgaaggactccggctcctacttctgcagaggcctcgtgggcagcaagaacgtgtccagcgagacagtgaacatcaccatcacccagggcctggccgtgtctaccatcagcagctttttcccacccggctaccagacgcgtatccagaaccctgatcctgccgtgtaccagctgcgggatagcaagagcagcgacaagagcgtgtgtctgttcaccgacttcgacagccagaccaacgtgtcccagagcaaggactccgacgtgtacatcaccgataagaccgtgctggacatgcggagcatggacttcaagagcaactccgccgtggcctggtccaacaagtccgatttcgcctgcgccaacgccttcaacaacagcattatccccgaggacacattcttcccaagccccgagagcagctgcgacgtgaagctggtggaaaagagcttcgagacagacaccaacctgaacttccagatcctgtacgagatcctgctgggcaaggccaccctgtacgccgtgctggtgtctgccctggtgctgatggctatggtcaagcggaaggacagccggggacgcgccaagagaagcggatctggcgtgaagcagaccctgaatttcgacctgctgaagctggctggcgacgtggaatccaacccaggcccttctagaggccatatgaccgagtacaagcccacggtgcgcctcgccacccgcgacgacgtccccagggccgtacgcaccctcgccgccgcgttcgccgactaccccgccacgcgccacaccgtcgatccggaccgccacatcgagcgggtcaccgagctgcaagaactcttcctcacgcgcgtcgggctcgacatcggcaaggtgtgggtcgcggacgacggcgccgcggtggcggtctggaccacgccggagagcgtcgaagcgggggcggtgttcgccgagatcggcccgcgcatggccgagttgagcggttcccggctggccgcgcagcaacagatggaaggcctcctggcgccgcaccggcccaaggagcccgcgtggttcctggccaccgtcggcgtctcgcccgaccaccagggcaagggtctgggcagcgccgtcgtgctccccggagtggaggcggccgagcgcgccggggtgcccgccttcctggagacctccgcgccccgcaacctccccttctacgagcggctcggcttcaccgtcaccgccgacgtcgaggtgcccgaaggaccgcgcacctggtgcatgacccgcaagcccggtgcctga

SEQ ID NO: 17687 - DNA, 1341 bp, synthetic construct
  source 1..1341: mol_type = other DNA
atggccttaccagtgaccgccttgctcctgccgctggccttgctgctccacgccgccaggccgctcgaggaggacctgaagaacgtgttcccacctgaggtggccgtgttcgagcctagcgaggccgagatcagccacacccagaaagccaccctcgtgtgcctggctaccggcttctaccccgaccatgtggaactgtcttggtgggtcaacggcaaagaggtgcacagcggcgtgtctaccgacccccagccactgaaagaacagcccgccctgaacgacagccggtactgcctgagcagcagactgagagtgtccgccaccttctggcagaacccccggaaccacttcagatgccaggtgcagttctacggcctgagcgagaacgacgagtggacccaggacagagccaagcccgtgacccagatcgtgtctgccgaagcctggggcagagccgattgcggctttaccagcgagagctaccagcagggcgtgctgagcgccaccaacctgagcgtgatcggcttcagaatcctgctgctgaaagtggccggctttaacctgctgatgaccctgcggctgtggtccagcagggccaagcgatctggatctggagcaacaaacttctcactactcaaacaagcaggtgacgtggaggagaatcccgggcctactagcgccaccatggccttaccagtgaccgccttgctcctgccgctggccttgctgctccacgccgccaggccgatggaccccgacctggaaatcagagccgccttcctgcggcagagaaacacagccctgagaacagaggtggccgagctggaacaagaggtgcagcggctggaaaacgaggtgtcccagtacgagacaagatacggccctctcggaggcggaaaaacgcgtatccagaaccctgatcctgccgtgtaccagctgcgggatagcaagagcagcgacaagagcgtgtgtctgttcaccgacttcgacagccagaccaacgtgtcccagagcaaggactccgacgtgtacatcaccgataagaccgtgctggacatgcggagcatggacttcaagagcaactccgccgtggcctggtccaacaagtccgatttcgcctgcgccaacgccttcaacaacagcattatccccgaggacacattcttcccaagccccgagagcagctgcgacgtgaagctggtggaaaagagcttcgagacagacaccaacctgaacttccagatcctgtacgagatcctgctgggcaaggccaccctgtacgccgtgctggtgtctgccctggtgctgatggctatggtcaagcggaaggacagccgggga

SEQ ID NO: 17688 - DNA, 1341 bp, synthetic construct
  source 1..1341: mol_type = other DNA
atggccttaccagtgaccgccttgctcctgccgctggccttgctgctccacgccgccaggccgctcgaggaggacctgaagaacgtgttcccacctgaggtggccgtgttcgagcctagcgaggccgagatcagccacacccagaaagccaccctcgtgtgcctggctaccggcttctaccccgaccatgtggaactgtcttggtgggtcaacggcaaagaggtgcacagcggcgtgtctaccgacccccagccactgaaagaacagcccgccctgaacgacagccggtactgcctgagcagcagactgagagtgtccgccaccttctggcagaacccccggaaccacttcagatgccaggtgcagttctacggcctgagcgagaacgacgagtggacccaggacagagccaagcccgtgacccagatcgtgtctgccgaagcctggggcagagccgattgcggctttaccagcgagagctaccagcagggcgtgctgagcgccaccaacctgagcgtgatcggcttcagaatcctgctgctgaaagtggccggctttaacctgctgatgaccctgcggctgtggtccagcagggccaagcgatctggatctggagcaacaaacttctcactactcaaacaagcaggtgacgtggaggagaatcccgggcctactagcgccaccatggccttaccagtgaccgccttgctcctgccgctggccttgctgctccacgccgccaggccgatggaccctgatctcgaaattgaggccgcctttctggaacgcgagaacactgccctggaaaccagggtcgcagagctgagacagagagtgcagagactgcggaacagagtgtctcagtaccgcaccagatatggcccactcggcggaggtaaaacgcgtatccagaaccctgatcctgccgtgtaccagctgcgggatagcaagagcagcgacaagagcgtgtgtctgttcaccgacttcgacagccagaccaacgtgtcccagagcaaggactccgacgtgtacatcaccgataagaccgtgctggacatgcggagcatggacttcaagagcaactccgccgtggcctggtccaacaagtccgatttcgcctgcgccaacgccttcaacaacagcattatccccgaggacacattcttcccaagccccgagagcagctgcgacgtgaagctggtggaaaagagcttcgagacagacaccaacctgaacttccagatcctgtacgagatcctgctgggcaaggccaccctgtacgccgtgctggtgtctgccctggtgctgatggctatggtcaagcggaaggacagccgggga

SEQ ID NO: 17689 - DNA, 1272 bp, synthetic construct
  source 1..1272: mol_type = other DNA
atggccttaccagtgaccgccttgctcctgccgctggccttgctgctccacgccgccaggccgctcgaggaggacctgaagaacgtgttcccacctgaggtggccgtgttcgagcctagcgaggccgagatcagccacacccagaaagccaccctcgtgtgcctggctaccggcttctaccccgaccatgtggaactgtcttggtgggtcaacggcaaagaggtgcacagcggcgtgtctaccgacccccagccactgaaagaacagcccgccctgaacgacagccggtactgcctgagcagcagactgagagtgtccgccaccttctggcagaacccccggaaccacttcagatgccaggtgcagttctacggcctgagcgagaacgacgagtggacccaggacagagccaagcccgtgacccagatcgtgtctgccgaagcctggggcagagccgattgcggctttaccagcgagagctaccagcagggcgtgctgagcgccaccaacctgagcgtgatcggcttcagaatcctgctgctgaaagtggccggctttaacctgctgatgaccctgcggctgtggtccagcagggccaagcgatctggatctggagcaacaaacttctcactactcaaacaagcaggtgacgtggaggagaatcccgggcctactagcgccaccatggccttaccagtgaccgccttgctcctgccgctggccttgctgctccacgccgccaggccggaagttgctgccctcgagaaggaggtagcagctttggaaaaagaagtcgcagcccttgagaaagaagttgcggctctggagaagacgcgtatccagaaccctgatcctgccgtgtaccagctgcgggatagcaagagcagcgacaagagcgtgtgtctgttcaccgacttcgacagccagaccaacgtgtcccagagcaaggactccgacgtgtacatcaccgataagaccgtgctggacatgcggagcatggacttcaagagcaactccgccgtggcctggtccaacaagtccgatttcgcctgcgccaacgccttcaacaacagcattatccccgaggacacattcttcccaagccccgagagcagctgcgacgtgaagctggtggaaaagagcttcgagacagacaccaacctgaacttccagatcctgtacgagatcctgctgggcaaggccaccctgtacgccgtgctggtgtctgccctggtgctgatggctatggtcaagcggaaggacagccgggga

SEQ ID NO: 17690 - DNA, 2046 bp, synthetic construct
  source 1..2046: mol_type = other DNA
atggccttaccagtgaccgccttgctcctgccgctggccttgctgctccacgccgccaggccgctcgaggaggacctgaagaacgtgttcccacctgaggtggccgtgttcgagcctagcgaggccgagatcagccacacccagaaagccaccctcgtgtgcctggctaccggcttctaccccgaccatgtggaactgtcttggtgggtcaacggcaaagaggtgcacagcggcgtgtctaccgacccccagccactgaaagaacagcccgccctgaacgacagccggtactgcctgagcagcagactgagagtgtccgccaccttctggcagaacccccggaaccacttcagatgccaggtgcagttctacggcctgagcgagaacgacgagtggacccaggacagagccaagcccgtgacccagatcgtgtctgccgaagcctggggcagagccgattgcggctttaccagcgagagctaccagcagggcgtgctgagcgccaccaacctgagcgtgatcggcttcagaatcctgctgctgaaagtggccggctttaacctgctgatgaccctgcggctgtggtccagcagggccaagcgatctggatctggagcaacaaacttctcactactcaaacaagcaggtgacgtggaggagaatcccgggcctactagcgccaccatggccttaccagtgaccgccttgctcctgccgctggccttgctgctccacgccgccaggccgctgttcaatcaagaggtgcagatccctctgaccgagagctactgtggcccctgtcctaagaactggatctgctacaagaacaactgctaccagttcttcgacgagagcaagaattggtacgagagccaggccagctgcatgagccagaatgccagcctgctgaaggtgtacagcaaagaggaccaggacctgctgaaactggtcaagagcgcccactggatgggccttgtgcacatccccaccaatggctcttggcagtgggaggacggcagcattctgagccctaacctgctgaccatcatcgagatgcagaagggcgactgcgccctgtacgccagcagctttaagggctacatcgagaattgcagcaccccgaacacctacatctgtatgcagagaaccgtttctggcggaggcggctctggaggaggcggaagtggcggcggaggcgacctctttaatcaagaagtccagattccactcaccgaatcctactgcggaccttgtccaaaaaattggatttgttataagaacaactgttatcaattctttgatgagtctaaaaattggtatgagtcccaggcttcctgcatgtctcagaacgcttctctgctgaaagtctactctaaagaagatcaggatctcctgaagctcgtcaagtctgcccattggatggggctcgtccacattcctaccaacggaagctggcaatgggaagatggctccatcctgtctccaaatctgctcacgattattgaaatgcagaaaggggattgtgctctctacgccagctccttcaagggatatattgagaactgtagcacgcccaatacttatatctgtatgcaacggaccgtgacgcgtatccagaaccctgatcctgccgtgtaccagctgcgggatagcaagagcagcgacaagagcgtgtgtctgttcaccgacttcgacagccagaccaacgtgtcccagagcaaggactccgacgtgtacatcaccgataagaccgtgctggacatgcggagcatggacttcaagagcaactccgccgtggcctggtccaacaagtccgatttcgcctgcgccaacgccttcaacaacagcattatccccgaggacacattcttcccaagccccgagagcagctgcgacgtgaagctggtggaaaagagcttcgagacagacaccaacctgaacttccagatcctgtacgagatcctgctgggcaaggccaccctgtacgccgtgctggtgtctgccctggtgctgatggctatggtcaagcggaaggacagccgggga

SEQ ID NO: 17691 - DNA, 2046 bp, synthetic construct
  source 1..2046: mol_type = other DNA
atggccttaccagtgaccgccttgctcctgccgctggccttgctgctccacgccgccaggccgctcgaggaggacctgaagaacgtgttcccacctgaggtggccgtgttcgagcctagcgaggccgagatcagccacacccagaaagccaccctcgtgtgcctggctaccggcttctaccccgaccatgtggaactgtcttggtgggtcaacggcaaagaggtgcacagcggcgtgtctaccgacccccagccactgaaagaacagcccgccctgaacgacagccggtactgcctgagcagcagactgagagtgtccgccaccttctggcagaacccccggaaccacttcagatgccaggtgcagttctacggcctgagcgagaacgacgagtggacccaggacagagccaagcccgtgacccagatcgtgtctgccgaagcctggggcagagccgattgcggctttaccagcgagagctaccagcagggcgtgctgagcgccaccaacctgagcgtgatcggcttcagaatcctgctgctgaaagtggccggctttaacctgctgatgaccctgcggctgtggtccagcagggccaagcgatctggatctggagcaacaaacttctcactactcaaacaagcaggtgacgtggaggagaatcccgggcctactagcgccaccatggccttaccagtgaccgccttgctcctgccgctggccttgctgctccacgccgccaggccgctgttcaatcaagaggtgcagatccctctgaccgagagctactgtggcccctgtcctaagaactggatctgctacaagaacaactgctaccagttcttcgacgagagcaagaattggtacgagagccaggccagctgcatgagccagaatgccagcctgctgaaggtgtacagcaaagaggaccaggacctgctgaaactggtcaagagcgcccactggatgggccttgtgcacatccccaccaatggctcttggcagtgggaggacggcagcattctgagccctaacctgctgaccatcatcgagatgcagaagggcgactgcgccctgtacgccagcagctttaagggcttcatcgagaattgcagcaccccgaacacctacatctgtatgcagagaaccgttggcggaggcggaagtggaggcggaggatctggcggcggaggctctgacctctttaatcaagaagtccagattccactcaccgaatcctactgcggaccttgtccaaaaaattggatttgttataagaacaactgttatcaattctttgatgagtctaaaaattggtatgagtcccaggcttcctgcatgtctcagaacgcttctctgctgaaagtctactctaaagaagatcaggatctcctgaagctcgtcaagtctgcccattggatggggctcgtccacattcctaccaacggaagctggcaatgggaagatggctccatcctgtctccaaatctgctcacgattattgaaatgcagaaaggggattgtgctctctacgccagctccttcaagggatttattgagaactgtagcacgcccaatacttatatctgtatgcaacggaccgtgacgcgtatccagaaccctgatcctgccgtgtaccagctgcgggatagcaagagcagcgacaagagcgtgtgtctgttcaccgacttcgacagccagaccaacgtgtcccagagcaaggactccgacgtgtacatcaccgataagaccgtgctggacatgcggagcatggacttcaagagcaactccgccgtggcctggtccaacaagtccgatttcgcctgcgccaacgccttcaacaacagcattatccccgaggacacattcttcccaagccccgagagcagctgcgacgtgaagctggtggaaaagagcttcgagacagacaccaacctgaacttccagatcctgtacgagatcctgctgggcaaggccaccctgtacgccgtgctggtgtctgccctggtgctgatggctatggtcaagcggaaggacagccgggga

SEQ ID NO: 17692 - DNA, 2124 bp, synthetic construct
  source 1..2124: mol_type = other DNA
atggccttaccagtgaccgccttgctcctgccgctggccttgctgctccacgccgccaggccgctcgaggaggacctgaagaacgtgttcccacctgaggtggccgtgttcgagcctagcgaggccgagatcagccacacccagaaagccaccctcgtgtgcctggctaccggcttctaccccgaccatgtggaactgtcttggtgggtcaacggcaaagaggtgcacagcggcgtgtctaccgacccccagccactgaaagaacagcccgccctgaacgacagccggtactgcctgagcagcagactgagagtgtccgccaccttctggcagaacccccggaaccacttcagatgccaggtgcagttctacggcctgagcgagaacgacgagtggacccaggacagagccaagcccgtgacccagatcgtgtctgccgaagcctggggcagagccgattgcggctttaccagcgagagctaccagcagggcgtgctgagcgccaccaacctgagcgtgatcggcttcagaatcctgctgctgaaagtggccggctttaacctgctgatgaccctgcggctgtggtccagcagggccaagcgatctggatctggagcaacaaacttctcactactcaaacaagcaggtgacgtggaggagaatcccgggcctactagcatggccttaccagtgaccgccttgctcctgccgctggccttgctgctccacgccgccaggccgatggaccccgacctggaaatcagagccgccttcctgcggcagagaaacacagccctgagaacagaggtggccgagctggaacaagaggtgcagcggctggaaaacgaggtgtcccagtacgagacaagatacggccctctcggaggcggaaaaggtaccggcggaggcggatctggcggcggaggtagcggtggcggaggatctgaattcgacatccagatgacacagagccctagcagcctgtctgccagcgtgggagacagagtgaccatcacatgcaaggccagcgaccacatcaacaactggctggcctggtatcagcagaagcctggacaggcccctaagctgctgatctacggcgctaccacactggaaacaggcgtgcccagcagattttctggcagcggctctggcaccgactacaccctgacaatatccagcctccagcctgaggacttcgccacctactactgtcagcagagctggaacaccccttggacattcggccagggcaccaagctggaaatcaagagaggcggaggcggaagtggaggcggaggatctggcggcggaggctctcaagttcagcttcaacagcctggcgctgagctggtcaaacctggcgcttctgtgaagatgagctgcaaagccagcggctacgccttcagcagctactggatcaactggatgaagcagaaacccggccagggactcgaatggatcggccaaatctatcccggcgacggcgacaccaactacaacggcaagttcaagggcagagccacactgaccgccgatacctctagcagcacagcctacatgcagctgagcagcctgaccagcgaagatagcgccgtgtacttctgtgcccggtccatcacaacagtcgtgggctgcgctatggactattggggccagggaacaagcgtgaccgtgtctagtacgcgtatccagaaccctgatcctgccgtgtaccagctgcgggatagcaagagcagcgacaagagcgtgtgtctgttcaccgacttcgacagccagaccaacgtgtcccagagcaaggactccgacgtgtacatcaccgataagaccgtgctggacatgcggagcatggacttcaagagcaactccgccgtggcctggtccaacaagtccgatttcgcctgcgccaacgccttcaacaacagcattatccccgaggacacattcttcccaagccccgagagcagctgcgacgtgaagctggtggaaaagagcttcgagacagacaccaacctgaacttccagatcctgtacgagatcctgctgggcaaggccaccctgtacgccgtgctggtgtctgccctggtgctgatggctatggtcaagcggaaggacagccgggga

SEQ ID NO: 17693 - DNA, 2829 bp, synthetic construct
  source 1..2829: mol_type = other DNA
atggccttaccagtgaccgccttgctcctgccgctggccttgctgctccacgccgccaggccgctcgaggaggacctgaagaacgtgttcccacctgaggtggccgtgttcgagcctagcgaggccgagatcagccacacccagaaagccaccctcgtgtgcctggctaccggcttctaccccgaccatgtggaactgtcttggtgggtcaacggcaaagaggtgcacagcggcgtgtctaccgacccccagccactgaaagaacagcccgccctgaacgacagccggtactgcctgagcagcagactgagagtgtccgccaccttctggcagaacccccggaaccacttcagatgccaggtgcagttctacggcctgagcgagaacgacgagtggacccaggacagagccaagcccgtgacccagatcgtgtctgccgaagcctggggcagagccgattgcggctttaccagcgagagctaccagcagggcgtgctgagcgccaccaacctgagcgtgatcggcttcagaatcctgctgctgaaagtggccggctttaacctgctgatgaccctgcggctgtggtccagcagggccaagcgatctggatctggagcaacaaacttctcactactcaaacaagcaggtgacgtggaggagaatcccgggcctactagcatggccttaccagtgaccgccttgctcctgccgctggccttgctgctccacgccgccaggccgctgttcaatcaagaggtgcagatccctctgaccgagagctactgtggcccctgtcctaagaactggatctgctacaagaacaactgctaccagttcttcgacgagagcaagaattggtacgagagccaggccagctgcatgagccagaatgccagcctgctgaaggtgtacagcaaagaggaccaggacctgctgaaactggtcaagagcgcccactggatgggccttgtgcacatccccaccaatggctcttggcagtgggaggacggcagcattctgagccctaacctgctgaccatcatcgagatgcagaagggcgactgcgccctgtacgccagcagctttaagggcttcatcgagaattgcagcaccccgaacacctacatctgtatgcagagaaccgttggcggaggcggaagtggaggcggaggatctggcggcggaggctctgacctctttaatcaagaagtccagattccactcaccgaatcctactgcggaccttgtccaaaaaattggatttgttataagaacaactgttatcaattctttgatgagtctaaaaattggtatgagtcccaggcttcctgcatgtctcagaacgcttctctgctgaaagtctactctaaagaagatcaggatctcctgaagctcgtcaagtctgcccattggatggggctcgtccacattcctaccaacggaagctggcaatgggaagatggctccatcctgtctccaaatctgctcacgattattgaaatgcagaaaggggattgtgctctctacgccagctccttcaagggatttattgagaactgtagcacgcccaatacttatatctgtatgcaacggaccgtgggtaccggcggaggcggatctggcggcggaggtagcggtggcggaggatctgaattcgacatccagatgacacagagccctagcagcctgtctgccagcgtgggagacagagtgaccatcacatgcaaggccagcgaccacatcaacaactggctggcctggtatcagcagaagcctggacaggcccctaagctgctgatctacggcgctaccacactggaaacaggcgtgcccagcagattttctggcagcggctctggcaccgactacaccctgacaatatccagcctccagcctgaggacttcgccacctactactgtcagcagagctggaacaccccttggacattcggccagggcaccaagctggaaatcaagagaggcggaggcggaagtggaggcggaggatctggcggcggaggctctcaagttcagcttcaacagcctggcgctgagctggtcaaacctggcgcttctgtgaagatgagctgcaaagccagcggctacgccttcagcagctactggatcaactggatgaagcagaaacccggccagggactcgaatggatcggccaaatctatcccggcgacggcgacaccaactacaacggcaagttcaagggcagagccacactgaccgccgatacctctagcagcacagcctacatgcagctgagcagcctgaccagcgaagatagcgccgtgtacttctgtgcccggtccatcacaacagtcgtgggctgcgctatggactattggggccagggaacaagcgtgaccgtgtctagtacgcgtatccagaaccctgatcctgccgtgtaccagctgcgggatagcaagagcagcgacaagagcgtgtgtctgttcaccgacttcgacagccagaccaacgtgtcccagagcaaggactccgacgtgtacatcaccgataagaccgtgctggacatgcggagcatggacttcaagagcaactccgccgtggcctggtccaacaagtccgatttcgcctgcgccaacgccttcaacaacagcattatccccgaggacacattcttcccaagccccgagagcagctgcgacgtgaagctggtggaaaagagcttcgagacagacaccaacctgaacttccagatcctgtacgagatcctgctgggcaaggccaccctgtacgccgtgctggtgtctgccctggtgctgatggctatggtcaagcggaaggacagccgggga

SEQ ID NO: 17694 - DNA, 1944 bp, synthetic construct
  source 1..1944: mol_type = other DNA
atggccttaccagtgaccgccttgctcctgccgctggccttgctgctccacgccgccaggccgctcgaggaggacctgaagaacgtgttcccacctgaggtggccgtgttcgagcctagcgaggccgagatcagccacacccagaaagccaccctcgtgtgcctggctaccggcttctaccccgaccatgtggaactgtcttggtgggtcaacggcaaagaggtgcacagcggcgtgtctaccgacccccagccactgaaagaacagcccgccctgaacgacagccggtactgcctgagcagcagactgagagtgtccgccaccttctggcagaacccccggaaccacttcagatgccaggtgcagttctacggcctgagcgagaacgacgagtggacccaggacagagccaagcccgtgacccagatcgtgtctgccgaagcctggggcagagccgattgcggctttaccagcgagagctaccagcagggcgtgctgagcgccaccaacctgagcgtgatcggcttcagaatcctgctgctgaaagtggccggctttaacctgctgatgaccctgcggctgtggtccagcagggccaagcgatctggatctggagcaacaaacttctcactactcaaacaagcaggtgacgtggaggagaatcccgggcctactagcatggccttaccagtgaccgccttgctcctgccgctggccttgctgctccacgccgccaggccgcagtctgtgctgacacagcctcctagtgtgtctggcgctcctggacagagagtgaccatctcttgtaccggcagcagcagcaatatcggagccggctatgacgtgcactggtatcagcagctccctggcacagcccctaaactgctgatcttcggcaacagcaacagacccagcggcgtgcccgatagattcagcggctttaagagcggcacaagcgccagcctggctatcactggactgcaagccgaggacgaggccgactacttctgccagagctacgatagcagcctgagcggcagcggagtgtttggcacaggcaccaaagtgacagtgcttggcggcggaggcggaagtggaggcggaggatctggcggcggaggctctcaaatgcaactggttcaaagcggcggtggcctggtgcaacctggaagaagtctgagactgagctgtgccgccagcggcttcaccttcgatgattacgccatgcactgggtccgacaggcccctggaaaaggactggaatgggtgtccggcatctcctggaatagcggctctatcggctacgccgacagcgtgaagggcagattcaccatcagccgggacaacgccaagaacagcctgtacctccagatgaactccctgagagccgaggatacagccctgtactactgcgccaaggacatccacagcggcagctactacggcctgctgtactacgctatggacgtgtggggccagggcacaaccgtgacagtttcttctacgcgtatccagaaccctgatcctgccgtgtaccagctgcgggatagcaagagcagcgacaagagcgtgtgtctgttcaccgacttcgacagccagaccaacgtgtcccagagcaaggactccgacgtgtacatcaccgataagaccgtgctggacatgcggagcatggacttcaagagcaactccgccgtggcctggtccaacaagtccgatttcgcctgcgccaacgccttcaacaacagcattatccccgaggacacattcttcccaagccccgagagcagctgcgacgtgaagctggtggaaaagagcttcgagacagacaccaacctgaacttccagatcctgtacgagatcctgctgggcaaggccaccctgtacgccgtgctggtgtctgccctggtgctgatggctatggtcaagcggaaggacagccgggga

SEQ ID NO: 17695 - DNA, 1455 bp, synthetic construct
  source 1..1455: mol_type = other DNA
atggccttaccagtgaccgccttgctcctgccgctggccttgctgctccacgccgccaggccgctcgaggaggacctgaagaacgtgttcccacctgaggtggccgtgttcgagcctagcgaggccgagatcagccacacccagaaagccaccctcgtgtgcctggctaccggcttctaccccgaccatgtggaactgtcttggtgggtcaacggcaaagaggtgcacagcggcgtgtctaccgacccccagccactgaaagaacagcccgccctgaacgacagccggtactgcctgagcagcagactgagagtgtccgccaccttctggcagaacccccggaaccacttcagatgccaggtgcagttctacggcctgagcgagaacgacgagtggacccaggacagagccaagcccgtgacccagatcgtgtctgccgaagcctggggcagagccgattgcggctttaccagcgagagctaccagcagggcgtgctgagcgccaccaacctgagcgtgatcggcttcagaatcctgctgctgaaagtggccggctttaacctgctgatgaccctgcggctgtggtccagcagggccaagcgatctggatctggagcaacaaacttctcactactcaaacaagcaggtgacgtggaggagaatcccgggcctactagcatggccttaccagtgaccgccttgctcctgccgctggccttgctgctccacgccgccaggccgatgtgtatgccctgcttcaccaccgaccatcagatggcccggaagtgcgacgattgctgtggcggaaaaggcagaggcaagtgctacggccctcagtgcttgtgtagactcgagggcggaggcggaagtggaggcggaggatctggcggcggaggctctttcgaagtgtgtatgccttgttttaccacggatcaacaaatggctcgcaagtgttctgactgctgcggaggcaaaggccggggaaagtgttatggcccacagtgtctgtgccggacgcgtatccagaaccctgatcctgccgtgtaccagctgcgggatagcaagagcagcgacaagagcgtgtgtctgttcaccgacttcgacagccagaccaacgtgtcccagagcaaggactccgacgtgtacatcaccgataagaccgtgctggacatgcggagcatggacttcaagagcaactccgccgtggcctggtccaacaagtccgatttcgcctgcgccaacgccttcaacaacagcattatccccgaggacacattcttcccaagccccgagagcagctgcgacgtgaagctggtggaaaagagcttcgagacagacaccaacctgaacttccagatcctgtacgagatcctgctgggcaaggccaccctgtacgccgtgctggtgtctgccctggtgctgatggctatggtcaagcggaaggacagccgggga

SEQ ID NO: 17696 - DNA, 2244 bp, synthetic construct
  source 1..2244: mol_type = other DNA
atggccttaccagtgaccgccttgctcctgccgctggccttgctgctccacgccgccaggccgctcgaggaggacctgaagaacgtgttcccacctgaggtggccgtgttcgagcctagcgaggccgagatcagccacacccagaaagccaccctcgtgtgcctggctaccggcttctaccccgaccatgtggaactgtcttggtgggtcaacggcaaagaggtgcacagcggcgtgtctaccgacccccagccactgaaagaacagcccgccctgaacgacagccggtactgcctgagcagcagactgagagtgtccgccaccttctggcagaacccccggaaccacttcagatgccaggtgcagttctacggcctgagcgagaacgacgagtggacccaggacagagccaagcccgtgacccagatcgtgtctgccgaagcctggggcagagccgattgcggctttaccagcgagagctaccagcagggcgtgctgagcgccaccaacctgagcgtgatcggcttcagaatcctgctgctgaaagtggccggctttaacctgctgatgaccctgcggctgtggtccagcagggccaagcgatctggatctggagcaacaaacttctcactactcaaacaagcaggtgacgtggaggagaatcccgggcctactagcatggccttaccagtgaccgccttgctcctgccgctggccttgctgctccacgccgccaggccgatgtgtatgccctgcttcaccaccgaccatcagatggcccggaagtgcgacgattgctgtggcggaaaaggcagaggcaagtgctacggccctcagtgcttgtgtagactcgagggcggaggcggaagtggaggcggaggatctggcggcggaggctctttcgaagtgtgtatgccttgttttaccacggatcaacaaatggctcgcaagtgttctgactgctgcggaggcaaaggccggggaaagtgttatggcccacagtgtctgtgccggggtaccggcggaggcggatctggcggcggaggtagcggtggcggaggatctgaattcgacatccagatgacacagagccctagcagcctgtctgccagcgtgggagacagagtgaccatcacatgcaaggccagcgaccacatcaacaactggctggcctggtatcagcagaagcctggacaggcccctaagctgctgatctacggcgctaccacactggaaacaggcgtgcccagcagattttctggcagcggctctggcaccgactacaccctgacaatatccagcctccagcctgaggacttcgccacctactactgtcagcagagctggaacaccccttggacattcggccagggcaccaagctggaaatcaagagaggcggaggcggaagtggaggcggaggatctggcggcggaggctctcaagttcagcttcaacagcctggcgctgagctggtcaaacctggcgcttctgtgaagatgagctgcaaagccagcggctacgccttcagcagctactggatcaactggatgaagcagaaacccggccagggactcgaatggatcggccaaatctatcccggcgacggcgacaccaactacaacggcaagttcaagggcagagccacactgaccgccgatacctctagcagcacagcctacatgcagctgagcagcctgaccagcgaagatagcgccgtgtacttctgtgcccggtccatcacaacagtcgtgggctgcgctatggactattggggccagggaacaagcgtgaccgtgtctagtacgcgtatccagaaccctgatcctgccgtgtaccagctgcgggatagcaagagcagcgacaagagcgtgtgtctgttcaccgacttcgacagccagaccaacgtgtcccagagcaaggactccgacgtgtacatcaccgataagaccgtgctggacatgcggagcatggacttcaagagcaactccgccgtggcctggtccaacaagtccgatttcgcctgcgccaacgccttcaacaacagcattatccccgaggacacattcttcccaagccccgagagcagctgcgacgtgaagctggtggaaaagagcttcgagacagacaccaacctgaacttccagatcctgtacgagatcctgctgggcaaggccaccctgtacgccgtgctggtgtctgccctggtgctgatggctatggtcaagcggaaggacagccgggga

SEQ ID NO: 17697 - DNA, 2469 bp, synthetic construct
  source 1..2469: mol_type = other DNA
atggccttaccagtgaccgccttgctcctgccgctggccttgctgctccacgccgccaggccgctcgaggaggacctgaagaacgtgttcccacctgaggtggccgtgttcgagcctagcgaggccgagatcagccacacccagaaagccaccctcgtgtgcctggctaccggcttctaccccgaccatgtggaactgtcttggtgggtcaacggcaaagaggtgcacagcggcgtgtctaccgacccccagccactgaaagaacagcccgccctgaacgacagccggtactgcctgagcagcagactgagagtgtccgccaccttctggcagaacccccggaaccacttcagatgccaggtgcagttctacggcctgagcgagaacgacgagtggacccaggacagagccaagcccgtgacccagatcgtgtctgccgaagcctggggcagagccgattgcggctttaccagcgagagctaccagcagggcgtgctgagcgccaccaacctgagcgtgatcggcttcagaatcctgctgctgaaagtggccggctttaacctgctgatgaccctgcggctgtggtccagcagggccaagcgatctggatctggagcaacaaacttctcactactcaaacaagcaggtgacgtggaggagaatcccgggcctactagcatggccttaccagtgaccgccttgctcctgccgctggccttgctgctccacgccgccaggccgagccccgtagctcctgcctgtgaccccagactcctaaataaactgctgcgtgactcccacctccttcacagccgactgagtcagtgtcccgacgtggaccctttgtctatccctgttctgctgcctgctgtggactttagcctgggagaatggaaaacccagacggaacagagcaaggcacaggacattctaggggcagtgtcccttctactggagggagtgatggcagcacgaggacagttggaaccctcctgcctctcatccctcctgggacagctttctgggcaggttcgcctcctcttgggggccctgcagggcctcctaggaacccagcttcctctacagggcaggaccacagctcacaaggaccccaatgccctcttcttgagcttgcaacaactgcttcggggaaaggtgcgcttcctgcttctggtagaaggtcccaccctctgtgtcagacggaccctgccaaccacagctgtcccaagcagtacttctggtaccggcggaggcggatctggcggcggaggtagcggtggcggaggatctgaattcgacatccagatgacacagagccctagcagcctgtctgccagcgtgggagacagagtgaccatcacatgcaaggccagcgaccacatcaacaactggctggcctggtatcagcagaagcctggacaggcccctaagctgctgatctacggcgctaccacactggaaacaggcgtgcccagcagattttctggcagcggctctggcaccgactacaccctgacaatatccagcctccagcctgaggacttcgccacctactactgtcagcagagctggaacaccccttggacattcggccagggcaccaagctggaaatcaagagaggcggaggcggaagtggaggcggaggatctggcggcggaggctctcaagttcagcttcaacagcctggcgctgagctggtcaaacctggcgcttctgtgaagatgagctgcaaagccagcggctacgccttcagcagctactggatcaactggatgaagcagaaacccggccagggactcgaatggatcggccaaatctatcccggcgacggcgacaccaactacaacggcaagttcaagggcagagccacactgaccgccgatacctctagcagcacagcctacatgcagctgagcagcctgaccagcgaagatagcgccgtgtacttctgtgcccggtccatcacaacagtcgtgggctgcgctatggactattggggccagggaacaagcgtgaccgtgtctagtacgcgtatccagaaccctgatcctgccgtgtaccagctgcgggatagcaagagcagcgacaagagcgtgtgtctgttcaccgacttcgacagccagaccaacgtgtcccagagcaaggactccgacgtgtacatcaccgataagaccgtgctggacatgcggagcatggacttcaagagcaactccgccgtggcctggtccaacaagtccgatttcgcctgcgccaacgccttcaacaacagcattatccccgaggacacattcttcccaagccccgagagcagctgcgacgtgaagctggtggaaaagagcttcgagacagacaccaacctgaacttccagatcctgtacgagatcctgctgggcaaggccaccctgtacgccgtgctggtgtctgccctggtgctgatggctatggtcaagcggaaggacagccgggga

SEQ ID NO: 17698 - DNA, 2190 bp, synthetic construct
  source 1..2190: mol_type = other DNA
atggccttaccagtgaccgccttgctcctgccgctggccttgctgctccacgccgccaggccgctcgaggaggacctgaagaacgtgttcccacctgaggtggccgtgttcgagcctagcgaggccgagatcagccacacccagaaagccaccctcgtgtgcctggctaccggcttctaccccgaccatgtggaactgtcttggtgggtcaacggcaaagaggtgcacagcggcgtgtctaccgacccccagccactgaaagaacagcccgccctgaacgacagccggtactgcctgagcagcagactgagagtgtccgccaccttctggcagaacccccggaaccacttcagatgccaggtgcagttctacggcctgagcgagaacgacgagtggacccaggacagagccaagcccgtgacccagatcgtgtctgccgaagcctggggcagagccgattgcggctttaccagcgagagctaccagcagggcgtgctgagcgccaccaacctgagcgtgatcggcttcagaatcctgctgctgaaagtggccggctttaacctgctgatgaccctgcggctgtggtccagcagggccaagcgatctggatctggagcaacaaacttctcactactcaaacaagcaggtgacgtggaggagaatcccgggcctactagcatggccttaccagtgaccgccttgctcctgccgctggccttgctgctccacgccgccaggccgatgggcagctgggaagagttcgagctgagactgaacgccatcgaggaacggctgtatgccctcggaggatctgaagccgagctggcctacttcgagtacgtgatcgccgacttcgagggcaacctgcagcggtacaaaggcaagggcaaccctgaagtggaagccctgtacttcgaggccgacgccatcttcgaggaactggtggcctacagacacaacggtaccggcggaggcggatctggcggcggaggtagcggtggcggaggatctgaattcgacatccagatgacacagagccctagcagcctgtctgccagcgtgggagacagagtgaccatcacatgcaaggccagcgaccacatcaacaactggctggcctggtatcagcagaagcctggacaggcccctaagctgctgatctacggcgctaccacactggaaacaggcgtgcccagcagattttctggcagcggctctggcaccgactacaccctgacaatatccagcctccagcctgaggacttcgccacctactactgtcagcagagctggaacaccccttggacattcggccagggcaccaagctggaaatcaagagaggcggaggcggaagtggaggcggaggatctggcggcggaggctctcaagttcagcttcaacagcctggcgctgagctggtcaaacctggcgcttctgtgaagatgagctgcaaagccagcggctacgccttcagcagctactggatcaactggatgaagcagaaacccggccagggactcgaatggatcggccaaatctatcccggcgacggcgacaccaactacaacggcaagttcaagggcagagccacactgaccgccgatacctctagcagcacagcctacatgcagctgagcagcctgaccagcgaagatagcgccgtgtacttctgtgcccggtccatcacaacagtcgtgggctgcgctatggactattggggccagggaacaagcgtgaccgtgtctagtacgcgtatccagaaccctgatcctgccgtgtaccagctgcgggatagcaagagcagcgacaagagcgtgtgtctgttcaccgacttcgacagccagaccaacgtgtcccagagcaaggactccgacgtgtacatcaccgataagaccgtgctggacatgcggagcatggacttcaagagcaactccgccgtggcctggtccaacaagtccgatttcgcctgcgccaacgccttcaacaacagcattatccccgaggacacattcttcccaagccccgagagcagctgcgacgtgaagctggtggaaaagagcttcgagacagacaccaacctgaacttccagatcctgtacgagatcctgctgggcaaggccaccctgtacgccgtgctggtgtctgccctggtgctgatggctatggtcaagcggaaggacagccgggga

SEQ ID NO: 17699 - DNA, 2610 bp, synthetic construct
  source 1..2610: mol_type = other DNA
atggccttaccagtgaccgccttgctcctgccgctggccttgctgctccacgccgccaggccgctcgagatccagaaccctgatcctgccgtgtaccagctgcgggatagcaagagcagcgacaagagcgtgtgtctgttcaccgacttcgacagccagaccaacgtgtcccagagcaaggactccgacgtgtacatcaccgataagaccgtgctggacatgcggagcatggacttcaagagcaactccgccgtggcctggtccaacaagtccgatttcgcctgcgccaacgccttcaacaacagcattatccccgaggacacattcttcccaagccccgagagcagctgcgacgtgaagctggtggaaaagagcttcgagacagacaccaacctgaacttccagatcctgtacgagatcctgctgggcaaggccaccctgtacgccgtgctggtgtctgccctggtgctgatggctatggtcaagcggaaggacagccggggaagggccaagcgatctggatctggagcaacaaacttctcactactcaaacaagcaggtgacgtggaggagaatcccgggcctactagcatggccttaccagtgaccgccttgctcctgccgctggccttgctgctccacgccgccaggccggacatccagatgacacagactacatcctccctgtctgcctctctgggagacagagtcaccatcagttgcagggcaagtcaggacattagtaaatatttaaattggtatcagcagaaaccagatggaactgttaaactcctgatctaccatacatcaagattacactcaggagtcccatcaaggttcagtggcagtgggtctggaacagattattctctcaccattagcaacctggagcaagaagatattgccacttacttttgccaacagggtaatacgcttccgtacacgttcggaggggggaccaagctggagatcacaggtggcggtggctcgggcggtggtgggtcgggtggcggcggatctgaggtgaaactgcaggagtcaggacctggcctggtggcgccctcacagagcctgtccgtcacatgcactgtctcaggggtctcattacccgactatggtgtaagctggattcgccagcctccacgaaagggtctggagtggctgggagtaatatggggtagtgaaaccacatactataattcagctctcaaatccagactgaccatcatcaaggacaactccaagagccaagttttcttaaaaatgaacagtctgcaaactgatgacacagccatttactactgtgccaaacattattactacggtggtagctatgctatggactactggggtcaaggaacctcagtcaccgtctcctcaacgcgtgaggacctgaagaacgtgttcccacctgaggtggccgtgttcgagcctagcgaggccgagatcagccacacccagaaagccaccctcgtgtgcctggctaccggcttctaccccgaccatgtggaactgtcttggtgggtcaacggcaaagaggtgcacagcggcgtgtctaccgacccccagccactgaaagaacagcccgccctgaacgacagccggtactgcctgagcagcagactgagagtgtccgccaccttctggcagaacccccggaaccacttcagatgccaggtgcagttctacggcctgagcgagaacgacgagtggacccaggacagagccaagcccgtgacccagatcgtgtctgccgaagcctggggcagagccgattgcggctttaccagcgagagctaccagcagggcgtgctgagcgccaccaacctgagcgtgatcggcttcagaatcctgctgctgaaagtggccggctttaacctgctgatgaccctgcggctgtggtccagccgcgccaagagaagcggatctggcgtgaagcagaccctgaatttcgacctgctgaagctggctggcgacgtggaatccaacccaggcccttctagaggccatatgaccgagtacaagcccacggtgcgcctcgccacccgcgacgacgtccccagggccgtacgcaccctcgccgccgcgttcgccgactaccccgccacgcgccacaccgtcgatccggaccgccacatcgagcgggtcaccgagctgcaagaactcttcctcacgcgcgtcgggctcgacatcggcaaggtgtgggtcgcggacgacggcgccgcggtggcggtctggaccacgccggagagcgtcgaagcgggggcggtgttcgccgagatcggcccgcgcatggccgagttgagcggttcccggctggccgcgcagcaacagatggaaggcctcctggcgccgcaccggcccaaggagcccgcgtggttcctggccaccgtcggcgtctcgcccgaccaccagggcaagggtctgggcagcgccgtcgtgctccccggagtggaggcggccgagcgcgccggggtgcccgccttcctggagacctccgcgccccgcaacctccccttctacgagcggctcggcttcaccgtcaccgccgacgtcgaggtgcccgaaggaccgcgcacctggtgcatgacccgcaagcccggtgcctga

SEQ ID NO: 17700 - DNA, 2613 bp, synthetic construct
  source 1..2613: mol_type = other DNA
atggccttaccagtgaccgccttgctcctgccgctggccttgctgctccacgccgccaggccgctcgagatccagaaccctgatcctgccgtgtaccagctgcgggatagcaagagcagcgacaagagcgtgtgtctgttcaccgacttcgacagccagaccaacgtgtcccagagcaaggactccgacgtgtacatcaccgataagaccgtgctggacatgcggagcatggacttcaagagcaactccgccgtggcctggtccaacaagtccgatttcgcctgcgccaacgccttcaacaacagcattatccccgaggacacattcttcccaagccccgagagcagctgcgacgtgaagctggtggaaaagagcttcgagacagacaccaacctgaacttccagatcctgtacgagatcctgctgggcaaggccaccctgtacgccgtgctggtgtctgccctggtgctgatggctatggtcaagcggaaggacagccggggaagggccaagcgatctggatctggagcaacaaacttctcactactcaaacaagcaggtgacgtggaggagaatcccgggcctactagcaccatggccttaccagtgaccgccttgctcctgccgctggccttgctgctccacgccgccaggccggagatcgtgatgacccagagccctgccaccctgtctctgagccctggcgaaagagccaccctgagctgtagagccagccaggacatcagcaagtacctgaactggtatcagcagaagcccggccaggcccccagactgctgatctaccacaccagcagactgcacagcggcatccccgccagattttctggctctggcagcggcaccgactacaccctgacaatcagcagcctccagcccgaggacttcgccgtgtacttctgtcagcaaggcaacaccctgccctacaccttcggccagggcaccaagctggaaatcaagggcggaggcggaagtggaggcggaggatctggcggcggaggctctcaggtgcaactccaggaatctggccctggcctcgtgaagcccagcgagacactgagcctgacctgtaccgtgtccggcgtgtccctgcctgactatggcgtgtcctggatcagacagccccctggcaagggcctggaatggatcggagtgatttggggcagcgaaaccacctactacaacagctccctgaagtccagagtgaccatctccaaggacaactccaagaaccaggtgtccctgaagctgagcagcgtgacagccgccgacaccgccgtgtattactgcgccaagcactactactacggcggcagctacgctatggactactggggccagggaaccctcgtgaccgtgtctagtacgcgtgaggacctgaagaacgtgttcccacctgaggtggccgtgttcgagcctagcgaggccgagatcagccacacccagaaagccaccctcgtgtgcctggctaccggcttctaccccgaccatgtggaactgtcttggtgggtcaacggcaaagaggtgcacagcggcgtgtctaccgacccccagccactgaaagaacagcccgccctgaacgacagccggtactgcctgagcagcagactgagagtgtccgccaccttctggcagaacccccggaaccacttcagatgccaggtgcagttctacggcctgagcgagaacgacgagtggacccaggacagagccaagcccgtgacccagatcgtgtctgccgaagcctggggcagagccgattgcggctttaccagcgagagctaccagcagggcgtgctgagcgccaccaacctgagcgtgatcggcttcagaatcctgctgctgaaagtggccggctttaacctgctgatgaccctgcggctgtggtccagccgcgccaagagaagcggatctggcgtgaagcagaccctgaatttcgacctgctgaagctggctggcgacgtggaatccaacccaggcccttctagaggccatatgaccgagtacaagcccacggtgcgcctcgccacccgcgacgacgtccccagggccgtacgcaccctcgccgccgcgttcgccgactaccccgccacgcgccacaccgtcgatccggaccgccacatcgagcgggtcaccgagctgcaagaactcttcctcacgcgcgtcgggctcgacatcggcaaggtgtgggtcgcggacgacggcgccgcggtggcggtctggaccacgccggagagcgtcgaagcgggggcggtgttcgccgagatcggcccgcgcatggccgagttgagcggttcccggctggccgcgcagcaacagatggaaggcctcctggcgccgcaccggcccaaggagcccgcgtggttcctggccaccgtcggcgtctcgcccgaccaccagggcaagggtctgggcagcgccgtcgtgctccccggagtggaggcggccgagcgcgccggggtgcccgccttcctggagacctccgcgccccgcaacctccccttctacgagcggctcggcttcaccgtcaccgccgacgtcgaggtgcccgaaggaccgcgcacctggtgcatgacccgcaagcccggtgcctga

SEQ ID NO: 17701 - DNA, 2616 bp, synthetic construct
  source 1..2616: mol_type = other DNA
atggccttaccagtgaccgccttgctcctgccgctggccttgctgctccacgccgccaggccgctcgagatccagaaccctgatcctgccgtgtaccagctgcgggatagcaagagcagcgacaagagcgtgtgtctgttcaccgacttcgacagccagaccaacgtgtcccagagcaaggactccgacgtgtacatcaccgataagaccgtgctggacatgcggagcatggacttcaagagcaactccgccgtggcctggtccaacaagtccgatttcgcctgcgccaacgccttcaacaacagcattatccccgaggacacattcttcccaagccccgagagcagctgcgacgtgaagctggtggaaaagagcttcgagacagacaccaacctgaacttccagatcctgtacgagatcctgctgggcaaggccaccctgtacgccgtgctggtgtctgccctggtgctgatggctatggtcaagcggaaggacagccggggaagggccaagcgatctggatctggagcaacaaacttctcactactcaaacaagcaggtgacgtggaggagaatcccgggcctactagcaccatggccttaccagtgaccgccttgctcctgccgctggccttgctgctccacgccgccaggccggacgagatcgtgctgacacagagccccgccaccctgtcactgtctccaggcgaaagagccaccctgagctgtagcgccagcagcagcgtgtcctacatgcactggtatcagcagaagcccggccaggcccccagactgctgatctacgataccagcaagctggcctccggcatccccgccagattttctggcagcggctccggcaccgacttcaccctgacaatcagcagcctggaacccgaggacgtggccgtgtactactgttttcaaggcagcgtgtaccccttcaccttcggccagggcaccaagctggaaatcaagagaggtggcggtggctcgggcggtggtgggtcgggtggcggcggatctcaggtgcagctccaggaatctggccctggcctcgtgaagcctagccagaccctgagcctgacctgtaccgtgtctggcggcagcatcagcacaagcggcatgggcgtgggctggatcagacagcaccctggcaagggcctggaatggatcggccacatttggtgggacgacgacaagcggtacaaccccgccctgaagtccagagtgaccatcagcgtggacaccagcaagaaccagttcagcctgaagctgagcagcgtgacagccgccgataccgccgtgtattattgcgcccggatggaactgtggtcctactacttcgactactggggccagggaaccctcgtgaccgtgtctagtacgcgtgaggacctgaagaacgtgttcccacctgaggtggccgtgttcgagcctagcgaggccgagatcagccacacccagaaagccaccctcgtgtgcctggctaccggcttctaccccgaccatgtggaactgtcttggtgggtcaacggcaaagaggtgcacagcggcgtgtctaccgacccccagccactgaaagaacagcccgccctgaacgacagccggtactgcctgagcagcagactgagagtgtccgccaccttctggcagaacccccggaaccacttcagatgccaggtgcagttctacggcctgagcgagaacgacgagtggacccaggacagagccaagcccgtgacccagatcgtgtctgccgaagcctggggcagagccgattgcggctttaccagcgagagctaccagcagggcgtgctgagcgccaccaacctgagcgtgatcggcttcagaatcctgctgctgaaagtggccggctttaacctgctgatgaccctgcggctgtggtccagccgcgccaagagaagcggatctggcgtgaagcagaccctgaatttcgacctgctgaagctggctggcgacgtggaatccaacccaggcccttctagaggccatatgaccgagtacaagcccacggtgcgcctcgccacccgcgacgacgtccccagggccgtacgcaccctcgccgccgcgttcgccgactaccccgccacgcgccacaccgtcgatccggaccgccacatcgagcgggtcaccgagctgcaagaactcttcctcacgcgcgtcgggctcgacatcggcaaggtgtgggtcgcggacgacggcgccgcggtggcggtctggaccacgccggagagcgtcgaagcgggggcggtgttcgccgagatcggcccgcgcatggccgagttgagcggttcccggctggccgcgcagcaacagatggaaggcctcctggcgccgcaccggcccaaggagcccgcgtggttcctggccaccgtcggcgtctcgcccgaccaccagggcaagggtctgggcagcgccgtcgtgctccccggagtggaggcggccgagcgcgccggggtgcccgccttcctggagacctccgcgccccgcaacctccccttctacgagcggctcggcttcaccgtcaccgccgacgtcgaggtgcccgaaggaccgcgcacctggtgcatgacccgcaagcccggtgcctga

SEQ ID NO: 17702 - DNA, 2604 bp, synthetic construct
  source 1..2604: mol_type = other DNA
atggccttaccagtgaccgccttgctcctgccgctggccttgctgctccacgccgccaggccgctcgagatccagaaccctgatcctgccgtgtaccagctgcgggatagcaagagcagcgacaagagcgtgtgtctgttcaccgacttcgacagccagaccaacgtgtcccagagcaaggactccgacgtgtacatcaccgataagaccgtgctggacatgcggagcatggacttcaagagcaactccgccgtggcctggtccaacaagtccgatttcgcctgcgccaacgccttcaacaacagcattatccccgaggacacattcttcccaagccccgagagcagctgcgacgtgaagctggtggaaaagagcttcgagacagacaccaacctgaacttccagatcctgtacgagatcctgctgggcaaggccaccctgtacgccgtgctggtgtctgccctggtgctgatggctatggtcaagcggaaggacagccggggaagggccaagcgatctggatctggagcaacaaacttctcactactcaaacaagcaggtgacgtggaggagaatcccgggcctactagcatggccttaccagtgaccgccttgctcctgccgctggccttgctgctccacgccgccaggccggacatccagatgacacagagccctagcagcctgtctgccagcgtgggagacagagtgaccatcacctgtagagccagccaggacatcagcaactacctgaactggtatcagcagaagcccggcaaggcccctaagctgctgatctactacaccagcagactgcacagcggcgtgcccagcagattttctggctctggcagcggcaccgacttcaccctgacaatatctagcctccagcctgaggacttcgccacctactattgccagcagggcaacaccctgccttacacatttggacagggcaccaaggtggaaatcaagagaggcggaggcggaagtggaggcggaggatctggcggcggaggctctgaagtgcagctggttgaatcaggtggcggcctggttcaacctggcggatctctgagactgagctgtgccgccagcggcttcaccttcagcgactactttatgagctgggtccgacaggcccctggcaaaggacttgaatgggtcgccaccatcagcaatggcggcacctacacttactaccccgacagcgtgaagggcagattcaccatctccagagacaacagcaagaacaccctgtacctccagatgaactccctgagagccgaggacaccgccgtgtactactgcgccagattcgacggctacatcttcgactattggggccagggcaccctggtcacagtctcttctacgcgtgaggacctgaagaacgtgttcccacctgaggtggccgtgttcgagcctagcgaggccgagatcagccacacccagaaagccaccctcgtgtgcctggctaccggcttctaccccgaccatgtggaactgtcttggtgggtcaacggcaaagaggtgcacagcggcgtgtctaccgacccccagccactgaaagaacagcccgccctgaacgacagccggtactgcctgagcagcagactgagagtgtccgccaccttctggcagaacccccggaaccacttcagatgccaggtgcagttctacggcctgagcgagaacgacgagtggacccaggacagagccaagcccgtgacccagatcgtgtctgccgaagcctggggcagagccgattgcggctttaccagcgagagctaccagcagggcgtgctgagcgccaccaacctgagcgtgatcggcttcagaatcctgctgctgaaagtggccggctttaacctgctgatgaccctgcggctgtggtccagccgcgccaagagaagcggatctggcgtgaagcagaccctgaatttcgacctgctgaagctggctggcgacgtggaatccaacccaggcccttctagaggccatatgaccgagtacaagcccacggtgcgcctcgccacccgcgacgacgtccccagggccgtacgcaccctcgccgccgcgttcgccgactaccccgccacgcgccacaccgtcgatccggaccgccacatcgagcgggtcaccgagctgcaagaactcttcctcacgcgcgtcgggctcgacatcggcaaggtgtgggtcgcggacgacggcgccgcggtggcggtctggaccacgccggagagcgtcgaagcgggggcggtgttcgccgagatcggcccgcgcatggccgagttgagcggttcccggctggccgcgcagcaacagatggaaggcctcctggcgccgcaccggcccaaggagcccgcgtggttcctggccaccgtcggcgtctcgcccgaccaccagggcaagggtctgggcagcgccgtcgtgctccccggagtggaggcggccgagcgcgccggggtgcccgccttcctggagacctccgcgccccgcaacctccccttctacgagcggctcggcttcaccgtcaccgccgacgtcgaggtgcccgaaggaccgcgcacctggtgcatgacccgcaagcccggtgcctga

SEQ ID NO: 17703 - DNA, 2616 bp, synthetic construct
  source 1..2616: mol_type = other DNA
atggccttaccagtgaccgccttgctcctgccgctggccttgctgctccacgccgccaggccgctcgagatccagaaccctgatcctgccgtgtaccagctgcgggatagcaagagcagcgacaagagcgtgtgtctgttcaccgacttcgacagccagaccaacgtgtcccagagcaaggactccgacgtgtacatcaccgataagaccgtgctggacatgcggagcatggacttcaagagcaactccgccgtggcctggtccaacaagtccgatttcgcctgcgccaacgccttcaacaacagcattatccccgaggacacattcttcccaagccccgagagcagctgcgacgtgaagctggtggaaaagagcttcgagacagacaccaacctgaacttccagatcctgtacgagatcctgctgggcaaggccaccctgtacgccgtgctggtgtctgccctggtgctgatggctatggtcaagcggaaggacagccggggaagggccaagcgatctggatctggagcaacaaacttctcactactcaaacaagcaggtgacgtggaggagaatcccgggcctactagcatggccttaccagtgaccgccttgctcctgccgctggccttgctgctccacgccgccaggccggacatccagatgacacagagccctagcagcctgtctgccagcgtgggagacagagtgaccatcacatgcaaggccagcgaccacatcaacaactggctggcctggtatcagcagaagcctggacaggcccctaagctgctgatctacggcgctaccacactggaaacaggcgtgcccagcagattttctggcagcggctctggcaccgactacaccctgacaatatccagcctccagcctgaggacttcgccacctactactgtcagcagagctggaacaccccttggacattcggccagggcaccaagctggaaatcaagagaggcggaggcggaagtggaggcggaggatctggcggcggaggctctcaagttcagcttcaacagcctggcgctgagctggtcaaacctggcgcttctgtgaagatgagctgcaaagccagcggctacgccttcagcagctactggatcaactggatgaagcagaaacccggccagggactcgaatggatcggccaaatctatcccggcgacggcgacaccaactacaacggcaagttcaagggcagagccacactgaccgccgatacctctagcagcacagcctacatgcagctgagcagcctgaccagcgaagatagcgccgtgtacttctgtgcccggtccatcacaacagtcgtgggctgcgctatggactattggggccagggaacaagcgtgaccgtgtctagtacgcgtgaggacctgaagaacgtgttcccacctgaggtggccgtgttcgagcctagcgaggccgagatcagccacacccagaaagccaccctcgtgtgcctggctaccggcttctaccccgaccatgtggaactgtcttggtgggtcaacggcaaagaggtgcacagcggcgtgtctaccgacccccagccactgaaagaacagcccgccctgaacgacagccggtactgcctgagcagcagactgagagtgtccgccaccttctggcagaacccccggaaccacttcagatgccaggtgcagttctacggcctgagcgagaacgacgagtggacccaggacagagccaagcccgtgacccagatcgtgtctgccgaagcctggggcagagccgattgcggctttaccagcgagagctaccagcagggcgtgctgagcgccaccaacctgagcgtgatcggcttcagaatcctgctgctgaaagtggccggctttaacctgctgatgaccctgcggctgtggtccagccgcgccaagagaagcggatctggcgtgaagcagaccctgaatttcgacctgctgaagctggctggcgacgtggaatccaacccaggcccttctagaggccatatgaccgagtacaagcccacggtgcgcctcgccacccgcgacgacgtccccagggccgtacgcaccctcgccgccgcgttcgccgactaccccgccacgcgccacaccgtcgatccggaccgccacatcgagcgggtcaccgagctgcaagaactcttcctcacgcgcgtcgggctcgacatcggcaaggtgtgggtcgcggacgacggcgccgcggtggcggtctggaccacgccggagagcgtcgaagcgggggcggtgttcgccgagatcggcccgcgcatggccgagttgagcggttcccggctggccgcgcagcaacagatggaaggcctcctggcgccgcaccggcccaaggagcccgcgtggttcctggccaccgtcggcgtctcgcccgaccaccagggcaagggtctgggcagcgccgtcgtgctccccggagtggaggcggccgagcgcgccggggtgcccgccttcctggagacctccgcgccccgcaacctccccttctacgagcggctcggcttcaccgtcaccgccgacgtcgaggtgcccgaaggaccgcgcacctggtgcatgacccgcaagcccggtgcctga

SEQ ID NO: 17704 - DNA, 2622 bp, synthetic construct
  source 1..2622: mol_type = other DNA
atggccttaccagtgaccgccttgctcctgccgctggccttgctgctccacgccgccaggccgctcgagatccagaaccctgatcctgccgtgtaccagctgcgggatagcaagagcagcgacaagagcgtgtgtctgttcaccgacttcgacagccagaccaacgtgtcccagagcaaggactccgacgtgtacatcaccgataagaccgtgctggacatgcggagcatggacttcaagagcaactccgccgtggcctggtccaacaagtccgatttcgcctgcgccaacgccttcaacaacagcattatccccgaggacacattcttcccaagccccgagagcagctgcgacgtgaagctggtggaaaagagcttcgagacagacaccaacctgaacttccagatcctgtacgagatcctgctgggcaaggccaccctgtacgccgtgctggtgtctgccctggtgctgatggctatggtcaagcggaaggacagccggggaagggccaagcgatctggatctggagcaacaaacttctcactactcaaacaagcaggtgacgtggaggagaatcccgggcctactagcatggccttaccagtgaccgccttgctcctgccgctggccttgctgctccacgccgccaggccgcagatcgtgctgtctcagtctcctgccatcctgagcgcttccccaggcgagaaagtgaccatgacctgtagagccagcagcagcgtgtcctacatgcactggtatcagcagaagcccggcagcagccctaagccttggatctacgccaccagcaatctggcctctggcgtgccagccagattttctggctctggcagcggcaccagctacagcttcacaatcagcagagtggaagccgaggacgccgccacctactattgtcagcagtggaccttcaatcctcctaccttcggcggaggcacccggctggaaatcaaaagaacagtggctgctggcggaggcggaagtggaggcggaggatctggcggcggaggctctcaggcttatctgcaacagagcggagccgaactcgtcagacctggcgcttctgtgaagatgagctgcaaggccagcggctacaccttcaccagctataatatgcactgggtcaagcagacccctcggcagggactcgaatggatcggcggaatctatcccggcaacggcgacacctcctacaaccagaagttcaagggcaaagccacactgaccgtgggcaagagcagcagcaccgcctatatgcagctcagcagcctgaccagcgaggacagcgccgtgtacttctgcgccagatacgactacaactacgctatggactactggggccagggcaccagcgtgacagttagctctgccagcacgcgtgaggacctgaagaacgtgttcccacctgaggtggccgtgttcgagcctagcgaggccgagatcagccacacccagaaagccaccctcgtgtgcctggctaccggcttctaccccgaccatgtggaactgtcttggtgggtcaacggcaaagaggtgcacagcggcgtgtctaccgacccccagccactgaaagaacagcccgccctgaacgacagccggtactgcctgagcagcagactgagagtgtccgccaccttctggcagaacccccggaaccacttcagatgccaggtgcagttctacggcctgagcgagaacgacgagtggacccaggacagagccaagcccgtgacccagatcgtgtctgccgaagcctggggcagagccgattgcggctttaccagcgagagctaccagcagggcgtgctgagcgccaccaacctgagcgtgatcggcttcagaatcctgctgctgaaagtggccggctttaacctgctgatgaccctgcggctgtggtccagccgcgccaagagaagcggatctggcgtgaagcagaccctgaatttcgacctgctgaagctggctggcgacgtggaatccaacccaggcccttctagaggccatatgaccgagtacaagcccacggtgcgcctcgccacccgcgacgacgtccccagggccgtacgcaccctcgccgccgcgttcgccgactaccccgccacgcgccacaccgtcgatccggaccgccacatcgagcgggtcaccgagctgcaagaactcttcctcacgcgcgtcgggctcgacatcggcaaggtgtgggtcgcggacgacggcgccgcggtggcggtctggaccacgccggagagcgtcgaagcgggggcggtgttcgccgagatcggcccgcgcatggccgagttgagcggttcccggctggccgcgcagcaacagatggaaggcctcctggcgccgcaccggcccaaggagcccgcgtggttcctggccaccgtcggcgtctcgcccgaccaccagggcaagggtctgggcagcgccgtcgtgctccccggagtggaggcggccgagcgcgccggggtgcccgccttcctggagacctccgcgccccgcaacctccccttctacgagcggctcggcttcaccgtcaccgccgacgtcgaggtgcccgaaggaccgcgcacctggtgcatgacccgcaagcccggtgcctga

SEQ ID NO: 17705 - DNA, 2616 bp, synthetic construct
  source 1..2616: mol_type = other DNA
atggccttaccagtgaccgccttgctcctgccgctggccttgctgctccacgccgccaggccgctcgagatccagaaccctgatcctgccgtgtaccagctgcgggatagcaagagcagcgacaagagcgtgtgtctgttcaccgacttcgacagccagaccaacgtgtcccagagcaaggactccgacgtgtacatcaccgataagaccgtgctggacatgcggagcatggacttcaagagcaactccgccgtggcctggtccaacaagtccgatttcgcctgcgccaacgccttcaacaacagcattatccccgaggacacattcttcccaagccccgagagcagctgcgacgtgaagctggtggaaaagagcttcgagacagacaccaacctgaacttccagatcctgtacgagatcctgctgggcaaggccaccctgtacgccgtgctggtgtctgccctggtgctgatggctatggtcaagcggaaggacagccggggaagggccaagcgatctggatctggagcaacaaacttctcactactcaaacaagcaggtgacgtggaggagaatcccgggcctactagcatggccttaccagtgaccgccttgctcctgccgctggccttgctgctccacgccgccaggccggagatcgtgctgacacagagccctgccaccctgtctctgagccctggcgaaagagccaccctgagctgtagagccagccagagcgtgtccagctacctggcctggtatcagcagaagcccggccaggctccccggctgctgatctacgatgccagcaatagagccaccggcatccccgccagattttccggctctggcagcggcaccgacttcaccctgaccatcagctccctggaacccgaggacttcgccgtgtactactgccagcagcggagcaactggcccatcacattcggccagggcacccggctggaaatcaaaggcggaggcggaagtggaggcggaggatctggcggcggaggctctgaggtgcagcttgttgagtctggcggaggactggtgcagcccgatagaagcctgagactgtcttgtgccgccagcggcttcaccttccacgattatgccatgcactgggtccgacaggcccctggcaaaggacttgaatgggtgtccaccatctcttggaacagcggcacaatcggctacgccgactctgtgaagggcagattcaccatcagccgggacaacgccaagaacagcctgtacctccagatgaactccctgagagccgaggacacagccctgtactactgcgccaaggacatccagtacggcaactactactacggcatggacgtgtggggccagggcacaacagtgacagtctcttctacgcgtgaggacctgaagaacgtgttcccacctgaggtggccgtgttcgagcctagcgaggccgagatcagccacacccagaaagccaccctcgtgtgcctggctaccggcttctaccccgaccatgtggaactgtcttggtgggtcaacggcaaagaggtgcacagcggcgtgtctaccgacccccagccactgaaagaacagcccgccctgaacgacagccggtactgcctgagcagcagactgagagtgtccgccaccttctggcagaacccccggaaccacttcagatgccaggtgcagttctacggcctgagcgagaacgacgagtggacccaggacagagccaagcccgtgacccagatcgtgtctgccgaagcctggggcagagccgattgcggctttaccagcgagagctaccagcagggcgtgctgagcgccaccaacctgagcgtgatcggcttcagaatcctgctgctgaaagtggccggctttaacctgctgatgaccctgcggctgtggtccagccgcgccaagagaagcggatctggcgtgaagcagaccctgaatttcgacctgctgaagctggctggcgacgtggaatccaacccaggcccttctagaggccatatgaccgagtacaagcccacggtgcgcctcgccacccgcgacgacgtccccagggccgtacgcaccctcgccgccgcgttcgccgactaccccgccacgcgccacaccgtcgatccggaccgccacatcgagcgggtcaccgagctgcaagaactcttcctcacgcgcgtcgggctcgacatcggcaaggtgtgggtcgcggacgacggcgccgcggtggcggtctggaccacgccggagagcgtcgaagcgggggcggtgttcgccgagatcggcccgcgcatggccgagttgagcggttcccggctggccgcgcagcaacagatggaaggcctcctggcgccgcaccggcccaaggagcccgcgtggttcctggccaccgtcggcgtctcgcccgaccaccagggcaagggtctgggcagcgccgtcgtgctccccggagtggaggcggccgagcgcgccggggtgcccgccttcctggagacctccgcgccccgcaacctccccttctacgagcggctcggcttcaccgtcaccgccgacgtcgaggtgcccgaaggaccgcgcacctggtgcatgacccgcaagcccggtgcctga

SEQ ID NO: 17706 - DNA, 2610 bp, synthetic construct
  source 1..2610: mol_type = other DNA
atggccttaccagtgaccgccttgctcctgccgctggccttgctgctccacgccgccaggccgctcgagatccagaaccctgatcctgccgtgtaccagctgcgggatagcaagagcagcgacaagagcgtgtgtctgttcaccgacttcgacagccagaccaacgtgtcccagagcaaggactccgacgtgtacatcaccgataagaccgtgctggacatgcggagcatggacttcaagagcaactccgccgtggcctggtccaacaagtccgatttcgcctgcgccaacgccttcaacaacagcattatccccgaggacacattcttcccaagccccgagagcagctgcgacgtgaagctggtggaaaagagcttcgagacagacaccaacctgaacttccagatcctgtacgagatcctgctgggcaaggccaccctgtacgccgtgctggtgtctgccctggtgctgatggctatggtcaagcggaaggacagccggggaagggccaagcgatctggatctggagcaacaaacttctcactactcaaacaagcaggtgacgtggaggagaatcccgggcctactagcatggccttaccagtgaccgccttgctcctgccgctggccttgctgctccacgccgccaggccggacatccagatgacccagagccccagcagcctgtctgccagcgtgggcgacagagtgaccatcacctgtagagccagccaggacgtgaacaccgccgtggcctggtatcagcagaagcctggcaaggcccccaagctgctgatctacagcgccagcttcctggaaagcggcgtgcccagcagattcagcggaagcagaagcggcaccgacttcaccctgaccatcagctccctccagcccgaggacttcgccacctactactgccagcagcactacaccacccctcccaccttcggccagaccaaggtggaaatcaagagaggcggaggcggaagtggaggcggaggatctggcggcggaggctctgaagtgcaactggtggaatctggcggcggactggtgcagcctggcggatctctgagactgagctgtgccgccagcggcttcaacatcaaggacacctacatccactgggtgcgccaggcccctggaaagggactggaatgggtggcccggatctaccccaccaacggctacaccagatacgccgacagcgtgaagggccggttcaccatcagcgccgacaccagcaagaataccgcctacctccagatgaacagcctgcgggccgaggataccgccgtgtactactgctcaagatggggaggcgacggcttctacgctatggacgtgtggggccagggcacccttgtgaccgtgtcatctacgcgtgaggacctgaagaacgtgttcccacctgaggtggccgtgttcgagcctagcgaggccgagatcagccacacccagaaagccaccctcgtgtgcctggctaccggcttctaccccgaccatgtggaactgtcttggtgggtcaacggcaaagaggtgcacagcggcgtgtctaccgacccccagccactgaaagaacagcccgccctgaacgacagccggtactgcctgagcagcagactgagagtgtccgccaccttctggcagaacccccggaaccacttcagatgccaggtgcagttctacggcctgagcgagaacgacgagtggacccaggacagagccaagcccgtgacccagatcgtgtctgccgaagcctggggcagagccgattgcggctttaccagcgagagctaccagcagggcgtgctgagcgccaccaacctgagcgtgatcggcttcagaatcctgctgctgaaagtggccggctttaacctgctgatgaccctgcggctgtggtccagccgcgccaagagaagcggatctggcgtgaagcagaccctgaatttcgacctgctgaagctggctggcgacgtggaatccaacccaggcccttctagaggccatatgaccgagtacaagcccacggtgcgcctcgccacccgcgacgacgtccccagggccgtacgcaccctcgccgccgcgttcgccgactaccccgccacgcgccacaccgtcgatccggaccgccacatcgagcgggtcaccgagctgcaagaactcttcctcacgcgcgtcgggctcgacatcggcaaggtgtgggtcgcggacgacggcgccgcggtggcggtctggaccacgccggagagcgtcgaagcgggggcggtgttcgccgagatcggcccgcgcatggccgagttgagcggttcccggctggccgcgcagcaacagatggaaggcctcctggcgccgcaccggcccaaggagcccgcgtggttcctggccaccgtcggcgtctcgcccgaccaccagggcaagggtctgggcagcgccgtcgtgctccccggagtggaggcggccgagcgcgccggggtgcccgccttcctggagacctccgcgccccgcaacctccccttctacgagcggctcggcttcaccgtcaccgccgacgtcgaggtgcccgaaggaccgcgcacctggtgcatgacccgcaagcccggtgcctga

SEQ ID NO: 17707 - DNA, 2247 bp, synthetic construct
  source 1..2247: mol_type = other DNA
atggccttaccagtgaccgccttgctcctgccgctggccttgctgctccacgccgccaggccgctcgagatccagaaccctgatcctgccgtgtaccagctgcgggatagcaagagcagcgacaagagcgtgtgtctgttcaccgacttcgacagccagaccaacgtgtcccagagcaaggactccgacgtgtacatcaccgataagaccgtgctggacatgcggagcatggacttcaagagcaactccgccgtggcctggtccaacaagtccgatttcgcctgcgccaacgccttcaacaacagcattatccccgaggacacattcttcccaagccccgagagcagctgcgacgtgaagctggtggaaaagagcttcgagacagacaccaacctgaacttccagatcctgtacgagatcctgctgggcaaggccaccctgtacgccgtgctggtgtctgccctggtgctgatggctatggtcaagcggaaggacagccggggaagggccaagcgatctggatctggagcaacaaacttctcactactcaaacaagcaggtgacgtggaggagaatcccgggcctactagcatggccctgcccgtgacagccctgctgctgcctctggctctgctgctgcacgccgccagacccgatgaattcgaggtgcaactggtggaaagcggcggaggcctggtgcaggctggcggatctctgagactgagctgtgccgccagcggcatcaccttcagcatcaacacaatgggctggtacagacaggcccctggcaagcagagggaactggtggccctgatctccagcatcggcgacacctactacgccgacagcgtgaagggccggttcaccatcagccgggacaacgccaagaacaccgtgtacctccagatgaacagcctgaagcccgaggacaccgccgtgtactactgcaagcggttcagaacagccgcccagggcaccgattattggggccagggaacacaagtgaccgtgtcctctacgcgtgaggacctgaagaacgtgttcccacctgaggtggccgtgttcgagcctagcgaggccgagatcagccacacccagaaagccaccctcgtgtgcctggctaccggcttctaccccgaccatgtggaactgtcttggtgggtcaacggcaaagaggtgcacagcggcgtgtctaccgacccccagccactgaaagaacagcccgccctgaacgacagccggtactgcctgagcagcagactgagagtgtccgccaccttctggcagaacccccggaaccacttcagatgccaggtgcagttctacggcctgagcgagaacgacgagtggacccaggacagagccaagcccgtgacccagatcgtgtctgccgaagcctggggcagagccgattgcggctttaccagcgagagctaccagcagggcgtgctgagcgccaccaacctgagcgtgatcggcttcagaatcctgctgctgaaagtggccggctttaacctgctgatgaccctgcggctgtggtccagccgcgccaagagaagcggatctggcgtgaagcagaccctgaatttcgacctgctgaagctggctggcgacgtggaatccaacccaggcccttctagaggccatatgaccgagtacaagcccacggtgcgcctcgccacccgcgacgacgtccccagggccgtacgcaccctcgccgccgcgttcgccgactaccccgccacgcgccacaccgtcgatccggaccgccacatcgagcgggtcaccgagctgcaagaactcttcctcacgcgcgtcgggctcgacatcggcaaggtgtgggtcgcggacgacggcgccgcggtggcggtctggaccacgccggagagcgtcgaagcgggggcggtgttcgccgagatcggcccgcgcatggccgagttgagcggttcccggctggccgcgcagcaacagatggaaggcctcctggcgccgcaccggcccaaggagcccgcgtggttcctggccaccgtcggcgtctcgcccgaccaccagggcaagggtctgggcagcgccgtcgtgctccccggagtggaggcggccgagcgcgccggggtgcccgccttcctggagacctccgcgccccgcaacctccccttctacgagcggctcggcttcaccgtcaccgccgacgtcgaggtgcccgaaggaccgcgcacctggtgcatgacccgcaagcccggtgcctga

SEQ ID NO: 17708 - DNA, 2247 bp, synthetic construct; identical to SEQ ID NO: 17707
  source 1..2247: mol_type = other DNA

SEQ ID NO: 17709 - DNA, 3042 bp, synthetic construct
  source 1..3042: mol_type = other DNA
atggccttaccagtgaccgccttgctcctgccgctggccttgctgctccacgccgccaggccgctcgagatccagaaccctgatcctgccgtgtaccagctgcgggatagcaagagcagcgacaagagcgtgtgtctgttcaccgacttcgacagccagaccaacgtgtcccagagcaaggactccgacgtgtacatcaccgataagaccgtgctggacatgcggagcatggacttcaagagcaactccgccgtggcctggtccaacaagtccgatttcgcctgcgccaacgccttcaacaacagcattatccccgaggacacattcttcccaagccccgagagcagctgcgacgtgaagctggtggaaaagagcttcgagacagacaccaacctgaacttccagatcctgtacgagatcctgctgggcaaggccaccctgtacgccgtgctggtgtctgccctggtgctgatggctatggtcaagcggaaggacagccggggaagggccaagcgatctggatctggagcaacaaacttctcactactcaaacaagcaggtgacgtggaggagaatcccgggcctactagcatggccttaccagtgaccgccttgctcctgccgctggccttgctgctccacgccgccaggccgcaggtccagctcgtcgagtccggcggcggcctcgtccaggccggcgactccgtcaccctctcctgcaccgcctccggccgcaccttctcctcctacgccctcgcctggttccgccagcgccccggcaaggagcgcgagttcgtcgccggcctccgctggggcggccccaccaactacgccgactccgtcaaggaccgcttcaccatctccggcgactccgccaagcacaccatgtacctccagatgaactccctcaagcccgaggacaccgccgtctactactgcggctacaaccccggcggctgggccgtcccctcccagtacgagtacgactcctggggccagggcacccaggtcaccgtctcctccggtaccggcggaggcggatctggcggcggaggtagcggtggcggaggatctgaattcgacatccagatgacacagagccctagcagcctgtctgccagcgtgggagacagagtgaccatcacatgcaaggccagcgaccacatcaacaactggctggcctggtatcagcagaagcctggacaggcccctaagctgctgatctacggcgctaccacactggaaacaggcgtgcccagcagattttctggcagcggctctggcaccgactacaccctgacaatatccagcctccagcctgaggacttcgccacctactactgtcagcagagctggaacaccccttggacattcggccagggcaccaagctggaaatcaagagaggcggaggcggaagtggaggcggaggatctggcggcggaggctctcaagttcagcttcaacagcctggcgctgagctggtcaaacctggcgcttctgtgaagatgagctgcaaagccagcggctacgccttcagcagctactggatcaactggatgaagcagaaacccggccagggactcgaatggatcggccaaatctatcccggcgacggcgacaccaactacaacggcaagttcaagggcagagccacactgaccgccgatacctctagcagcacagcctacatgcagctgagcagcctgaccagcgaagatagcgccgtgtacttctgtgcccggtccatcacaacagtcgtgggctgcgctatggactattggggccagggaacaagcgtgaccgtgtctagtacgcgtgaggacctgaagaacgtgttcccacctgaggtggccgtgttcgagcctagcgaggccgagatcagccacacccagaaagccaccctcgtgtgcctggctaccggcttctaccccgaccatgtggaactgtcttggtgggtcaacggcaaagaggtgcacagcggcgtgtctaccgacccccagccactgaaagaacagcccgccctgaacgacagccggtactgcctgagcagcagactgagagtgtccgccaccttctggcagaacccccggaaccacttcagatgccaggtgcagttctacggcctgagcgagaacgacgagtggacccaggacagagccaagcccgtgacccagatcgtgtctgccgaagcctggggcagagccgattgcggctttaccagcgagagctaccagcagggcgtgctgagcgccaccaacctgagcgtgatcggcttcagaatcctgctgctgaaagtggccggctttaacctgctgatgaccctgcggctgtggtccagccgcgccaagagaagcggatctggcgtgaagcagaccctgaatttcgacctgctgaagctggctggcgacgtggaatccaacccaggcccttctagaggccatatgaccgagtacaagcccacggtgcgcctcgccacccgcgacgacgtccccagggccgtacgcaccctcgccgccgcgttcgccgactaccccgccacgcgccacaccgtcgatccggaccgccacatcgagcgggtcaccgagctgcaagaactcttcctcacgcgcgtcgggctcgacatcggcaaggtgtgggtcgcggacgacggcgccgcggtggcggtctggaccacgccggagagcgtcgaagcgggggcggtgttcgccgagatcggcccgcgcatggccgagttgagcggttcccggctggccgcgcagcaacagatggaaggcctcctggcgccgcaccggcccaaggagcccgcgtggttcctggccaccgtcggcgtctcgcccgaccaccagggcaagggtctgggcagcgccgtcgtgctccccggagtggaggcggccgagcgcgccggggtgcccgccttcctggagacctccgcgccccgcaacctccccttctacgagcggctcggcttcaccgtcaccgccgacgtcgaggtgcccgaaggaccgcgcacctggtgcatgacccgcaagcccggtgcctga

SEQ ID NO: 17710 - DNA, 3429 bp, synthetic construct
  source 1..3429: mol_type = other DNA
atggccttaccagtgaccgccttgctcctgccgctggccttgctgctccacgccgccaggccgctcgagatccagaaccctgatcctgccgtgtaccagctgcgggatagcaagagcagcgacaagagcgtgtgtctgttcaccgacttcgacagccagaccaacgtgtcccagagcaaggactccgacgtgtacatcaccgataagaccgtgctggacatgcggagcatggacttcaagagcaactccgccgtggcctggtccaacaagtccgatttcgcctgcgccaacgccttcaacaacagcattatccccgaggacacattcttcccaagccccgagagcagctgcgacgtgaagctggtggaaaagagcttcgagacagacaccaacctgaacttccagatcctgtacgagatcctgctgggcaaggccaccctgtacgccgtgctggtgtctgccctggtgctgatggctatggtcaagcggaaggacagccggggaagggccaagcgatctggatctggagcaacaaacttctcactactcaaacaagcaggtgacgtggaggagaatcccgggcctactagcatggccttaccagtgaccgccttgctcctgccgctggccttgctgctccacgccgccaggccggaggttcagctgcttgagtctggcggaggactggttcaacctggcggaagcctgagactgtcttgtgccgccagcggcttcacctttagcagctacgccatgagctgggtccgacaggctcctggcaaaggactggaatgggtgtccagcatcagcggcagcggcgactacatctactacgccgatagcgtgaagggcagattcaccatcagccgggacatcagcaagaacaccctgtacctccagatgaacagcctgagagccgaggacaccgccgtgtactactgtgccaaagaaggcaccggcgctaacagcagcctggccgattatagaggccagggcacactggtcaccgtgtctagtggcggaggaagcggcggaggatctcaggtccagctcgtcgagtccggcggcggcctcgtccaggccggcgactccgtcaccctctcctgcaccgcctccggccgcaccttctcctcctacgccctcgcctggttccgccagcgccccggcaaggagcgcgagttcgtcgccggcctccgctggggcggccccaccaactacgccgactccgtcaaggaccgcttcaccatctccggcgactccgccaagcacaccatgtacctccagatgaactccctcaagcccgaggacaccgccgtctactactgcggctacaaccccggcggctgggccgtcccctcccagtacgagtacgactcctggggccagggcacccaggtcaccgtctcctccggtaccggcggaggcggatctggcggcggaggtagcggtggcggaggatctgaattcgacatccagatgacacagagccctagcagcctgtctgccagcgtgggagacagagtgaccatcacatgcaaggccagcgaccacatcaacaactggctggcctggtatcagcagaagcctggacaggcccctaagctgctgatctacggcgctaccacactggaaacaggcgtgcccagcagattttctggcagcggctctggcaccgactacaccctgacaatatccagcctccagcctgaggacttcgccacctactactgtcagcagagctggaacaccccttggacattcggccagggcaccaagctggaaatcaagagaggcggaggcggaagtggaggcggaggatctggcggcggaggctctcaagttcagcttcaacagcctggcgctgagctggtcaaacctggcgcttctgtgaagatgagctgcaaagccagcggctacgccttcagcagctactggatcaactggatgaagcagaaacccggccagggactcgaatggatcggccaaatctatcccggcgacggcgacaccaactacaacggcaagttcaagggcagagccacactgaccgccgatacctctagcagcacagcctacatgcagctgagcagcctgaccagcgaagatagcgccgtgtacttctgtgcccggtccatcacaacagtcgtgggctgcgctatggactattggggccagggaacaagcgtgaccgtgtctagtacgcgtgaggacctgaagaacgtgttcccacctgaggtggccgtgttcgagcctagcgaggccgagatcagccacacccagaaagccaccctcgtgtgcctggctaccggcttctaccccgaccatgtggaactgtcttggtgggtcaacggcaaagaggtgcacagcggcgtgtctaccgacccccagccactgaaagaacagcccgccctgaacgacagccggtactgcctgagcagcagactgagagtgtccgccaccttctggcagaacccccggaaccacttcagatgccaggtgcagttctacggcctgagcgagaacgacgagtggacccaggacagagccaagcccgtgacccagatcgtgtctgccgaagcctggggcagagccgattgcggctttaccagcgagagctaccagcagggcgtgctgagcgccaccaacctgagcgtgatcggcttcagaatcctgctgctgaaagtggccggctttaacctgctgatgaccctgcggctgtggtccagccgcgccaagagaagcggatctggcgtgaagcagaccctgaatttcgacctgctgaagctggctggcgacgtggaatccaacccaggcccttctagaggccatatgaccgagtacaagcccacggtgcgcctcgccacccgcgacgacgtccccagggccgtacgcaccctcgccgccgcgttcgccgactaccccgccacgcgccacaccgtcgatccggaccgccacatcgagcgggtcaccgagctgcaagaactcttcctcacgcgcgtcgggctcgacatcggcaaggtgtgggtcgcggacgacggcgccgcggtggcggtctggaccacgccggagagcgtcgaagcgggggcggtgttcgccgagatcggcccgcgcatggccgagttgagcggttcccggctggccgcgcagcaacagatggaaggcctcctggcgccgcaccggcccaaggagcccgcgtggttcctggccaccgtcggcgtctcgcccgaccaccagggcaagggtctgggcagcgccgtcgtgctccccggagtggaggcggccgagcgcgccggggtgcccgccttcctggagacctccgcgccccgcaacctccccttctacgagcggctcggcttcaccgtcaccgccgacgtcgaggtgcccgaaggaccgcgcacctggtgcatgacccgcaagcccggtgcctga

SEQ ID NO: 17711 - DNA, 3423 bp, synthetic construct
  source 1..3423: mol_type = other DNA
atggccttaccagtgaccgccttgctcctgccgctggccttgctgctccacgccgccaggccgctcgagatccagaaccctgatcctgccgtgtaccagctgcgggatagcaagagcagcgacaagagcgtgtgtctgttcaccgacttcgacagccagaccaacgtgtcccagagcaaggactccgacgtgtacatcaccgataagaccgtgctggacatgcggagcatggacttcaagagcaactccgccgtggcctggtccaacaagtccgatttcgcctgcgccaacgccttcaacaacagcattatccccgaggacacattcttcccaagccccgagagcagctgcgacgtgaagctggtggaaaagagcttcgagacagacaccaacctgaacttccagatcctgtacgagatcctgctgggcaaggccaccctgtacgccgtgctggtgtctgccctggtgctgatggctatggtcaagcggaaggacagccggggaagggccaagcgatctggatctggagcaacaaacttctcactactcaaacaagcaggtgacgtggaggagaatcccgggcctactagcatggccttaccagtgaccgccttgctcctgccgctggccttgctgctccacgccgccaggccgggcgtgacacagagccccacacacctgattaagaccagaggccagcaggccacactgagatgcagccctatcagcggccacaccagcgtgtactggtatcagcaggctctcggactgggcctccagttcctgctttggtacgacgagggcgaagagagaaaccggggcaacttccctcctcggttttccggcagacagttccccaactacagcagcgagctgaacgtgaacgccctggaactggaagatagcgccctgtacctgtgtgcctcttctcttggtggacctcgcggactggctggactgagaggggatgagcagtttttcggccctggcaccagactgaccgtgctggaaggcggaggaagcggcggaggatctcaggtccagctcgtcgagtccggcggcggcctcgtccaggccggcgactccgtcaccctctcctgcaccgcctccggccgcaccttctcctcctacgccctcgcctggttccgccagcgccccggcaaggagcgcgagttcgtcgccggcctccgctggggcggccccaccaactacgccgactccgtcaaggaccgcttcaccatctccggcgactccgccaagcacaccatgtacctccagatgaactccctcaagcccgaggacaccgccgtctactactgcggctacaaccccggcggctgggccgtcccctcccagtacgagtacgactcctggggccagggcacccaggtcaccgtctcctccggtaccggcggaggcggatctggcggcggaggtagcggtggcggaggatctgaattcgacatccagatgacacagagccctagcagcctgtctgccagcgtgggagacagagtgaccatcacatgcaaggccagcgaccacatcaacaactggctggcctggtatcagcagaagcctggacaggcccctaagctgctgatctacggcgctaccacactggaaacaggcgtgcccagcagattttctggcagcggctctggcaccgactacaccctgacaatatccagcctccagcctgaggacttcgccacctactactgtcagcagagctggaacaccccttggacattcggccagggcaccaagctggaaatcaagagaggcggaggcggaagtggaggcggaggatctggcggcggaggctctcaagttcagcttcaacagcctggcgctgagctggtcaaacctggcgcttctgtgaagatgagctgcaaagccagcggctacgccttcagcagctactggatcaactggatgaagcagaaacccggccagggactcgaatggatcggccaaatctatcccggcgacggcgacaccaactacaacggcaagttcaagggcagagccacactgaccgccgatacctctagcagcacagcctacatgcagctgagcagcctgaccagcgaagatagcgccgtgtacttctgtgcccggtccatcacaacagtcgtgggctgcgctatggactattggggccagggaacaagcgtgaccgtgtctagtacgcgtgaggacctgaagaacgtgttcccacctgaggtggccgtgttcgagcctagcgaggccgagatcagccacacccagaaagccaccctcgtgtgcctggctaccggcttctaccccgaccatgtggaactgtcttggtgggtcaacggcaaagaggtgcacagcggcgtgtctaccgacccccagccactgaaagaacagcccgccctgaacgacagccggtactgcctgagcagcagactgagagtgtccgccaccttctggcagaacccccggaaccacttcagatgccaggtgcagttctacggcctgagcgagaacgacgagtggacccaggacagagccaagcccgtgacccagatcgtgtctgccgaagcctggggcagagccgattgcggctttaccagcgagagctaccagcagggcgtgctgagcgccaccaacctgagcgtgatcggcttcagaatcctgctgctgaaagtggccggctttaacctgctgatgaccctgcggctgtggtccagccgcgccaagagaagcggatctggcgtgaagcagaccctgaatttcgacctgctgaagctggctggcgacgtggaatccaacccaggcccttctagaggccatatgaccgagtacaagcccacggtgcgcctcgccacccgcgacgacgtccccagggccgtacgcaccctcgccgccgcgttcgccgactaccccgccacgcgccacaccgtcgatccggaccgccacatcgagcgggtcaccgagctgcaagaactcttcctcacgcgcgtcgggctcgacatcggcaaggtgtgggtcgcggacgacggcgccgcggtggcggtctggaccacgccggagagcgtcgaagcgggggcggtgttcgccgagatcggcccgcgcatggccgagttgagcggttcccggctggccgcgcagcaacagatggaaggcctcctggcgccgcaccggcccaaggagcccgcgtggttcctggccaccgtcggcgtctcgcccgaccaccagggcaagggtctgggcagcgccgtcgtgctccccggagtggaggcggccgagcgcgccggggtgcccgccttcctggagacctccgcgccccgcaacctccccttctacgagcggctcggcttcaccgtcaccgccgacgtcgaggtgcccgaaggaccgcgcacctggtgcatgacccgcaagcccggtgcctga

SEQ ID NO: 17712 - DNA, 2703 bp, synthetic construct
  source 1..2703: mol_type = other DNA
atggccttaccagtgaccgccttgctcctgccgctggccttgctgctccacgccgccaggccgctcgagatccagaaccctgatcctgccgtgtaccagctgcgggatagcaagagcagcgacaagagcgtgtgtctgttcaccgacttcgacagccagaccaacgtgtcccagagcaaggactccgacgtgtacatcaccgataagaccgtgctggacatgcggagcatggacttcaagagcaactccgccgtggcctggtccaacaagtccgatttcgcctgcgccaacgccttcaacaacagcattatccccgaggacacattcttcccaagccccgagagcagctgcgacgtgaagctggtggaaaagagcttcgagacagacaccaacctgaacttccagatcctgtacgagatcctgctgggcaaggccaccctgtacgccgtgctggtgtctgccctggtgctgatggctatggtcaagcggaaggacagccggggaagggccaagcgatctggatctggagcaacaaacttctcactactcaaacaagcaggtgacgtggaggagaatcccgggcctactagcatggccttaccagtgaccgccttgctcctgccgctggccttgctgctccacgccgccaggccgggcgtgacacagagccccacacacctgattaagaccagaggccagcaggccacactgagatgcagccctatcagcggccacaccagcgtgtactggtatcagcaggctctcggactgggcctccagttcctgctttggtacgacgagggcgaagagagaaaccggggcaacttccctcctcggttttccggcagacagttccccaactacagcagcgagctgaacgtgaacgccctggaactggaagatagcgccctgtacctgtgtgcctcttctcttggtggacctcgcggactggctggactgagaggggatgagcagtttttcggccctggcaccagactgaccgtgctggaaggcggaggaagcggcggaggatctggcgtgacacagagccccacacacctgattaagaccagaggccagcaggccacactgagatgcagccctatcagcggccacaccagcgtgtactggtatcagcaggctctcggactgggcctccagttcctgctttggtacgacgagggcgaagagagaaaccggggcaacttccctcctcggttttccggcagacagttccccaactacagcagcgagctgaacgtgaacgccctggaactggaagatagcgccctgtacctgtgtgccagctctctcggcggagatgaactgggagccgatggcaacgagcagttctttggccctggcaccagactgaccgtgctggaaggtaccggcggaggcggatctggcggcggaggtagcggtggcggaggatctgaattcgacatccagatgacacagagccctagcagcctgtctgccagcgtgggagacagagtgaccatcacatgcaaggccagcgaccacatcaacaactggctggcctggtatcagcagaagcctggacaggcccctaagctgctgatctacggcgctaccacactggaaacaggcgtgcccagcagattttctggcagcggctctggcaccgactacaccctgacaatatccagcctccagcctgaggacttcgccacctactactgtcagcagagctggaacaccccttggacattcggccagggcaccaagctggaaatcaagagaggcggaggcggaagtggaggcggaggatctggcggcggaggctctcaagttcagcttcaacagcctggcgctgagctggtcaaacctggcgcttctgtgaagatgagctgcaaagccagcggctacgccttcagcagctactggatcaactggatgaagcagaaacccggccagggactcgaatggatcggccaaatctatcccggcgacggcgacaccaactacaacggcaagttcaagggcagagccacactgaccgccgatacctctagcagcacagcctacatgcagctgagcagcctgaccagcgaagatagcgccgtgtacttctgtgcccggtccatcacaacagtcgtgggctgcgctatggactattggggccagggaacaagcgtgaccgtgtctagtacgcgtgaggacctgaagaacgtgttcccacctgaggtggccgtgttcgagcctagcgaggccgagatcagccacacccagaaagccaccctcgtgtgcctggctaccggcttctaccccgaccatgtggaactgtcttggtgggtcaacggcaaagaggtgcacagcggcgtgtctaccgacccccagccactgaaagaacagcccgccctgaacgacagccggtactgcctgagcagcagactgagagtgtccgccaccttctggcagaacccccggaaccacttcagatgccaggtgcagttctacggcctgagcgagaacgacgagtggacccaggacagagccaagcccgtgacccagatcgtgtctgccgaagcctggggcagagccgattgcggctttaccagcgagagctaccagcagggcgtgctgagcgccaccaacctgagcgtgatcggcttcagaatcctgctgctgaaagtggccggctttaacctgctgatgaccctgcggctgtggtccagc

SEQ ID NO: 17713 - DNA, 2265 bp, synthetic construct
  source 1..2265: mol_type = other DNA
atggccttaccagtgaccgccttgctcctgccgctggccttgctgctccacgccgccaggccgctcgagatccagaaccctgatcctgccgtgtaccagctgcgggatagcaagagcagcgacaagagcgtgtgtctgttcaccgacttcgacagccagaccaacgtgtcccagagcaaggactccgacgtgtacatcaccgataagaccgtgctggacatgcggagcatggacttcaagagcaactccgccgtggcctggtccaacaagtccgatttcgcctgcgccaacgccttcaacaacagcattatccccgaggacacattcttcccaagccccgagagcagctgcgacgtgaagctggtggaaaagagcttcgagacagacaccaacctgaacttccagatcctgtacgagatcctgctgggcaaggccaccctgtacgccgtgctggtgtctgccctggtgctgatggctatggtcaagcggaaggacagccggggaagggccaagcgatctggatctggagcaacaaacttctcactactcaaacaagcaggtgacgtggaggagaatcccgggcctactagcatggccctgcccgtgacagccctgctgctgcctctggctctgctgctgcacgccgccagacccgatgaattcggctctgacctgggcatcaagctgctgttcgccgctgccaagggccaggacgacgaagtgcggattctgctggctgctggggccgacgtgaacgccaaggatttcgagggctacacccccctgcacgtggccgcctatgatggacacctggaaatcgtggaagtgctgctgaaggctggcgctgatgtgaatgccaaagacagccagggccggacccctctgcatgaagccgcctacagcggccatctggaaattgtggaagtgctgctgaaagccggggcagacgtgaacgctcaggacgacgctggcgagacaccagccgatctggctgcagcttggggccacgaagatatcgccgaggtgctgcagaagacgcgtgaggacctgaagaacgtgttcccacctgaggtggccgtgttcgagcctagcgaggccgagatcagccacacccagaaagccaccctcgtgtgcctggctaccggcttctaccccgaccatgtggaactgtcttggtgggtcaacggcaaagaggtgcacagcggcgtgtctaccgacccccagccactgaaagaacagcccgccctgaacgacagccggtactgcctgagcagcagactgagagtgtccgccaccttctggcagaacccccggaaccacttcagatgccaggtgcagttctacggcctgagcgagaacgacgagtggacccaggacagagccaagcccgtgacccagatcgtgtctgccgaagcctggggcagagccgattgcggctttaccagcgagagctaccagcagggcgtgctgagcgccaccaacctgagcgtgatcggcttcagaatcctgctgctgaaagtggccggctttaacctgctgatgaccctgcggctgtggtccagccgcgccaagagaagcggatctggcgtgaagcagaccctgaatttcgacctgctgaagctggctggcgacgtggaatccaacccaggcccttctagaggccatatgaccgagtacaagcccacggtgcgcctcgccacccgcgacgacgtccccagggccgtacgcaccctcgccgccgcgttcgccgactaccccgccacgcgccacaccgtcgatccggaccgccacatcgagcgggtcaccgagctgcaagaactcttcctcacgcgcgtcgggctcgacatcggcaaggtgtgggtcgcggacgacggcgccgcggtggcggtctggaccacgccggagagcgtcgaagcgggggcggtgttcgccgagatcggcccgcgcatggccgagttgagcggttcccggctggccgcgcagcaacagatggaaggcctcctggcgccgcaccggcccaaggagcccgcgtggttcctggccaccgtcggcgtctcgcccgaccaccagggcaagggtctgggcagcgccgtcgtgctccccggagtggaggcggccgagcgcgccggggtgcccgccttcctggagacctccgcgccccgcaacctccccttctacgagcggctcggcttcaccgtcaccgccgacgtcgaggtgcccgaaggaccgcgcacctggtgcatgacccgcaagcccggtgcctga

SEQ ID NO: 17714 - DNA, 2052 bp, synthetic construct
  source 1..2052: mol_type = other DNA
atggccttaccagtgaccgccttgctcctgccgctggccttgctgctccacgccgccaggccgctcgagatccagaaccctgatcctgccgtgtaccagctgcgggatagcaagagcagcgacaagagcgtgtgtctgttcaccgacttcgacagccagaccaacgtgtcccagagcaaggactccgacgtgtacatcaccgataagaccgtgctggacatgcggagcatggacttcaagagcaactccgccgtggcctggtccaacaagtccgatttcgcctgcgccaacgccttcaacaacagcattatccccgaggacacattcttcccaagccccgagagcagctgcgacgtgaagctggtggaaaagagcttcgagacagacaccaacctgaacttccagatcctgtacgagatcctgctgggcaaggccaccctgtacgccgtgctggtgtctgccctggtgctgatggctatggtcaagcggaaggacagccggggaagggccaagcgatctggatctggagcaacaaacttctcactactcaaacaagcaggtgacgtggaggagaatcccgggcctactagcatggactggatttggcgcatccttttccttgtcggcgctgctaccggcgcccattccttcgaaggcagcggattcgaatacgccaaagagatgcggaacgcctactgggagatcgccctgctgcccaatctgaccaaccagcagaagagagcccccatcagaaagctgtacgacgacccctcccagagcagcgagctgctgtctgaggctaaaaaactgaacgatagccagacgcgtgaggacctgaagaacgtgttcccacctgaggtggccgtgttcgagcctagcgaggccgagatcagccacacccagaaagccaccctcgtgtgcctggctaccggcttctaccccgaccatgtggaactgtcttggtgggtcaacggcaaagaggtgcacagcggcgtgtctaccgacccccagccactgaaagaacagcccgccctgaacgacagccggtactgcctgagcagcagactgagagtgtccgccaccttctggcagaacccccggaaccacttcagatgccaggtgcagttctacggcctgagcgagaacgacgagtggacccaggacagagccaagcccgtgacccagatcgtgtctgccgaagcctggggcagagccgattgcggctttaccagcgagagctaccagcagggcgtgctgagcgccaccaacctgagcgtgatcggcttcagaatcctgctgctgaaagtggccggctttaacctgctgatgaccctgcggctgtggtccagccgcgccaagagaagcggatctggcgtgaagcagaccctgaatttcgacctgctgaagctggctggcgacgtggaatccaacccaggcccttctagaggccatatgaccgagtacaagcccacggtgcgcctcgccacccgcgacgacgtccccagggccgtacgcaccctcgccgccgcgttcgccgactaccccgccacgcgccacaccgtcgatccggaccgccacatcgagcgggtcaccgagctgcaagaactcttcctcacgcgcgtcgggctcgacatcggcaaggtgtgggtcgcggacgacggcgccgcggtggcggtctggaccacgccggagagcgtcgaagcgggggcggtgttcgccgagatcggcccgcgcatggccgagttgagcggttcccggctggccgcgcagcaacagatggaaggcctcctggcgccgcaccggcccaaggagcccgcgtggttcctggccaccgtcggcgtctcgcccgaccaccagggcaagggtctgggcagcgccgtcgtgctccccggagtggaggcggccgagcgcgccggggtgcccgccttcctggagacctccgcgccccgcaacctccccttctacgagcggctcggcttcaccgtcaccgccgacgtcgaggtgcccgaaggaccgcgcacctggtgcatgacccgcaagcccggtgcctga

SEQ ID NO: 17715 - DNA, 2718 bp, synthetic construct
  source 1..2718: mol_type = other DNA
atggccttaccagtgaccgccttgctcctgccgctggccttgctgctccacgccgccaggccgctcgagatccagaaccctgatcctgccgtgtaccagctgcgggatagcaagagcagcgacaagagcgtgtgtctgttcaccgacttcgacagccagaccaacgtgtcccagagcaaggactccgacgtgtacatcaccgataagaccgtgctggacatgcggagcatggacttcaagagcaactccgccgtggcctggtccaacaagtccgatttcgcctgcgccaacgccttcaacaacagcattatccccgaggacacattcttcccaagccccgagagcagctgcgacgtgaagctggtggaaaagagcttcgagacagacaccaacctgaacttccagatcctgtacgagatcctgctgggcaaggccaccctgtacgccgtgctggtgtctgccctggtgctgatggctatggtcaagcggaaggacagccggggaagggccaagcgatctggatctggagcaacaaacttctcactactcaaacaagcaggtgacgtggaggagaatcccgggcctactagcatggccctgcccgtgacagccctgctgctgcctctggctctgctgctgcacgccgccagacccgatgaattcgaggtgcaactggtggaaagcggcggaggcctggtgcaggctggcggatctctgagactgagctgtgccgccagcggcatcaccttcagcatcaacacaatgggctggtacagacaggcccctggcaagcagagggaactggtggccctgatctccagcatcggcgacacctactacgccgacagcgtgaagggccggttcaccatcagccgggacaacgccaagaacaccgtgtacctccagatgaacagcctgaagcccgaggacaccgccgtgtactactgcaagcggttcagaacagccgcccagggcaccgattattggggccagggaacacaagtgaccgtgtcctctctcgagggaggaggcggctccgggggaggcggaagtggaggcggaggatctgggtctggaggaagcggatctggaggctcagggtcagggggctcaggcagtggaggctctttcgaagtgcaactggtggaatctgggggcggactggtgcagccaggcggaagtctgaggctgtcttgtgccgcctccggcagcatcttcggcttcaacgacatggcctggtatcggcaggctcccggaaaacagcgcgagctggtggctctgattagcagagtgggcgtgaccagcagcgccgactctgtgaagggcagattcacaatctccagagtgaacgccaaggatacagtgtacctccagatgaactctctgaaacctgaggatacagcagtgtactattgctacatggaccagcggctggacggcagcacactggcctactggggacagggaactcaagtgacagtgtctagcacgcgtgaggacctgaagaacgtgttcccacctgaggtggccgtgttcgagcctagcgaggccgagatcagccacacccagaaagccaccctcgtgtgcctggctaccggcttctaccccgaccatgtggaactgtcttggtgggtcaacggcaaagaggtgcacagcggcgtgtctaccgacccccagccactgaaagaacagcccgccctgaacgacagccggtactgcctgagcagcagactgagagtgtccgccaccttctggcagaacccccggaaccacttcagatgccaggtgcagttctacggcctgagcgagaacgacgagtggacccaggacagagccaagcccgtgacccagatcgtgtctgccgaagcctggggcagagccgattgcggctttaccagcgagagctaccagcagggcgtgctgagcgccaccaacctgagcgtgatcggcttcagaatcctgctgctgaaagtggccggctttaacctgctgatgaccctgcggctgtggtccagccgcgccaagagaagcggatctggcgtgaagcagaccctgaatttcgacctgctgaagctggctggcgacgtggaatccaacccaggcccttctagaggccatatgaccgagtacaagcccacggtgcgcctcgccacccgcgacgacgtccccagggccgtacgcaccctcgccgccgcgttcgccgactaccccgccacgcgccacaccgtcgatccggaccgccacatcgagcgggtcaccgagctgcaagaactcttcctcacgcgcgtcgggctcgacatcggcaaggtgtgggtcgcggacgacggcgccgcggtggcggtctggaccacgccggagagcgtcgaagcgggggcggtgttcgccgagatcggcccgcgcatggccgagttgagcggttcccggctggccgcgcagcaacagatggaaggcctcctggcgccgcaccggcccaaggagcccgcgtggttcctggccaccgtcggcgtctcgcccgaccaccagggcaagggtctgggcagcgccgtcgtgctccccggagtggaggcggccgagcgcgccggggtgcccgccttcctggagacctccgcgccccgcaacctccccttctacgagcggctcggcttcaccgtcaccgccgacgtcgaggtgcccgaaggaccgcgcacctggtgcatgacccgcaagcccggtgcctga

SEQ ID NO: 17716 - DNA, 2460 bp, synthetic construct
  source 1..2460: mol_type = other DNA
atggccttaccagtgaccgccttgctcctgccgctggccttgctgctccacgccgccaggccgctcgagatccagaaccctgatcctgccgtgtaccagctgcgggatagcaagagcagcgacaagagcgtgtgtctgttcaccgacttcgacagccagaccaacgtgtcccagagcaaggactccgacgtgtacatcaccgataagaccgtgctggacatgcggagcatggacttcaagagcaactccgccgtggcctggtccaacaagtccgatttcgcctgcgccaacgccttcaacaacagcattatccccgaggacacattcttcccaagccccgagagcagctgcgacgtgaagctggtggaaaagagcttcgagacagacaccaacctgaacttccagatcctgtacgagatcctgctgggcaaggccaccctgtacgccgtgctggtgtctgccctggtgctgatggctatggtcaagcggaaggacagccggggaagggccaagcgatctggatctggagcaacaaacttctcactactcaaacaagcaggtgacgtggaggagaatcccgggcctactagcatggcccttccagtcactgccttgctgttgcctctggcgctcctgctccacgccgctagaccgggcatgagaaccgaggacctgcctaaggccgtggtgttcctggaaccccagtggtacagagtgctggaaaaggacagcgtgaccctgaagtgccagggcgcctacagccccgaggacaatagcacccagtggttccacaacgagagcctgatctccagccaggccagcagctacttcatcgacgccgccaccgtggacgacagcggcgagtatagatgccagaccaacctgagcaccctgagcgaccccgtgcagctggaagtgcacatcggatggctgctgctgcaggcccccagatgggtgttcaaagaagaggaccccatccacctgagatgccactcttggaagaacaccgccctgcacaaagtgacctacctgcagaacggcaagggcagaaagtacttccaccacaacagcgacttctacatccccaaggccaccctgaaggactccggctcctacttctgcagaggcctcgtgggcagcaagaacgtgtccagcgagacagtgaacatcaccatcacccagggcctggccgtgtctaccatcagcagctttttcccacccggctaccagacgcgtgaggacctgaagaacgtgttcccacctgaggtggccgtgttcgagcctagcgaggccgagatcagccacacccagaaagccaccctcgtgtgcctggctaccggcttctaccccgaccatgtggaactgtcttggtgggtcaacggcaaagaggtgcacagcggcgtgtctaccgacccccagccactgaaagaacagcccgccctgaacgacagccggtactgcctgagcagcagactgagagtgtccgccaccttctggcagaacccccggaaccacttcagatgccaggtgcagttctacggcctgagcgagaacgacgagtggacccaggacagagccaagcccgtgacccagatcgtgtctgccgaagcctggggcagagccgattgcggctttaccagcgagagctaccagcagggcgtgctgagcgccaccaacctgagcgtgatcggcttcagaatcctgctgctgaaagtggccggctttaacctgctgatgaccctgcggctgtggtccagccgcgccaagagaagcggatctggcgtgaagcagaccctgaatttcgacctgctgaagctggctggcgacgtggaatccaacccaggcccttctagaggccatatgaccgagtacaagcccacggtgcgcctcgccacccgcgacgacgtccccagggccgtacgcaccctcgccgccgcgttcgccgactaccccgccacgcgccacaccgtcgatccggaccgccacatcgagcgggtcaccgagctgcaagaactcttcctcacgcgcgtcgggctcgacatcggcaaggtgtgggtcgcggacgacggcgccgcggtggcggtctggaccacgccggagagcgtcgaagcgggggcggtgttcgccgagatcggcccgcgcatggccgagttgagcggttcccggctggccgcgcagcaacagatggaaggcctcctggcgccgcaccggcccaaggagcccgcgtggttcctggccaccgtcggcgtctcgcccgaccaccagggcaagggtctgggcagcgccgtcgtgctccccggagtggaggcggccgagcgcgccggggtgcccgccttcctggagacctccgcgccccgcaacctccccttctacgagcggctcggcttcaccgtcaccgccgacgtcgaggtgcccgaaggaccgcgcacctggtgcatgacccgcaagcccggtgcctga

SEQ ID NO: 17717 - DNA, 1341 bp, synthetic construct
  source 1..1341: mol_type = other DNA
atggccttaccagtgaccgccttgctcctgccgctggccttgctgctccacgccgccaggccgctcgagatccagaaccctgatcctgccgtgtaccagctgcgggatagcaagagcagcgacaagagcgtgtgtctgttcaccgacttcgacagccagaccaacgtgtcccagagcaaggactccgacgtgtacatcaccgataagaccgtgctggacatgcggagcatggacttcaagagcaactccgccgtggcctggtccaacaagtccgatttcgcctgcgccaacgccttcaacaacagcattatccccgaggacacattcttcccaagccccgagagcagctgcgacgtgaagctggtggaaaagagcttcgagacagacaccaacctgaacttccagatcctgtacgagatcctgctgggcaaggccaccctgtacgccgtgctggtgtctgccctggtgctgatggctatggtcaagcggaaggacagccggggaagggccaagcgatctggatctggagcaacaaacttctcactactcaaacaagcaggtgacgtggaggagaatcccgggcctactagcgccaccatggccttaccagtgaccgccttgctcctgccgctggccttgctgctccacgccgccaggccgatggaccccgacctggaaatcagagccgccttcctgcggcagagaaacacagccctgagaacagaggtggccgagctggaacaagaggtgcagcggctggaaaacgaggtgtcccagtacgagacaagatacggccctctcggaggcggaaaaacgcgtgaggacctgaagaacgtgttcccacctgaggtggccgtgttcgagcctagcgaggccgagatcagccacacccagaaagccaccctcgtgtgcctggctaccggcttctaccccgaccatgtggaactgtcttggtgggtcaacggcaaagaggtgcacagcggcgtgtctaccgacccccagccactgaaagaacagcccgccctgaacgacagccggtactgcctgagcagcagactgagagtgtccgccaccttctggcagaacccccggaaccacttcagatgccaggtgcagttctacggcctgagcgagaacgacgagtggacccaggacagagccaagcccgtgacccagatcgtgtctgccgaagcctggggcagagccgattgcggctttaccagcgagagctaccagcagggcgtgctgagcgccaccaacctgagcgtgatcggcttcagaatcctgctgctgaaagtggccggctttaacctgctgatgaccctgcggctgtggtccagc

SEQ ID NO: 17718 - DNA, 1341 bp, synthetic construct
  source 1..1341: mol_type = other DNA
atggccttaccagtgaccgccttgctcctgccgctggccttgctgctccacgccgccaggccgctcgagatccagaaccctgatcctgccgtgtaccagctgcgggatagcaagagcagcgacaagagcgtgtgtctgttcaccgacttcgacagccagaccaacgtgtcccagagcaaggactccgacgtgtacatcaccgataagaccgtgctggacatgcggagcatggacttcaagagcaactccgccgtggcctggtccaacaagtccgatttcgcctgcgccaacgccttcaacaacagcattatccccgaggacacattcttcccaagccccgagagcagctgcgacgtgaagctggtggaaaagagcttcgagacagacaccaacctgaacttccagatcctgtacgagatcctgctgggcaaggccaccctgtacgccgtgctggtgtctgccctggtgctgatggctatggtcaagcggaaggacagccggggaagggccaagcgatctggatctggagcaacaaacttctcactactcaaacaagcaggtgacgtggaggagaatcccgggcctactagcgccaccatggccttaccagtgaccgccttgctcctgccgctggccttgctgctccacgccgccaggccgatggaccctgatctcgaaattgaggccgcctttctggaacgcgagaacactgccctggaaaccagggtcgcagagctgagacagagagtgcagagactgcggaacagagtgtctcagtaccgcaccagatatggcccactcggcggaggtaaaacgcgtgaggacctgaagaacgtgttcccacctgaggtggccgtgttcgagcctagcgaggccgagatcagccacacccagaaagccaccctcgtgtgcctggctaccggcttctaccccgaccatgtggaactgtcttggtgggtcaacggcaaagaggtgcacagcggcgtgtctaccgacccccagccactgaaagaacagcccgccctgaacgacagccggtactgcctgagcagcagactgagagtgtccgccaccttctggcagaacccccggaaccacttcagatgccaggtgcagttctacggcctgagcgagaacgacgagtggacccaggacagagccaagcccgtgacccagatcgtgtctgccgaagcctggggcagagccgattgcggctttaccagcgagagctaccagcagggcgtgctgagcgccaccaacctgagcgtgatcggcttcagaatcctgctgctgaaagtggccggctttaacctgctgatgaccctgcggctgtggtccagc

SEQ ID NO: 17719 - DNA, 2046 bp, synthetic construct
  source 1..2046: mol_type = other DNA
atggccttaccagtgaccgccttgctcctgccgctggccttgctgctccacgccgccaggccgctcgagatccagaaccctgatcctgccgtgtaccagctgcgggatagcaagagcagcgacaagagcgtgtgtctgttcaccgacttcgacagccagaccaacgtgtcccagagcaaggactccgacgtgtacatcaccgataagaccgtgctggacatgcggagcatggacttcaagagcaactccgccgtggcctggtccaacaagtccgatttcgcctgcgccaacgccttcaacaacagcattatccccgaggacacattcttcccaagccccgagagcagctgcgacgtgaagctggtggaaaagagcttcgagacagacaccaacctgaacttccagatcctgtacgagatcctgctgggcaaggccaccctgtacgccgtgctggtgtctgccctggtgctgatggctatggtcaagcggaaggacagccggggaagggccaagcgatctggatctggagcaacaaacttctcactactcaaacaagcaggtgacgtggaggagaatcccgggcctactagcgccaccatggccttaccagtgaccgccttgctcctgccgctggccttgctgctccacgccgccaggccgctgttcaatcaagaggtgcagatccctctgaccgagagctactgtggcccctgtcctaagaactggatctgctacaagaacaactgctaccagttcttcgacgagagcaagaattggtacgagagccaggccagctgcatgagccagaatgccagcctgctgaaggtgtacagcaaagaggaccaggacctgctgaaactggtcaagagcgcccactggatgggccttgtgcacatccccaccaatggctcttggcagtgggaggacggcagcattctgagccctaacctgctgaccatcatcgagatgcagaagggcgactgcgccctgtacgccagcagctttaagggctacatcgagaattgcagcaccccgaacacctacatctgtatgcagagaaccgtttctggcggaggcggctctggaggaggcggaagtggcggcggaggcgacctctttaatcaagaagtccagattccactcaccgaatcctactgcggaccttgtccaaaaaattggatttgttataagaacaactgttatcaattctttgatgagtctaaaaattggtatgagtcccaggcttcctgcatgtctcagaacgcttctctgctgaaagtctactctaaagaagatcaggatctcctgaagctcgtcaagtctgcccattggatggggctcgtccacattcctaccaacggaagctggcaatgggaagatggctccatcctgtctccaaatctgctcacgattattgaaatgcagaaaggggattgtgctctctacgccagctccttcaagggatatattgagaactgtagcacgcccaatacttatatctgtatgcaacggaccgtgacgcgtgaggacctgaagaacgtgttcccacctgaggtggccgtgttcgagcctagcgaggccgagatcagccacacccagaaagccaccctcgtgtgcctggctaccggcttctaccccgaccatgtggaactgtcttggtgggtcaacggcaaagaggtgcacagcggcgtgtctaccgacccccagccactgaaagaacagcccgccctgaacgacagccggtactgcctgagcagcagactgagagtgtccgccaccttctggcagaacccccggaaccacttcagatgccaggtgcagttctacggcctgagcgagaacgacgagtggacccaggacagagccaagcccgtgacccagatcgtgtctgccgaagcctggggcagagccgattgcggctttaccagcgagagctaccagcagggcgtgctgagcgccaccaacctgagcgtgatcggcttcagaatcctgctgctgaaagtggccggctttaacctgctgatgaccctgcggctgtggtccagc

SEQ ID NO: 17720 - DNA, 2046 bp, synthetic construct
  source 1..2046: mol_type = other DNA
atggccttaccagtgaccgccttgctcctgccgctggccttgctgctccacgccgccaggccgctcgagatccagaaccctgatcctgccgtgtaccagctgcgggatagcaagagcagcgacaagagcgtgtgtctgttcaccgacttcgacagccagaccaacgtgtcccagagcaaggactccgacgtgtacatcaccgataagaccgtgctggacatgcggagcatggacttcaagagcaactccgccgtggcctggtccaacaagtccgatttcgcctgcgccaacgccttcaacaacagcattatccccgaggacacattcttcccaagccccgagagcagctgcgacgtgaagctggtggaaaagagcttcgagacagacaccaacctgaacttccagatcctgtacgagatcctgctgggcaaggccaccctgtacgccgtgctggtgtctgccctggtgctgatggctatggtcaagcggaaggacagccggggaagggccaagcgatctggatctggagcaacaaacttctcactactcaaacaagcaggtgacgtggaggagaatcccgggcctactagcgccaccatggccttaccagtgaccgccttgctcctgccgctggccttgctgctccacgccgccaggccgctgttcaatcaagaggtgcagatccctctgaccgagagctactgtggcccctgtcctaagaactggatctgctacaagaacaactgctaccagttcttcgacgagagcaagaattggtacgagagccaggccagctgcatgagccagaatgccagcctgctgaaggtgtacagcaaagaggaccaggacctgctgaaactggtcaagagcgcccactggatgggccttgtgcacatccccaccaatggctcttggcagtgggaggacggcagcattctgagccctaacctgctgaccatcatcgagatgcagaagggcgactgcgccctgtacgccagcagctttaagggcttcatcgagaattgcagcaccccgaacacctacatctgtatgcagagaaccgttggcggaggcggaagtggaggcggaggatctggcggcggaggctctgacctctttaatcaagaagtccagattccactcaccgaatcctactgcggaccttgtccaaaaaattggatttgttataagaacaactgttatcaattctttgatgagtctaaaaattggtatgagtcccaggcttcctgcatgtctcagaacgcttctctgctgaaagtctactctaaagaagatcaggatctcctgaagctcgtcaagtctgcccattggatggggctcgtccacattcctaccaacggaagctggcaatgggaagatggctccatcctgtctccaaatctgctcacgattattgaaatgcagaaaggggattgtgctctctacgccagctccttcaagggatttattgagaactgtagcacgcccaatacttatatctgtatgcaacggaccgtgacgcgtgaggacctgaagaacgtgttcccacctgaggtggccgtgttcgagcctagcgaggccgagatcagccacacccagaaagccaccctcgtgtgcctggctaccggcttctaccccgaccatgtggaactgtcttggtgggtcaacggcaaagaggtgcacagcggcgtgtctaccgacccccagccactgaaagaacagcccgccctgaacgacagccggtactgcctgagcagcagactgagagtgtccgccaccttctggcagaacccccggaaccacttcagatgccaggtgcagttctacggcctgagcgagaacgacgagtggacccaggacagagccaagcccgtgacccagatcgtgtctgccgaagcctggggcagagccgattgcggctttaccagcgagagctaccagcagggcgtgctgagcgccaccaacctgagcgtgatcggcttcagaatcctgctgctgaaagtggccggctttaacctgctgatgaccctgcggctgtggtccagc

SEQ ID NO: 17721 - DNA, 2124 bp, synthetic construct
  source 1..2124: mol_type = other DNA
atggccttaccagtgaccgccttgctcctgccgctggccttgctgctccacgccgccaggccgctcgagatccagaaccctgatcctgccgtgtaccagctgcgggatagcaagagcagcgacaagagcgtgtgtctgttcaccgacttcgacagccagaccaacgtgtcccagagcaaggactccgacgtgtacatcaccgataagaccgtgctggacatgcggagcatggacttcaagagcaactccgccgtggcctggtccaacaagtccgatttcgcctgcgccaacgccttcaacaacagcattatccccgaggacacattcttcccaagccccgagagcagctgcgacgtgaagctggtggaaaagagcttcgagacagacaccaacctgaacttccagatcctgtacgagatcctgctgggcaaggccaccctgtacgccgtgctggtgtctgccctggtgctgatggctatggtcaagcggaaggacagccggggaagggccaagcgatctggatctggagcaacaaacttctcactactcaaacaagcaggtgacgtggaggagaatcccgggcctactagcatggccttaccagtgaccgccttgctcctgccgctggccttgctgctccacgccgccaggccgatggaccccgacctggaaatcagagccgccttcctgcggcagagaaacacagccctgagaacagaggtggccgagctggaacaagaggtgcagcggctggaaaacgaggtgtcccagtacgagacaagatacggccctctcggaggcggaaaaggtaccggcggaggcggatctggcggcggaggtagcggtggcggaggatctgaattcgacatccagatgacacagagccctagcagcctgtctgccagcgtgggagacagagtgaccatcacatgcaaggccagcgaccacatcaacaactggctggcctggtatcagcagaagcctggacaggcccctaagctgctgatctacggcgctaccacactggaaacaggcgtgcccagcagattttctggcagcggctctggcaccgactacaccctgacaatatccagcctccagcctgaggacttcgccacctactactgtcagcagagctggaacaccccttggacattcggccagggcaccaagctggaaatcaagagaggcggaggcggaagtggaggcggaggatctggcggcggaggctctcaagttcagcttcaacagcctggcgctgagctggtcaaacctggcgcttctgtgaagatgagctgcaaagccagcggctacgccttcagcagctactggatcaactggatgaagcagaaacccggccagggactcgaatggatcggccaaatctatcccggcgacggcgacaccaactacaacggcaagttcaagggcagagccacactgaccgccgatacctctagcagcacagcctacatgcagctgagcagcctgaccagcgaagatagcgccgtgtacttctgtgcccggtccatcacaacagtcgtgggctgcgctatggactattggggccagggaacaagcgtgaccgtgtctagtacgcgtgaggacctgaagaacgtgttcccacctgaggtggccgtgttcgagcctagcgaggccgagatcagccacacccagaaagccaccctcgtgtgcctggctaccggcttctaccccgaccatgtggaactgtcttggtgggtcaacggcaaagaggtgcacagcggcgtgtctaccgacccccagccactgaaagaacagcccgccctgaacgacagccggtactgcctgagcagcagactgagagtgtccgccaccttctggcagaacccccggaaccacttcagatgccaggtgcagttctacggcctgagcgagaacgacgagtggacccaggacagagccaagcccgtgacccagatcgtgtctgccgaagcctggggcagagccgattgcggctttaccagcgagagctaccagcagggcgtgctgagcgccaccaacctgagcgtgatcggcttcagaatcctgctgctgaaagtggccggctttaacctgctgatgaccctgcggctgtggtccagc

SEQ ID NO: 17722 - DNA, 2829 bp, synthetic construct
  source 1..2829: mol_type = other DNA
atggccttaccagtgaccgccttgctcctgccgctggccttgctgctccacgccgccaggccgctcgagatccagaaccctgatcctgccgtgtaccagctgcgggatagcaagagcagcgacaagagcgtgtgtctgttcaccgacttcgacagccagaccaacgtgtcccagagcaaggactccgacgtgtacatcaccgataagaccgtgctggacatgcggagcatggacttcaagagcaactccgccgtggcctggtccaacaagtccgatttcgcctgcgccaacgccttcaacaacagcattatccccgaggacacattcttcccaagccccgagagcagctgcgacgtgaagctggtggaaaagagcttcgagacagacaccaacctgaacttccagatcctgtacgagatcctgctgggcaaggccaccctgtacgccgtgctggtgtctgccctggtgctgatggctatggtcaagcggaaggacagccggggaagggccaagcgatctggatctggagcaacaaacttctcactactcaaacaagcaggtgacgtggaggagaatcccgggcctactagcatggccttaccagtgaccgccttgctcctgccgctggccttgctgctccacgccgccaggccgctgttcaatcaagaggtgcagatccctctgaccgagagctactgtggcccctgtcctaagaactggatctgctacaagaacaactgctaccagttcttcgacgagagcaagaattggtacgagagccaggccagctgcatgagccagaatgccagcctgctgaaggtgtacagcaaagaggaccaggacctgctgaaactggtcaagagcgcccactggatgggccttgtgcacatccccaccaatggctcttggcagtgggaggacggcagcattctgagccctaacctgctgaccatcatcgagatgcagaagggcgactgcgccctgtacgccagcagctttaagggcttcatcgagaattgcagcaccccgaacacctacatctgtatgcagagaaccgttggcggaggcggaagtggaggcggaggatctggcggcggaggctctgacctctttaatcaagaagtccagattccactcaccgaatcctactgcggaccttgtccaaaaaattggatttgttataagaacaactgttatcaattctttgatgagtctaaaaattggtatgagtcccaggcttcctgcatgtctcagaacgcttctctgctgaaagtctactctaaagaagatcaggatctcctgaagctcgtcaagtctgcccattggatggggctcgtccacattcctaccaacggaagctggcaatgggaagatggctccatcctgtctccaaatctgctcacgattattgaaatgcagaaaggggattgtgctctctacgccagctccttcaagggatttattgagaactgtagcacgcccaatacttatatctgtatgcaacggaccgtgggtaccggcggaggcggatctggcggcggaggtagcggtggcggaggatctgaattcgacatccagatgacacagagccctagcagcctgtctgccagcgtgggagacagagtgaccatcacatgcaaggccagcgaccacatcaacaactggctggcctggtatcagcagaagcctggacaggcccctaagctgctgatctacggcgctaccacactggaaacaggcgtgcccagcagattttctggcagcggctctggcaccgactacaccctgacaatatccagcctccagcctgaggacttcgccacctactactgtcagcagagctggaacaccccttggacattcggccagggcaccaagctggaaatcaagagaggcggaggcggaagtggaggcggaggatctggcggcggaggctctcaagttcagcttcaacagcctggcgctgagctggtcaaacctggcgcttctgtgaagatgagctgcaaagccagcggctacgccttcagcagctactggatcaactggatgaagcagaaacccggccagggactcgaatggatcggccaaatctatcccggcgacggcgacaccaactacaacggcaagttcaagggcagagccacactgaccgccgatacctctagcagcacagcctacatgcagctgagcagcctgaccagcgaagatagcgccgtgtacttctgtgcccggtccatcacaacagtcgtgggctgcgctatggactattggggccagggaacaagcgtgaccgtgtctagtacgcgtgaggacctgaagaacgtgttcccacctgaggtggccgtgttcgagcctagcgaggccgagatcagccacacccagaaagccaccctcgtgtgcctggctaccggcttctaccccgaccatgtggaactgtcttggtgggtcaacggcaaagaggtgcacagcggcgtgtctaccgacccccagccactgaaagaacagcccgccctgaacgacagccggtactgcctgagcagcagactgagagtgtccgccaccttctggcagaacccccggaaccacttcagatgccaggtgcagttctacggcctgagcgagaacgacgagtggacccaggacagagccaagcccgtgacccagatcgtgtctgccgaagcctggggcagagccgattgcggctttaccagcgagagctaccagcagggcgtgctgagcgccaccaacctgagcgtgatcggcttcagaatcctgctgctgaaagtggccggctttaacctgctgatgaccctgcggctgtggtccagc

SEQ ID NO: 17723 - DNA, 1944 bp, synthetic construct
  source 1..1944: mol_type = other DNA
atggccttaccagtgaccgccttgctcctgccgctggccttgctgctccacgccgccaggccgctcgagatccagaaccctgatcctgccgtgtaccagctgcgggatagcaagagcagcgacaagagcgtgtgtctgttcaccgacttcgacagccagaccaacgtgtcccagagcaaggactccgacgtgtacatcaccgataagaccgtgctggacatgcggagcatggacttcaagagcaactccgccgtggcctggtccaacaagtccgatttcgcctgcgccaacgccttcaacaacagcattatccccgaggacacattcttcccaagccccgagagcagctgcgacgtgaagctggtggaaaagagcttcgagacagacaccaacctgaacttccagatcctgtacgagatcctgctgggcaaggccaccctgtacgccgtgctggtgtctgccctggtgctgatggctatggtcaagcggaaggacagccggggaagggccaagcgatctggatctggagcaacaaacttctcactactcaaacaagcaggtgacgtggaggagaatcccgggcctactagcatggccttaccagtgaccgccttgctcctgccgctggccttgctgctccacgccgccaggccgcagtctgtgctgacacagcctcctagtgtgtctggcgctcctggacagagagtgaccatctcttgtaccggcagcagcagcaatatcggagccggctatgacgtgcactggtatcagcagctccctggcacagcccctaaactgctgatcttcggcaacagcaacagacccagcggcgtgcccgatagattcagcggctttaagagcggcacaagcgccagcctggctatcactggactgcaagccgaggacgaggccgactacttctgccagagctacgatagcagcctgagcggcagcggagtgtttggcacaggcaccaaagtgacagtgcttggcggcggaggcggaagtggaggcggaggatctggcggcggaggctctcaaatgcaactggttcaaagcggcggtggcctggtgcaacctggaagaagtctgagactgagctgtgccgccagcggcttcaccttcgatgattacgccatgcactgggtccgacaggcccctggaaaaggactggaatgggtgtccggcatctcctggaatagcggctctatcggctacgccgacagcgtgaagggcagattcaccatcagccgggacaacgccaagaacagcctgtacctccagatgaactccctgagagccgaggatacagccctgtactactgcgccaaggacatccacagcggcagctactacggcctgctgtactacgctatggacgtgtggggccagggcacaaccgtgacagtttcttctacgcgtgaggacctgaagaacgtgttcccacctgaggtggccgtgttcgagcctagcgaggccgagatcagccacacccagaaagccaccctcgtgtgcctggctaccggcttctaccccgaccatgtggaactgtcttggtgggtcaacggcaaagaggtgcacagcggcgtgtctaccgacccccagccactgaaagaacagcccgccctgaacgacagccggtactgcctgagcagcagactgagagtgtccgccaccttctggcagaacccccggaaccacttcagatgccaggtgcagttctacggcctgagcgagaacgacgagtggacccaggacagagccaagcccgtgacccagatcgtgtctgccgaagcctggggcagagccgattgcggctttaccagcgagagctaccagcagggcgtgctgagcgccaccaacctgagcgtgatcggcttcagaatcctgctgctgaaagtggccggctttaacctgctgatgaccctgcggctgtggtccagc

SEQ ID NO: 17724 - DNA, 1455 bp, synthetic construct
  source 1..1455: mol_type = other DNA
atggccttaccagtgaccgccttgctcctgccgctggccttgctgctccacgccgccaggccgctcgagatccagaaccctgatcctgccgtgtaccagctgcgggatagcaagagcagcgacaagagcgtgtgtctgttcaccgacttcgacagccagaccaacgtgtcccagagcaaggactccgacgtgtacatcaccgataagaccgtgctggacatgcggagcatggacttcaagagcaactccgccgtggcctggtccaacaagtccgatttcgcctgcgccaacgccttcaacaacagcattatccccgaggacacattcttcccaagccccgagagcagctgcgacgtgaagctggtggaaaagagcttcgagacagacaccaacctgaacttccagatcctgtacgagatcctgctgggcaaggccaccctgtacgccgtgctggtgtctgccctggtgctgatggctatggtcaagcggaaggacagccggggaagggccaagcgatctggatctggagcaacaaacttctcactactcaaacaagcaggtgacgtggaggagaatcccgggcctactagcatggccttaccagtgaccgccttgctcctgccgctggccttgctgctccacgccgccaggccgatgtgtatgccctgcttcaccaccgaccatcagatggcccggaagtgcgacgattgctgtggcggaaaaggcagaggcaagtgctacggccctcagtgcttgtgtagactcgagggcggaggcggaagtggaggcggaggatctggcggcggaggctctttcgaagtgtgtatgccttgttttaccacggatcaacaaatggctcgcaagtgttctgactgctgcggaggcaaaggccggggaaagtgttatggcccacagtgtctgtgccggacgcgtgaggacctgaagaacgtgttcccacctgaggtggccgtgttcgagcctagcgaggccgagatcagccacacccagaaagccaccctcgtgtgcctggctaccggcttctaccccgaccatgtggaactgtcttggtgggtcaacggcaaagaggtgcacagcggcgtgtctaccgacccccagccactgaaagaacagcccgccctgaacgacagccggtactgcctgagcagcagactgagagtgtccgccaccttctggcagaacccccggaaccacttcagatgccaggtgcagttctacggcctgagcgagaacgacgagtggacccaggacagagccaagcccgtgacccagatcgtgtctgccgaagcctggggcagagccgattgcggctttaccagcgagagctaccagcagggcgtgctgagcgccaccaacctgagcgtgatcggcttcagaatcctgctgctgaaagtggccggctttaacctgctgatgaccctgcggctgtggtccagc

SEQ ID NO: 17725 - DNA, 2085 bp, synthetic construct
  source 1..2085: mol_type = other DNA
atggccttaccagtgaccgccttgctcctgccgctggccttgctgctccacgccgccaggccgctcgagatccagaaccctgatcctgccgtgtaccagctgcgggatagcaagagcagcgacaagagcgtgtgtctgttcaccgacttcgacagccagaccaacgtgtcccagagcaaggactccgacgtgtacatcaccgataagaccgtgctggacatgcggagcatggacttcaagagcaactccgccgtggcctggtccaacaagtccgatttcgcctgcgccaacgccttcaacaacagcattatccccgaggacacattcttcccaagccccgagagcagctgcgacgtgaagctggtggaaaagagcttcgagacagacaccaacctgaacttccagatcctgtacgagatcctgctgggcaaggccaccctgtacgccgtgctggtgtctgccctggtgctgatggctatggtcaagcggaaggacagccggggaagggccaagcgatctggatctggagcaacaaacttctcactactcaaacaagcaggtgacgtggaggagaatcccgggcctactagcatggccttaccagtgaccgccttgctcctgccgctggccttgctgctccacgccgccaggccgttcgaagtgtgtatgccttgttttaccacggatcaacaaatggctcgcaagtgttctgactgctgcggaggcaaaggccggggaaagtgttatggcccacagtgtctgtgccggggtaccggcggaggcggatctggcggcggaggtagcggtggcggaggatctgaattcgacatccagatgacacagagccctagcagcctgtctgccagcgtgggagacagagtgaccatcacatgcaaggccagcgaccacatcaacaactggctggcctggtatcagcagaagcctggacaggcccctaagctgctgatctacggcgctaccacactggaaacaggcgtgcccagcagattttctggcagcggctctggcaccgactacaccctgacaatatccagcctccagcctgaggacttcgccacctactactgtcagcagagctggaacaccccttggacattcggccagggcaccaagctggaaatcaagagaggcggaggcggaagtggaggcggaggatctggcggcggaggctctcaagttcagcttcaacagcctggcgctgagctggtcaaacctggcgcttctgtgaagatgagctgcaaagccagcggctacgccttcagcagctactggatcaactggatgaagcagaaacccggccagggactcgaatggatcggccaaatctatcccggcgacggcgacaccaactacaacggcaagttcaagggcagagccacactgaccgccgatacctctagcagcacagcctacatgcagctgagcagcctgaccagcgaagatagcgccgtgtacttctgtgcccggtccatcacaacagtcgtgggctgcgctatggactattggggccagggaacaagcgtgaccgtgtctagtacgcgtgaggacctgaagaacgtgttcccacctgaggtggccgtgttcgagcctagcgaggccgagatcagccacacccagaaagccaccctcgtgtgcctggctaccggcttctaccccgaccatgtggaactgtcttggtgggtcaacggcaaagaggtgcacagcggcgtgtctaccgacccccagccactgaaagaacagcccgccctgaacgacagccggtactgcctgagcagcagactgagagtgtccgccaccttctggcagaacccccggaaccacttcagatgccaggtgcagttctacggcctgagcgagaacgacgagtggacccaggacagagccaagcccgtgacccagatcgtgtctgccgaagcctggggcagagccgattgcggctttaccagcgagagctaccagcagggcgtgctgagcgccaccaacctgagcgtgatcggcttcagaatcctgctgctgaaagtggccggctttaacctgctgatgaccctgcggctgtggtccagc

SEQ ID NO: 17726 - DNA, 2475 bp, synthetic construct
  source 1..2475: mol_type = other DNA
atggccttaccagtgaccgccttgctcctgccgctggccttgctgctccacgccgccaggccgctcgagatccagaaccctgatcctgccgtgtaccagctgcgggatagcaagagcagcgacaagagcgtgtgtctgttcaccgacttcgacagccagaccaacgtgtcccagagcaaggactccgacgtgtacatcaccgataagaccgtgctggacatgcggagcatggacttcaagagcaactccgccgtggcctggtccaacaagtccgatttcgcctgcgccaacgccttcaacaacagcattatccccgaggacacattcttcccaagccccgagagcagctgcgacgtgaagctggtggaaaagagcttcgagacagacaccaacctgaacttccagatcctgtacgagatcctgctgggcaaggccaccctgtacgccgtgctggtgtctgccctggtgctgatggctatggtcaagcggaaggacagccggggaagggccaagcgatctggatctggagcaacaaacttctcactactcaaacaagcaggtgacgtggaggagaatcccgggcctactagcatggccttaccagtgaccgccttgctcctgccgctggccttgctgctccacgccgccaggccgttcgaaagccccgtagctcctgcctgtgaccccagactcctaaataaactgctgcgtgactcccacctccttcacagccgactgagtcagtgtcccgacgtggaccctttgtctatccctgttctgctgcctgctgtggactttagcctgggagaatggaaaacccagacggaacagagcaaggcacaggacattctaggggcagtgtcccttctactggagggagtgatggcagcacgaggacagttggaaccctcctgcctctcatccctcctgggacagctttctgggcaggttcgcctcctcttgggggccctgcagggcctcctaggaacccagcttcctctacagggcaggaccacagctcacaaggaccccaatgccctcttcttgagcttgcaacaactgcttcggggaaaggtgcgcttcctgcttctggtagaaggtcccaccctctgtgtcagacggaccctgccaaccacagctgtcccaagcagtacttctggtaccggcggaggcggatctggcggcggaggtagcggtggcggaggatctgaattcgacatccagatgacacagagccctagcagcctgtctgccagcgtgggagacagagtgaccatcacatgcaaggccagcgaccacatcaacaactggctggcctggtatcagcagaagcctggacaggcccctaagctgctgatctacggcgctaccacactggaaacaggcgtgcccagcagattttctggcagcggctctggcaccgactacaccctgacaatatccagcctccagcctgaggacttcgccacctactactgtcagcagagctggaacaccccttggacattcggccagggcaccaagctggaaatcaagagaggcggaggcggaagtggaggcggaggatctggcggcggaggctctcaagttcagcttcaacagcctggcgctgagctggtcaaacctggcgcttctgtgaagatgagctgcaaagccagcggctacgccttcagcagctactggatcaactggatgaagcagaaacccggccagggactcgaatggatcggccaaatctatcccggcgacggcgacaccaactacaacggcaagttcaagggcagagccacactgaccgccgatacctctagcagcacagcctacatgcagctgagcagcctgaccagcgaagatagcgccgtgtacttctgtgcccggtccatcacaacagtcgtgggctgcgctatggactattggggccagggaacaagcgtgaccgtgtctagtacgcgtgaggacctgaagaacgtgttcccacctgaggtggccgtgttcgagcctagcgaggccgagatcagccacacccagaaagccaccctcgtgtgcctggctaccggcttctaccccgaccatgtggaactgtcttggtgggtcaacggcaaagaggtgcacagcggcgtgtctaccgacccccagccactgaaagaacagcccgccctgaacgacagccggtactgcctgagcagcagactgagagtgtccgccaccttctggcagaacccccggaaccacttcagatgccaggtgcagttctacggcctgagcgagaacgacgagtggacccaggacagagccaagcccgtgacccagatcgtgtctgccgaagcctggggcagagccgattgcggctttaccagcgagagctaccagcagggcgtgctgagcgccaccaacctgagcgtgatcggcttcagaatcctgctgctgaaagtggccggctttaacctgctgatgaccctgcggctgtggtccagc

SEQ ID NO: 17727 - DNA, 2196 bp, synthetic construct
  source 1..2196: mol_type = other DNA
atggccttaccagtgaccgccttgctcctgccgctggccttgctgctccacgccgccaggccgctcgagatccagaaccctgatcctgccgtgtaccagctgcgggatagcaagagcagcgacaagagcgtgtgtctgttcaccgacttcgacagccagaccaacgtgtcccagagcaaggactccgacgtgtacatcaccgataagaccgtgctggacatgcggagcatggacttcaagagcaactccgccgtggcctggtccaacaagtccgatttcgcctgcgccaacgccttcaacaacagcattatccccgaggacacattcttcccaagccccgagagcagctgcgacgtgaagctggtggaaaagagcttcgagacagacaccaacctgaacttccagatcctgtacgagatcctgctgggcaaggccaccctgtacgccgtgctggtgtctgccctggtgctgatggctatggtcaagcggaaggacagccggggaagggccaagcgatctggatctggagcaacaaacttctcactactcaaacaagcaggtgacgtggaggagaatcccgggcctactagcatggccttaccagtgaccgccttgctcctgccgctggccttgctgctccacgccgccaggccgttcgaaatgggcagctgggaagagttcgagctgagactgaacgccatcgaggaacggctgtatgccctcggaggatctgaagccgagctggcctacttcgagtacgtgatcgccgacttcgagggcaacctgcagcggtacaaaggcaagggcaaccctgaagtggaagccctgtacttcgaggccgacgccatcttcgaggaactggtggcctacagacacaacggtaccggcggaggcggatctggcggcggaggtagcggtggcggaggatctgaattcgacatccagatgacacagagccctagcagcctgtctgccagcgtgggagacagagtgaccatcacatgcaaggccagcgaccacatcaacaactggctggcctggtatcagcagaagcctggacaggcccctaagctgctgatctacggcgctaccacactggaaacaggcgtgcccagcagattttctggcagcggctctggcaccgactacaccctgacaatatccagcctccagcctgaggacttcgccacctactactgtcagcagagctggaacaccccttggacattcggccagggcaccaagctggaaatcaagagaggcggaggcggaagtggaggcggaggatctggcggcggaggctctcaagttcagcttcaacagcctggcgctgagctggtcaaacctggcgcttctgtgaagatgagctgcaaagccagcggctacgccttcagcagctactggatcaactggatgaagcagaaacccggccagggactcgaatggatcggccaaatctatcccggcgacggcgacaccaactacaacggcaagttcaagggcagagccacactgaccgccgatacctctagcagcacagcctacatgcagctgagcagcctgaccagcgaagatagcgccgtgtacttctgtgcccggtccatcacaacagtcgtgggctgcgctatggactattggggccagggaacaagcgtgaccgtgtctagtacgcgtgaggacctgaagaacgtgttcccacctgaggtggccgtgttcgagcctagcgaggccgagatcagccacacccagaaagccaccctcgtgtgcctggctaccggcttctaccccgaccatgtggaactgtcttggtgggtcaacggcaaagaggtgcacagcggcgtgtctaccgacccccagccactgaaagaacagcccgccctgaacgacagccggtactgcctgagcagcagactgagagtgtccgccaccttctggcagaacccccggaaccacttcagatgccaggtgcagttctacggcctgagcgagaacgacgagtggacccaggacagagccaagcccgtgacccagatcgtgtctgccgaagcctggggcagagccgattgcggctttaccagcgagagctaccagcagggcgtgctgagcgccaccaacctgagcgtgatcggcttcagaatcctgctgctgaaagtggccggctttaacctgctgatgaccctgcggctgtggtccagc

SEQ ID NO: 17728 - DNA, 2610 bp, synthetic construct
  source 1..2610: mol_type = other DNA
atggccttaccagtgaccgccttgctcctgccgctggccttgctgctccacgccgccaggccgctcgaggaggacctgaagaacgtgttcccacctgaggtggccgtgttcgagcctagcgaggccgagatcagccacacccagaaagccaccctcgtgtgcctggctaccggcttctaccccgaccatgtggaactgtcttggtgggtcaacggcaaagaggtgcacagcggcgtgtgtaccgacccccagccactgaaagaacagcccgccctgaacgacagccggtactgcctgagcagcagactgagagtgtccgccaccttctggcagaacccccggaaccacttcagatgccaggtgcagttctacggcctgagcgagaacgacgagtggacccaggacagagccaagcccgtgacccagatcgtgtctgccgaagcctggggcagagccgattgcgacgtgaagctggtggaaaagagcttcgagacagacaccaacctgaacttccagaacctgagcgtgatcggcttcagaatcctgctgctgaaagtggccggctttaacctgctgatgaccctgcggctgtggtccagcagggccaagcgatctggatctggagcaacaaacttctcactactcaaacaagcaggtgacgtggaggagaatcccgggcctactagcatggccttaccagtgaccgccttgctcctgccgctggccttgctgctccacgccgccaggccggacatccagatgacacagactacatcctccctgtctgcctctctgggagacagagtcaccatcagttgcagggcaagtcaggacattagtaaatatttaaattggtatcagcagaaaccagatggaactgttaaactcctgatctaccatacatcaagattacactcaggagtcccatcaaggttcagtggcagtgggtctggaacagattattctctcaccattagcaacctggagcaagaagatattgccacttacttttgccaacagggtaatacgcttccgtacacgttcggaggggggaccaagctggagatcacaggtggcggtggctcgggcggtggtgggtcgggtggcggcggatctgaggtgaaactgcaggagtcaggacctggcctggtggcgccctcacagagcctgtccgtcacatgcactgtctcaggggtctcattacccgactatggtgtaagctggattcgccagcctccacgaaagggtctggagtggctgggagtaatatggggtagtgaaaccacatactataattcagctctcaaatccagactgaccatcatcaaggacaactccaagagccaagttttcttaaaaatgaacagtctgcaaactgatgacacagccatttactactgtgccaaacattattactacggtggtagctatgctatggactactggggtcaaggaacctcagtcaccgtctcctcaacgcgtatccagaaccctgatcctgccgtgtaccagctgcgggatagcaagagcagcgacaagagcgtgtgtctgttcaccgacttcgacagccagaccaacgtgtcccagagcaaggactccgacgtgtacatcaccgataagtgcgtgctggacatgcggagcatggacttcaagagcaactccgccgtggcctggtccaacaagtccgatttcgcctgcgccaacgccttcaacaacagcattatccccgaggacacattcttcccaagccccgagagcagctgcggctttaccagcgagagctaccagcagggcgtgctgagcgccaccatcctgtacgagatcctgctgggcaaggccaccctgtacgccgtgctggtgtctgccctggtgctgatggctatggtcaagcggaaggacagccggggacgcgccaagagaagcggatctggcgtgaagcagaccctgaatttcgacctgctgaagctggctggcgacgtggaatccaacccaggcccttctagaggccatatgaccgagtacaagcccacggtgcgcctcgccacccgcgacgacgtccccagggccgtacgcaccctcgccgccgcgttcgccgactaccccgccacgcgccacaccgtcgatccggaccgccacatcgagcgggtcaccgagctgcaagaactcttcctcacgcgcgtcgggctcgacatcggcaaggtgtgggtcgcggacgacggcgccgcggtggcggtctggaccacgccggagagcgtcgaagcgggggcggtgttcgccgagatcggcccgcgcatggccgagttgagcggttcccggctggccgcgcagcaacagatggaaggcctcctggcgccgcaccggcccaaggagcccgcgtggttcctggccaccgtcggcgtctcgcccgaccaccagggcaagggtctgggcagcgccgtcgtgctccccggagtggaggcggccgagcgcgccggggtgcccgccttcctggagacctccgcgccccgcaacctccccttctacgagcggctcggcttcaccgtcaccgccgacgtcgaggtgcccgaaggaccgcgcacctggtgcatgacccgcaagcccggtgcctga

SEQ ID NO: 17729 - DNA, 2613 bp, synthetic construct
  source 1..2613: mol_type = other DNA
atggccttaccagtgaccgccttgctcctgccgctggccttgctgctccacgccgccaggccgctcgaggaggacctgaagaacgtgttcccacctgaggtggccgtgttcgagcctagcgaggccgagatcagccacacccagaaagccaccctcgtgtgcctggctaccggcttctaccccgaccatgtggaactgtcttggtgggtcaacggcaaagaggtgcacagcggcgtgtgtaccgacccccagccactgaaagaacagcccgccctgaacgacagccggtactgcctgagcagcagactgagagtgtccgccaccttctggcagaacccccggaaccacttcagatgccaggtgcagttctacggcctgagcgagaacgacgagtggacccaggacagagccaagcccgtgacccagatcgtgtctgccgaagcctggggcagagccgattgcgacgtgaagctggtggaaaagagcttcgagacagacaccaacctgaacttccagaacctgagcgtgatcggcttcagaatcctgctgctgaaagtggccggctttaacctgctgatgaccctgcggctgtggtccagcagggccaagcgatctggatctggagcaacaaacttctcactactcaaacaagcaggtgacgtggaggagaatcccgggcctactagcaccatggccttaccagtgaccgccttgctcctgccgctggccttgctgctccacgccgccaggccggagatcgtgatgacccagagccctgccaccctgtctctgagccctggcgaaagagccaccctgagctgtagagccagccaggacatcagcaagtacctgaactggtatcagcagaagcccggccaggcccccagactgctgatctaccacaccagcagactgcacagcggcatccccgccagattttctggctctggcagcggcaccgactacaccctgacaatcagcagcctccagcccgaggacttcgccgtgtacttctgtcagcaaggcaacaccctgccctacaccttcggccagggcaccaagctggaaatcaagggcggaggcggaagtggaggcggaggatctggcggcggaggctctcaggtgcaactccaggaatctggccctggcctcgtgaagcccagcgagacactgagcctgacctgtaccgtgtccggcgtgtccctgcctgactatggcgtgtcctggatcagacagccccctggcaagggcctggaatggatcggagtgatttggggcagcgaaaccacctactacaacagctccctgaagtccagagtgaccatctccaaggacaactccaagaaccaggtgtccctgaagctgagcagcgtgacagccgccgacaccgccgtgtattactgcgccaagcactactactacggcggcagctacgctatggactactggggccagggaaccctcgtgaccgtgtctagtacgcgtatccagaaccctgatcctgccgtgtaccagctgcgggatagcaagagcagcgacaagagcgtgtgtctgttcaccgacttcgacagccagaccaacgtgtcccagagcaaggactccgacgtgtacatcaccgataagtgcgtgctggacatgcggagcatggacttcaagagcaactccgccgtggcctggtccaacaagtccgatttcgcctgcgccaacgccttcaacaacagcattatccccgaggacacattcttcccaagccccgagagcagctgcggctttaccagcgagagctaccagcagggcgtgctgagcgccaccatcctgtacgagatcctgctgggcaaggccaccctgtacgccgtgctggtgtctgccctggtgctgatggctatggtcaagcggaaggacagccggggacgcgccaagagaagcggatctggcgtgaagcagaccctgaatttcgacctgctgaagctggctggcgacgtggaatccaacccaggcccttctagaggccatatgaccgagtacaagcccacggtgcgcctcgccacccgcgacgacgtccccagggccgtacgcaccctcgccgccgcgttcgccgactaccccgccacgcgccacaccgtcgatccggaccgccacatcgagcgggtcaccgagctgcaagaactcttcctcacgcgcgtcgggctcgacatcggcaaggtgtgggtcgcggacgacggcgccgcggtggcggtctggaccacgccggagagcgtcgaagcgggggcggtgttcgccgagatcggcccgcgcatggccgagttgagcggttcccggctggccgcgcagcaacagatggaaggcctcctggcgccgcaccggcccaaggagcccgcgtggttcctggccaccgtcggcgtctcgcccgaccaccagggcaagggtctgggcagcgccgtcgtgctccccggagtggaggcggccgagcgcgccggggtgcccgccttcctggagacctccgcgccccgcaacctccccttctacgagcggctcggcttcaccgtcaccgccgacgtcgaggtgcccgaaggaccgcgcacctggtgcatgacccgcaagcccggtgcctga

SEQ ID NO: 17730 - DNA, 2616 bp, synthetic construct
  source 1..2616: mol_type = other DNA
atggccttaccagtgaccgccttgctcctgccgctggccttgctgctccacgccgccaggccgctcgaggaggacctgaagaacgtgttcccacctgaggtggccgtgttcgagcctagcgaggccgagatcagccacacccagaaagccaccctcgtgtgcctggctaccggcttctaccccgaccatgtggaactgtcttggtgggtcaacggcaaagaggtgcacagcggcgtgtgtaccgacccccagccactgaaagaacagcccgccctgaacgacagccggtactgcctgagcagcagactgagagtgtccgccaccttctggcagaacccccggaaccacttcagatgccaggtgcagttctacggcctgagcgagaacgacgagtggacccaggacagagccaagcccgtgacccagatcgtgtctgccgaagcctggggcagagccgattgcgacgtgaagctggtggaaaagagcttcgagacagacaccaacctgaacttccagaacctgagcgtgatcggcttcagaatcctgctgctgaaagtggccggctttaacctgctgatgaccctgcggctgtggtccagcagggccaagcgatctggatctggagcaacaaacttctcactactcaaacaagcaggtgacgtggaggagaatcccgggcctactagcaccatggccttaccagtgaccgccttgctcctgccgctggccttgctgctccacgccgccaggccggacgagatcgtgctgacacagagccccgccaccctgtcactgtctccaggcgaaagagccaccctgagctgtagcgccagcagcagcgtgtcctacatgcactggtatcagcagaagcccggccaggcccccagactgctgatctacgataccagcaagctggcctccggcatccccgccagattttctggcagcggctccggcaccgacttcaccctgacaatcagcagcctggaacccgaggacgtggccgtgtactactgttttcaaggcagcgtgtaccccttcaccttcggccagggcaccaagctggaaatcaagagaggtggcggtggctcgggcggtggtgggtcgggtggcggcggatctcaggtgcagctccaggaatctggccctggcctcgtgaagcctagccagaccctgagcctgacctgtaccgtgtctggcggcagcatcagcacaagcggcatgggcgtgggctggatcagacagcaccctggcaagggcctggaatggatcggccacatttggtgggacgacgacaagcggtacaaccccgccctgaagtccagagtgaccatcagcgtggacaccagcaagaaccagttcagcctgaagctgagcagcgtgacagccgccgataccgccgtgtattattgcgcccggatggaactgtggtcctactacttcgactactggggccagggaaccctcgtgaccgtgtctagtacgcgtatccagaaccctgatcctgccgtgtaccagctgcgggatagcaagagcagcgacaagagcgtgtgtctgttcaccgacttcgacagccagaccaacgtgtcccagagcaaggactccgacgtgtacatcaccgataagtgcgtgctggacatgcggagcatggacttcaagagcaactccgccgtggcctggtccaacaagtccgatttcgcctgcgccaacgccttcaacaacagcattatccccgaggacacattcttcccaagccccgagagcagctgcggctttaccagcgagagctaccagcagggcgtgctgagcgccaccatcctgtacgagatcctgctgggcaaggccaccctgtacgccgtgctggtgtctgccctggtgctgatggctatggtcaagcggaaggacagccggggacgcgccaagagaagcggatctggcgtgaagcagaccctgaatttcgacctgctgaagctggctggcgacgtggaatccaacccaggcccttctagaggccatatgaccgagtacaagcccacggtgcgcctcgccacccgcgacgacgtccccagggccgtacgcaccctcgccgccgcgttcgccgactaccccgccacgcgccacaccgtcgatccggaccgccacatcgagcgggtcaccgagctgcaagaactcttcctcacgcgcgtcgggctcgacatcggcaaggtgtgggtcgcggacgacggcgccgcggtggcggtctggaccacgccggagagcgtcgaagcgggggcggtgttcgccgagatcggcccgcgcatggccgagttgagcggttcccggctggccgcgcagcaacagatggaaggcctcctggcgccgcaccggcccaaggagcccgcgtggttcctggccaccgtcggcgtctcgcccgaccaccagggcaagggtctgggcagcgccgtcgtgctccccggagtggaggcggccgagcgcgccggggtgcccgccttcctggagacctccgcgccccgcaacctccccttctacgagcggctcggcttcaccgtcaccgccgacgtcgaggtgcccgaaggaccgcgcacctggtgcatgacccgcaagcccggtgcctga

SEQ ID NO: 17731 - DNA, 2604 bp, synthetic construct
  source 1..2604: mol_type = other DNA
atggccttaccagtgaccgccttgctcctgccgctggccttgctgctccacgccgccaggccgctcgaggaggacctgaagaacgtgttcccacctgaggtggccgtgttcgagcctagcgaggccgagatcagccacacccagaaagccaccctcgtgtgcctggctaccggcttctaccccgaccatgtggaactgtcttggtgggtcaacggcaaagaggtgcacagcggcgtgtgtaccgacccccagccactgaaagaacagcccgccctgaacgacagccggtactgcctgagcagcagactgagagtgtccgccaccttctggcagaacccccggaaccacttcagatgccaggtgcagttctacggcctgagcgagaacgacgagtggacccaggacagagccaagcccgtgacccagatcgtgtctgccgaagcctggggcagagccgattgcgacgtgaagctggtggaaaagagcttcgagacagacaccaacctgaacttccagaacctgagcgtgatcggcttcagaatcctgctgctgaaagtggccggctttaacctgctgatgaccctgcggctgtggtccagcagggccaagcgatctggatctggagcaacaaacttctcactactcaaacaagcaggtgacgtggaggagaatcccgggcctactagcatggccttaccagtgaccgccttgctcctgccgctggccttgctgctccacgccgccaggccggacatccagatgacacagagccctagcagcctgtctgccagcgtgggagacagagtgaccatcacctgtagagccagccaggacatcagcaactacctgaactggtatcagcagaagcccggcaaggcccctaagctgctgatctactacaccagcagactgcacagcggcgtgcccagcagattttctggctctggcagcggcaccgacttcaccctgacaatatctagcctccagcctgaggacttcgccacctactattgccagcagggcaacaccctgccttacacatttggacagggcaccaaggtggaaatcaagagaggcggaggcggaagtggaggcggaggatctggcggcggaggctctgaagtgcagctggttgaatcaggtggcggcctggttcaacctggcggatctctgagactgagctgtgccgccagcggcttcaccttcagcgactactttatgagctgggtccgacaggcccctggcaaaggacttgaatgggtcgccaccatcagcaatggcggcacctacacttactaccccgacagcgtgaagggcagattcaccatctccagagacaacagcaagaacaccctgtacctccagatgaactccctgagagccgaggacaccgccgtgtactactgcgccagattcgacggctacatcttcgactattggggccagggcaccctggtcacagtctcttctacgcgtatccagaaccctgatcctgccgtgtaccagctgcgggatagcaagagcagcgacaagagcgtgtgtctgttcaccgacttcgacagccagaccaacgtgtcccagagcaaggactccgacgtgtacatcaccgataagtgcgtgctggacatgcggagcatggacttcaagagcaactccgccgtggcctggtccaacaagtccgatttcgcctgcgccaacgccttcaacaacagcattatccccgaggacacattcttcccaagccccgagagcagctgcggctttaccagcgagagctaccagcagggcgtgctgagcgccaccatcctgtacgagatcctgctgggcaaggccaccctgtacgccgtgctggtgtctgccctggtgctgatggctatggtcaagcggaaggacagccggggacgcgccaagagaagcggatctggcgtgaagcagaccctgaatttcgacctgctgaagctggctggcgacgtggaatccaacccaggcccttctagaggccatatgaccgagtacaagcccacggtgcgcctcgccacccgcgacgacgtccccagggccgtacgcaccctcgccgccgcgttcgccgactaccccgccacgcgccacaccgtcgatccggaccgccacatcgagcgggtcaccgagctgcaagaactcttcctcacgcgcgtcgggctcgacatcggcaaggtgtgggtcgcggacgacggcgccgcggtggcggtctggaccacgccggagagcgtcgaagcgggggcggtgttcgccgagatcggcccgcgcatggccgagttgagcggttcccggctggccgcgcagcaacagatggaaggcctcctggcgccgcaccggcccaaggagcccgcgtggttcctggccaccgtcggcgtctcgcccgaccaccagggcaagggtctgggcagcgccgtcgtgctccccggagtggaggcggccgagcgcgccggggtgcccgccttcctggagacctccgcgccccgcaacctccccttctacgagcggctcggcttcaccgtcaccgccgacgtcgaggtgcccgaaggaccgcgcacctggtgcatgacccgcaagcccggtgcctga

SEQ ID NO: 17732 - DNA, 2616 bp, synthetic construct
  source 1..2616: mol_type = other DNA
atggccttaccagtgaccgccttgctcctgccgctggccttgctgctccacgccgccaggccgctcgaggaggacctgaagaacgtgttcccacctgaggtggccgtgttcgagcctagcgaggccgagatcagccacacccagaaagccaccctcgtgtgcctggctaccggcttctaccccgaccatgtggaactgtcttggtgggtcaacggcaaagaggtgcacagcggcgtgtgtaccgacccccagccactgaaagaacagcccgccctgaacgacagccggtactgcctgagcagcagactgagagtgtccgccaccttctggcagaacccccggaaccacttcagatgccaggtgcagttctacggcctgagcgagaacgacgagtggacccaggacagagccaagcccgtgacccagatcgtgtctgccgaagcctggggcagagccgattgcgacgtgaagctggtggaaaagagcttcgagacagacaccaacctgaacttccagaacctgagcgtgatcggcttcagaatcctgctgctgaaagtggccggctttaacctgctgatgaccctgcggctgtggtccagcagggccaagcgatctggatctggagcaacaaacttctcactactcaaacaagcaggtgacgtggaggagaatcccgggcctactagcatggccttaccagtgaccgccttgctcctgccgctggccttgctgctccacgccgccaggccggacatccagatgacacagagccctagcagcctgtctgccagcgtgggagacagagtgaccatcacatgcaaggccagcgaccacatcaacaactggctggcctggtatcagcagaagcctggacaggcccctaagctgctgatctacggcgctaccacactggaaacaggcgtgcccagcagattttctggcagcggctctggcaccgactacaccctgacaatatccagcctccagcctgaggacttcgccacctactactgtcagcagagctggaacaccccttggacattcggccagggcaccaagctggaaatcaagagaggcggaggcggaagtggaggcggaggatctggcggcggaggctctcaagttcagcttcaacagcctggcgctgagctggtcaaacctggcgcttctgtgaagatgagctgcaaagccagcggctacgccttcagcagctactggatcaactggatgaagcagaaacccggccagggactcgaatggatcggccaaatctatcccggcgacggcgacaccaactacaacggcaagttcaagggcagagccacactgaccgccgatacctctagcagcacagcctacatgcagctgagcagcctgaccagcgaagatagcgccgtgtacttctgtgcccggtccatcacaacagtcgtgggctgcgctatggactattggggccagggaacaagcgtgaccgtgtctagtacgcgtatccagaaccctgatcctgccgtgtaccagctgcgggatagcaagagcagcgacaagagcgtgtgtctgttcaccgacttcgacagccagaccaacgtgtcccagagcaaggactccgacgtgtacatcaccgataagtgcgtgctggacatgcggagcatggacttcaagagcaactccgccgtggcctggtccaacaagtccgatttcgcctgcgccaacgccttcaacaacagcattatccccgaggacacattcttcccaagccccgagagcagctgcggctttaccagcgagagctaccagcagggcgtgctgagcgccaccatcctgtacgagatcctgctgggcaaggccaccctgtacgccgtgctggtgtctgccctggtgctgatggctatggtcaagcggaaggacagccggggacgcgccaagagaagcggatctggcgtgaagcagaccctgaatttcgacctgctgaagctggctggcgacgtggaatccaacccaggcccttctagaggccatatgaccgagtacaagcccacggtgcgcctcgccacccgcgacgacgtccccagggccgtacgcaccctcgccgccgcgttcgccgactaccccgccacgcgccacaccgtcgatccggaccgccacatcgagcgggtcaccgagctgcaagaactcttcctcacgcgcgtcgggctcgacatcggcaaggtgtgggtcgcggacgacggcgccgcggtggcggtctggaccacgccggagagcgtcgaagcgggggcggtgttcgccgagatcggcccgcgcatggccgagttgagcggttcccggctggccgcgcagcaacagatggaaggcctcctggcgccgcaccggcccaaggagcccgcgtggttcctggccaccgtcggcgtctcgcccgaccaccagggcaagggtctgggcagcgccgtcgtgctccccggagtggaggcggccgagcgcgccggggtgcccgccttcctggagacctccgcgccccgcaacctccccttctacgagcggctcggcttcaccgtcaccgccgacgtcgaggtgcccgaaggaccgcgcacctggtgcatgacccgcaagcccggtgcctga

SEQ ID NO: 17733 - DNA, 2622 bp, synthetic construct
  source 1..2622: mol_type = other DNA
atggccttaccagtgaccgccttgctcctgccgctggccttgctgctccacgccgccaggccgctcgaggaggacctgaagaacgtgttcccacctgaggtggccgtgttcgagcctagcgaggccgagatcagccacacccagaaagccaccctcgtgtgcctggctaccggcttctaccccgaccatgtggaactgtcttggtgggtcaacggcaaagaggtgcacagcggcgtgtgtaccgacccccagccactgaaagaacagcccgccctgaacgacagccggtactgcctgagcagcagactgagagtgtccgccaccttctggcagaacccccggaaccacttcagatgccaggtgcagttctacggcctgagcgagaacgacgagtggacccaggacagagccaagcccgtgacccagatcgtgtctgccgaagcctggggcagagccgattgcgacgtgaagctggtggaaaagagcttcgagacagacaccaacctgaacttccagaacctgagcgtgatcggcttcagaatcctgctgctgaaagtggccggctttaacctgctgatgaccctgcggctgtggtccagcagggccaagcgatctggatctggagcaacaaacttctcactactcaaacaagcaggtgacgtggaggagaatcccgggcctactagcatggccttaccagtgaccgccttgctcctgccgctggccttgctgctccacgccgccaggccgcagatcgtgctgtctcagtctcctgccatcctgagcgcttccccaggcgagaaagtgaccatgacctgtagagccagcagcagcgtgtcctacatgcactggtatcagcagaagcccggcagcagccctaagccttggatctacgccaccagcaatctggcctctggcgtgccagccagattttctggctctggcagcggcaccagctacagcttcacaatcagcagagtggaagccgaggacgccgccacctactattgtcagcagtggaccttcaatcctcctaccttcggcggaggcacccggctggaaatcaaaagaacagtggctgctggcggaggcggaagtggaggcggaggatctggcggcggaggctctcaggcttatctgcaacagagcggagccgaactcgtcagacctggcgcttctgtgaagatgagctgcaaggccagcggctacaccttcaccagctataatatgcactgggtcaagcagacccctcggcagggactcgaatggatcggcggaatctatcccggcaacggcgacacctcctacaaccagaagttcaagggcaaagccacactgaccgtgggcaagagcagcagcaccgcctatatgcagctcagcagcctgaccagcgaggacagcgccgtgtacttctgcgccagatacgactacaactacgctatggactactggggccagggcaccagcgtgacagttagctctgccagcacgcgtatccagaaccctgatcctgccgtgtaccagctgcgggatagcaagagcagcgacaagagcgtgtgtctgttcaccgacttcgacagccagaccaacgtgtcccagagcaaggactccgacgtgtacatcaccgataagtgcgtgctggacatgcggagcatggacttcaagagcaactccgccgtggcctggtccaacaagtccgatttcgcctgcgccaacgccttcaacaacagcattatccccgaggacacattcttcccaagccccgagagcagctgcggctttaccagcgagagctaccagcagggcgtgctgagcgccaccatcctgtacgagatcctgctgggcaaggccaccctgtacgccgtgctggtgtctgccctggtgctgatggctatggtcaagcggaaggacagccggggacgcgccaagagaagcggatctggcgtgaagcagaccctgaatttcgacctgctgaagctggctggcgacgtggaatccaacccaggcccttctagaggccatatgaccgagtacaagcccacggtgcgcctcgccacccgcgacgacgtccccagggccgtacgcaccctcgccgccgcgttcgccgactaccccgccacgcgccacaccgtcgatccggaccgccacatcgagcgggtcaccgagctgcaagaactcttcctcacgcgcgtcgggctcgacatcggcaaggtgtgggtcgcggacgacggcgccgcggtggcggtctggaccacgccggagagcgtcgaagcgggggcggtgttcgccgagatcggcccgcgcatggccgagttgagcggttcccggctggccgcgcagcaacagatggaaggcctcctggcgccgcaccggcccaaggagcccgcgtggttcctggccaccgtcggcgtctcgcccgaccaccagggcaagggtctgggcagcgccgtcgtgctccccggagtggaggcggccgagcgcgccggggtgcccgccttcctggagacctccgcgccccgcaacctccccttctacgagcggctcggcttcaccgtcaccgccgacgtcgaggtgcccgaaggaccgcgcacctggtgcatgacccgcaagcccggtgcctga

SEQ ID NO: 17734 - DNA, 2616 bp, synthetic construct
  source 1..2616: mol_type = other DNA
atggccttaccagtgaccgccttgctcctgccgctggccttgctgctccacgccgccaggccgctcgaggaggacctgaagaacgtgttcccacctgaggtggccgtgttcgagcctagcgaggccgagatcagccacacccagaaagccaccctcgtgtgcctggctaccggcttctaccccgaccatgtggaactgtcttggtgggtcaacggcaaagaggtgcacagcggcgtgtgtaccgacccccagccactgaaagaacagcccgccctgaacgacagccggtactgcctgagcagcagactgagagtgtccgccaccttctggcagaacccccggaaccacttcagatgccaggtgcagttctacggcctgagcgagaacgacgagtggacccaggacagagccaagcccgtgacccagatcgtgtctgccgaagcctggggcagagccgattgcgacgtgaagctggtggaaaagagcttcgagacagacaccaacctgaacttccagaacctgagcgtgatcggcttcagaatcctgctgctgaaagtggccggctttaacctgctgatgaccctgcggctgtggtccagcagggccaagcgatctggatctggagcaacaaacttctcactactcaaacaagcaggtgacgtggaggagaatcccgggcctactagcatggccttaccagtgaccgccttgctcctgccgctggccttgctgctccacgccgccaggccggagatcgtgctgacacagagccctgccaccctgtctctgagccctggcgaaagagccaccctgagctgtagagccagccagagcgtgtccagctacctggcctggtatcagcagaagcccggccaggctccccggctgctgatctacgatgccagcaatagagccaccggcatccccgccagattttccggctctggcagcggcaccgacttcaccctgaccatcagctccctggaacccgaggacttcgccgtgtactactgccagcagcggagcaactggcccatcacattcggccagggcacccggctggaaatcaaaggcggaggcggaagtggaggcggaggatctggcggcggaggctctgaggtgcagcttgttgagtctggcggaggactggtgcagcccgatagaagcctgagactgtcttgtgccgccagcggcttcaccttccacgattatgccatgcactgggtccgacaggcccctggcaaaggacttgaatgggtgtccaccatctcttggaacagcggcacaatcggctacgccgactctgtgaagggcagattcaccatcagccgggacaacgccaagaacagcctgtacctccagatgaactccctgagagccgaggacacagccctgtactactgcgccaaggacatccagtacggcaactactactacggcatggacgtgtggggccagggcacaacagtgacagtctcttctacgcgtatccagaaccctgatcctgccgtgtaccagctgcgggatagcaagagcagcgacaagagcgtgtgtctgttcaccgacttcgacagccagaccaacgtgtcccagagcaaggactccgacgtgtacatcaccgataagtgcgtgctggacatgcggagcatggacttcaagagcaactccgccgtggcctggtccaacaagtccgatttcgcctgcgccaacgccttcaacaacagcattatccccgaggacacattcttcccaagccccgagagcagctgcggctttaccagcgagagctaccagcagggcgtgctgagcgccaccatcctgtacgagatcctgctgggcaaggccaccctgtacgccgtgctggtgtctgccctggtgctgatggctatggtcaagcggaaggacagccggggacgcgccaagagaagcggatctggcgtgaagcagaccctgaatttcgacctgctgaagctggctggcgacgtggaatccaacccaggcccttctagaggccatatgaccgagtacaagcccacggtgcgcctcgccacccgcgacgacgtccccagggccgtacgcaccctcgccgccgcgttcgccgactaccccgccacgcgccacaccgtcgatccggaccgccacatcgagcgggtcaccgagctgcaagaactcttcctcacgcgcgtcgggctcgacatcggcaaggtgtgggtcgcggacgacggcgccgcggtggcggtctggaccacgccggagagcgtcgaagcgggggcggtgttcgccgagatcggcccgcgcatggccgagttgagcggttcccggctggccgcgcagcaacagatggaaggcctcctggcgccgcaccggcccaaggagcccgcgtggttcctggccaccgtcggcgtctcgcccgaccaccagggcaagggtctgggcagcgccgtcgtgctccccggagtggaggcggccgagcgcgccggggtgcccgccttcctggagacctccgcgccccgcaacctccccttctacgagcggctcggcttcaccgtcaccgccgacgtcgaggtgcccgaaggaccgcgcacctggtgcatgacccgcaagcccggtgcctga

SEQ ID NO: 17735 - DNA, 2610 bp, synthetic construct
  source 1..2610: mol_type = other DNA
atggccttaccagtgaccgccttgctcctgccgctggccttgctgctccacgccgccaggccgctcgaggaggacctgaagaacgtgttcccacctgaggtggccgtgttcgagcctagcgaggccgagatcagccacacccagaaagccaccctcgtgtgcctggctaccggcttctaccccgaccatgtggaactgtcttggtgggtcaacggcaaagaggtgcacagcggcgtgtgtaccgacccccagccactgaaagaacagcccgccctgaacgacagccggtactgcctgagcagcagactgagagtgtccgccaccttctggcagaacccccggaaccacttcagatgccaggtgcagttctacggcctgagcgagaacgacgagtggacccaggacagagccaagcccgtgacccagatcgtgtctgccgaagcctggggcagagccgattgcgacgtgaagctggtggaaaagagcttcgagacagacaccaacctgaacttccagaacctgagcgtgatcggcttcagaatcctgctgctgaaagtggccggctttaacctgctgatgaccctgcggctgtggtccagcagggccaagcgatctggatctggagcaacaaacttctcactactcaaacaagcaggtgacgtggaggagaatcccgggcctactagcatggccttaccagtgaccgccttgctcctgccgctggccttgctgctccacgccgccaggccggacatccagatgacccagagccccagcagcctgtctgccagcgtgggcgacagagtgaccatcacctgtagagccagccaggacgtgaacaccgccgtggcctggtatcagcagaagcctggcaaggcccccaagctgctgatctacagcgccagcttcctggaaagcggcgtgcccagcagattcagcggaagcagaagcggcaccgacttcaccctgaccatcagctccctccagcccgaggacttcgccacctactactgccagcagcactacaccacccctcccaccttcggccagaccaaggtggaaatcaagagaggcggaggcggaagtggaggcggaggatctggcggcggaggctctgaagtgcaactggtggaatctggcggcggactggtgcagcctggcggatctctgagactgagctgtgccgccagcggcttcaacatcaaggacacctacatccactgggtgcgccaggcccctggaaagggactggaatgggtggcccggatctaccccaccaacggctacaccagatacgccgacagcgtgaagggccggttcaccatcagcgccgacaccagcaagaataccgcctacctccagatgaacagcctgcgggccgaggataccgccgtgtactactgctcaagatggggaggcgacggcttctacgctatggacgtgtggggccagggcacccttgtgaccgtgtcatctacgcgtatccagaaccctgatcctgccgtgtaccagctgcgggatagcaagagcagcgacaagagcgtgtgtctgttcaccgacttcgacagccagaccaacgtgtcccagagcaaggactccgacgtgtacatcaccgataagtgcgtgctggacatgcggagcatggacttcaagagcaactccgccgtggcctggtccaacaagtccgatttcgcctgcgccaacgccttcaacaacagcattatccccgaggacacattcttcccaagccccgagagcagctgcggctttaccagcgagagctaccagcagggcgtgctgagcgccaccatcctgtacgagatcctgctgggcaaggccaccctgtacgccgtgctggtgtctgccctggtgctgatggctatggtcaagcggaaggacagccggggacgcgccaagagaagcggatctggcgtgaagcagaccctgaatttcgacctgctgaagctggctggcgacgtggaatccaacccaggcccttctagaggccatatgaccgagtacaagcccacggtgcgcctcgccacccgcgacgacgtccccagggccgtacgcaccctcgccgccgcgttcgccgactaccccgccacgcgccacaccgtcgatccggaccgccacatcgagcgggtcaccgagctgcaagaactcttcctcacgcgcgtcgggctcgacatcggcaaggtgtgggtcgcggacgacggcgccgcggtggcggtctggaccacgccggagagcgtcgaagcgggggcggtgttcgccgagatcggcccgcgcatggccgagttgagcggttcccggctggccgcgcagcaacagatggaaggcctcctggcgccgcaccggcccaaggagcccgcgtggttcctggccaccgtcggcgtctcgcccgaccaccagggcaagggtctgggcagcgccgtcgtgctccccggagtggaggcggccgagcgcgccggggtgcccgccttcctggagacctccgcgccccgcaacctccccttctacgagcggctcggcttcaccgtcaccgccgacgtcgaggtgcccgaaggaccgcgcacctggtgcatgacccgcaagcccggtgcctga

SEQ ID NO: 17736 - DNA, 2247 bp, synthetic construct
  source 1..2247: mol_type = other DNA
atggccttaccagtgaccgccttgctcctgccgctggccttgctgctccacgccgccaggccgctcgaggaggacctgaagaacgtgttcccacctgaggtggccgtgttcgagcctagcgaggccgagatcagccacacccagaaagccaccctcgtgtgcctggctaccggcttctaccccgaccatgtggaactgtcttggtgggtcaacggcaaagaggtgcacagcggcgtgtgtaccgacccccagccactgaaagaacagcccgccctgaacgacagccggtactgcctgagcagcagactgagagtgtccgccaccttctggcagaacccccggaaccacttcagatgccaggtgcagttctacggcctgagcgagaacgacgagtggacccaggacagagccaagcccgtgacccagatcgtgtctgccgaagcctggggcagagccgattgcgacgtgaagctggtggaaaagagcttcgagacagacaccaacctgaacttccagaacctgagcgtgatcggcttcagaatcctgctgctgaaagtggccggctttaacctgctgatgaccctgcggctgtggtccagcagggccaagcgatctggatctggagcaacaaacttctcactactcaaacaagcaggtgacgtggaggagaatcccgggcctactagcatggccctgcccgtgacagccctgctgctgcctctggctctgctgctgcacgccgccagacccgatgaattcgaggtgcaactggtggaaagcggcggaggcctggtgcaggctggcggatctctgagactgagctgtgccgccagcggcatcaccttcagcatcaacacaatgggctggtacagacaggcccctggcaagcagagggaactggtggccctgatctccagcatcggcgacacctactacgccgacagcgtgaagggccggttcaccatcagccgggacaacgccaagaacaccgtgtacctccagatgaacagcctgaagcccgaggacaccgccgtgtactactgcaagcggttcagaacagccgcccagggcaccgattattggggccagggaacacaagtgaccgtgtcctctacgcgtatccagaaccctgatcctgccgtgtaccagctgcgggatagcaagagcagcgacaagagcgtgtgtctgttcaccgacttcgacagccagaccaacgtgtcccagagcaaggactccgacgtgtacatcaccgataagtgcgtgctggacatgcggagcatggacttcaagagcaactccgccgtggcctggtccaacaagtccgatttcgcctgcgccaacgccttcaacaacagcattatccccgaggacacattcttcccaagccccgagagcagctgcggctttaccagcgagagctaccagcagggcgtgctgagcgccaccatcctgtacgagatcctgctgggcaaggccaccctgtacgccgtgctggtgtctgccctggtgctgatggctatggtcaagcggaaggacagccggggacgcgccaagagaagcggatctggcgtgaagcagaccctgaatttcgacctgctgaagctggctggcgacgtggaatccaacccaggcccttctagaggccatatgaccgagtacaagcccacggtgcgcctcgccacccgcgacgacgtccccagggccgtacgcaccctcgccgccgcgttcgccgactaccccgccacgcgccacaccgtcgatccggaccgccacatcgagcgggtcaccgagctgcaagaactcttcctcacgcgcgtcgggctcgacatcggcaaggtgtgggtcgcggacgacggcgccgcggtggcggtctggaccacgccggagagcgtcgaagcgggggcggtgttcgccgagatcggcccgcgcatggccgagttgagcggttcccggctggccgcgcagcaacagatggaaggcctcctggcgccgcaccggcccaaggagcccgcgtggttcctggccaccgtcggcgtctcgcccgaccaccagggcaagggtctgggcagcgccgtcgtgctccccggagtggaggcggccgagcgcgccggggtgcccgccttcctggagacctccgcgccccgcaacctccccttctacgagcggctcggcttcaccgtcaccgccgacgtcgaggtgcccgaaggaccgcgcacctggtgcatgacccgcaagcccggtgcctga

SEQ ID NO: 17737 - DNA, 2247 bp, synthetic construct; identical to SEQ ID NO: 17736
  source 1..2247: mol_type = other DNA

SEQ ID NO: 17738 - DNA, 3042 bp, synthetic construct
  source 1..3042: mol_type = other DNA
atggccttaccagtgaccgccttgctcctgccgctggccttgctgctccacgccgccaggccgctcgaggaggacctgaagaacgtgttcccacctgaggtggccgtgttcgagcctagcgaggccgagatcagccacacccagaaagccaccctcgtgtgcctggctaccggcttctaccccgaccatgtggaactgtcttggtgggtcaacggcaaagaggtgcacagcggcgtgtgtaccgacccccagccactgaaagaacagcccgccctgaacgacagccggtactgcctgagcagcagactgagagtgtccgccaccttctggcagaacccccggaaccacttcagatgccaggtgcagttctacggcctgagcgagaacgacgagtggacccaggacagagccaagcccgtgacccagatcgtgtctgccgaagcctggggcagagccgattgcgacgtgaagctggtggaaaagagcttcgagacagacaccaacctgaacttccagaacctgagcgtgatcggcttcagaatcctgctgctgaaagtggccggctttaacctgctgatgaccctgcggctgtggtccagcagggccaagcgatctggatctggagcaacaaacttctcactactcaaacaagcaggtgacgtggaggagaatcccgggcctactagcatggccttaccagtgaccgccttgctcctgccgctggccttgctgctccacgccgccaggccgcaggtccagctcgtcgagtccggcggcggcctcgtccaggccggcgactccgtcaccctctcctgcaccgcctccggccgcaccttctcctcctacgccctcgcctggttccgccagcgccccggcaaggagcgcgagttcgtcgccggcctccgctggggcggccccaccaactacgccgactccgtcaaggaccgcttcaccatctccggcgactccgccaagcacaccatgtacctccagatgaactccctcaagcccgaggacaccgccgtctactactgcggctacaaccccggcggctgggccgtcccctcccagtacgagtacgactcctggggccagggcacccaggtcaccgtctcctccggtaccggcggaggcggatctggcggcggaggtagcggtggcggaggatctgaattcgacatccagatgacacagagccctagcagcctgtctgccagcgtgggagacagagtgaccatcacatgcaaggccagcgaccacatcaacaactggctggcctggtatcagcagaagcctggacaggcccctaagctgctgatctacggcgctaccacactggaaacaggcgtgcccagcagattttctggcagcggctctggcaccgactacaccctgacaatatccagcctccagcctgaggacttcgccacctactactgtcagcagagctggaacaccccttggacattcggccagggcaccaagctggaaatcaagagaggcggaggcggaagtggaggcggaggatctggcggcggaggctctcaagttcagcttcaacagcctggcgctgagctggtcaaacctggcgcttctgtgaagatgagctgcaaagccagcggctacgccttcagcagctactggatcaactggatgaagcagaaacccggccagggactcgaatggatcggccaaatctatcccggcgacggcgacaccaactacaacggcaagttcaagggcagagccacactgaccgccgatacctctagcagcacagcctacatgcagctgagcagcctgaccagcgaagatagcgccgtgtacttctgtgcccggtccatcacaacagtcgtgggctgcgctatggactattggggccagggaacaagcgtgaccgtgtctagtacgcgtatccagaaccctgatcctgccgtgtaccagctgcgggatagcaagagcagcgacaagagcgtgtgtctgttcaccgacttcgacagccagaccaacgtgtcccagagcaaggactccgacgtgtacatcaccgataagtgcgtgctggacatgcggagcatggacttcaagagcaactccgccgtggcctggtccaacaagtccgatttcgcctgcgccaacgccttcaacaacagcattatccccgaggacacattcttcccaagccccgagagcagctgcggctttaccagcgagagctaccagcagggcgtgctgagcgccaccatcctgtacgagatcctgctgggcaaggccaccctgtacgccgtgctggtgtctgccctggtgctgatggctatggtcaagcggaaggacagccggggacgcgccaagagaagcggatctggcgtgaagcagaccctgaatttcgacctgctgaagctggctggcgacgtggaatccaacccaggcccttctagaggccatatgaccgagtacaagcccacggtgcgcctcgccacccgcgacgacgtccccagggccgtacgcaccctcgccgccgcgttcgccgactaccccgccacgcgccacaccgtcgatccggaccgccacatcgagcgggtcaccgagctgcaagaactcttcctcacgcgcgtcgggctcgacatcggcaaggtgtgggtcgcggacgacggcgccgcggtggcggtctggaccacgccggagagcgtcgaagcgggggcggtgttcgccgagatcggcccgcgcatggccgagttgagcggttcccggctggccgcgcagcaacagatggaaggcctcctggcgccgcaccggcccaaggagcccgcgtggttcctggccaccgtcggcgtctcgcccgaccaccagggcaagggtctgggcagcgccgtcgtgctccccggagtggaggcggccgagcgcgccggggtgcccgccttcctggagacctccgcgccccgcaacctccccttctacgagcggctcggcttcaccgtcaccgccgacgtcgaggtgcccgaaggaccgcgcacctggtgcatgacccgcaagcccggtgcctga

SEQ ID NO: 17739 - DNA, 3429 bp, synthetic construct
  source 1..3429: mol_type = other DNA
atggccttaccagtgaccgccttgctcctgccgctggccttgctgctccacgccgccaggccgctcgaggaggacctgaagaacgtgttcccacctgaggtggccgtgttcgagcctagcgaggccgagatcagccacacccagaaagccaccctcgtgtgcctggctaccggcttctaccccgaccatgtggaactgtcttggtgggtcaacggcaaagaggtgcacagcggcgtgtgtaccgacccccagccactgaaagaacagcccgccctgaacgacagccggtactgcctgagcagcagactgagagtgtccgccaccttctggcagaacccccggaaccacttcagatgccaggtgcagttctacggcctgagcgagaacgacgagtggacccaggacagagccaagcccgtgacccagatcgtgtctgccgaagcctggggcagagccgattgcgacgtgaagctggtggaaaagagcttcgagacagacaccaacctgaacttccagaacctgagcgtgatcggcttcagaatcctgctgctgaaagtggccggctttaacctgctgatgaccctgcggctgtggtccagcagggccaagcgatctggatctggagcaacaaacttctcactactcaaacaagcaggtgacgtggaggagaatcccgggcctactagcatggccttaccagtgaccgccttgctcctgccgctggccttgctgctccacgccgccaggccggaggttcagctgcttgagtctggcggaggactggttcaacctggcggaagcctgagactgtcttgtgccgccagcggcttcacctttagcagctacgccatgagctgggtccgacaggctcctggcaaaggactggaatgggtgtccagcatcagcggcagcggcgactacatctactacgccgatagcgtgaagggcagattcaccatcagccgggacatcagcaagaacaccctgtacctccagatgaacagcctgagagccgaggacaccgccgtgtactactgtgccaaagaaggcaccggcgctaacagcagcctggccgattatagaggccagggcacactggtcaccgtgtctagtggcggaggaagcggcggaggatctcaggtccagctcgtcgagtccggcggcggcctcgtccaggccggcgactccgtcaccctctcctgcaccgcctccggccgcaccttctcctcctacgccctcgcctggttccgccagcgccccggcaaggagcgcgagttcgtcgccggcctccgctggggcggccccaccaactacgccgactccgtcaaggaccgcttcaccatctccggcgactccgccaagcacaccatgtacctccagatgaactccctcaagcccgaggacaccgccgtctactactgcggctacaaccccggcggctgggccgtcccctcccagtacgagtacgactcctggggccagggcacccaggtcaccgtctcctccggtaccggcggaggcggatctggcggcggaggtagcggtggcggaggatctgaattcgacatccagatgacacagagccctagcagcctgtctgccagcgtgggagacagagtgaccatcacatgcaaggccagcgaccacatcaacaactggctggcctggtatcagcagaagcctggacaggcccctaagctgctgatctacggcgctaccacactggaaacaggcgtgcccagcagattttctggcagcggctctggcaccgactacaccctgacaatatccagcctccagcctgaggacttcgccacctactactgtcagcagagctggaacaccccttggacattcggccagggcaccaagctggaaatcaagagaggcggaggcggaagtggaggcggaggatctggcggcggaggctctcaagttcagcttcaacagcctggcgctgagctggtcaaacctggcgcttctgtgaagatgagctgcaaagccagcggctacgccttcagcagctactggatcaactggatgaagcagaaacccggccagggactcgaatggatcggccaaatctatcccggcgacggcgacaccaactacaacggcaagttcaagggcagagccacactgaccgccgatacctctagcagcacagcctacatgcagctgagcagcctgaccagcgaagatagcgccgtgtacttctgtgcccggtccatcacaacagtcgtgggctgcgctatggactattggggccagggaacaagcgtgaccgtgtctagtacgcgtatccagaaccctgatcctgccgtgtaccagctgcgggatagcaagagcagcgacaagagcgtgtgtctgttcaccgacttcgacagccagaccaacgtgtcccagagcaaggactccgacgtgtacatcaccgataagtgcgtgctggacatgcggagcatggacttcaagagcaactccgccgtggcctggtccaacaagtccgatttcgcctgcgccaacgccttcaacaacagcattatccccgaggacacattcttcccaagccccgagagcagctgcggctttaccagcgagagctaccagcagggcgtgctgagcgccaccatcctgtacgagatcctgctgggcaaggccaccctgtacgccgtgctggtgtctgccctggtgctgatggctatggtcaagcggaaggacagccggggacgcgccaagagaagcggatctggcgtgaagcagaccctgaatttcgacctgctgaagctggctggcgacgtggaatccaacccaggcccttctagaggccatatgaccgagtacaagcccacggtgcgcctcgccacccgcgacgacgtccccagggccgtacgcaccctcgccgccgcgttcgccgactaccccgccacgcgccacaccgtcgatccggaccgccacatcgagcgggtcaccgagctgcaagaactcttcctcacgcgcgtcgggctcgacatcggcaaggtgtgggtcgcggacgacggcgccgcggtggcggtctggaccacgccggagagcgtcgaagcgggggcggtgttcgccgagatcggcccgcgcatggccgagttgagcggttcccggctggccgcgcagcaacagatggaaggcctcctggcgccgcaccggcccaaggagcccgcgtggttcctggccaccgtcggcgtctcgcccgaccaccagggcaagggtctgggcagcgccgtcgtgctccccggagtggaggcggccgagcgcgccggggtgcccgccttcctggagacctccgcgccccgcaacctccccttctacgagcggctcggcttcaccgtcaccgccgacgtcgaggtgcccgaaggaccgcgcacctggtgcatgacccgcaagcccggtgcctga

SEQ ID NO: 17740 - DNA, 3423 bp, synthetic construct
  source 1..3423: mol_type = other DNA
atggccttaccagtgaccgccttgctcctgccgctggccttgctgctccacgccgccaggccgctcgaggaggacctgaagaacgtgttcccacctgaggtggccgtgttcgagcctagcgaggccgagatcagccacacccagaaagccaccctcgtgtgcctggctaccggcttctaccccgaccatgtggaactgtcttggtgggtcaacggcaaagaggtgcacagcggcgtgtgtaccgacccccagccactgaaagaacagcccgccctgaacgacagccggtactgcctgagcagcagactgagagtgtccgccaccttctggcagaacccccggaaccacttcagatgccaggtgcagttctacggcctgagcgagaacgacgagtggacccaggacagagccaagcccgtgacccagatcgtgtctgccgaagcctggggcagagccgattgcgacgtgaagctggtggaaaagagcttcgagacagacaccaacctgaacttccagaacctgagcgtgatcggcttcagaatcctgctgctgaaagtggccggctttaacctgctgatgaccctgcggctgtggtccagcagggccaagcgatctggatctggagcaacaaacttctcactactcaaacaagcaggtgacgtggaggagaatcccgggcctactagcatggccttaccagtgaccgccttgctcctgccgctggccttgctgctccacgccgccaggccgggcgtgacacagagccccacacacctgattaagaccagaggccagcaggccacactgagatgcagccctatcagcggccacaccagcgtgtactggtatcagcaggctctcggactgggcctccagttcctgctttggtacgacgagggcgaagagagaaaccggggcaacttccctcctcggttttccggcagacagttccccaactacagcagcgagctgaacgtgaacgccctggaactggaagatagcgccctgtacctgtgtgcctcttctcttggtggacctcgcggactggctggactgagaggggatgagcagtttttcggccctggcaccagactgaccgtgctggaaggcggaggaagcggcggaggatctcaggtccagctcgtcgagtccggcggcggcctcgtccaggccggcgactccgtcaccctctcctgcaccgcctccggccgcaccttctcctcctacgccctcgcctggttccgccagcgccccggcaaggagcgcgagttcgtcgccggcctccgctggggcggccccaccaactacgccgactccgtcaaggaccgcttcaccatctccggcgactccgccaagcacaccatgtacctccagatgaactccctcaagcccgaggacaccgccgtctactactgcggctacaaccccggcggctgggccgtcccctcccagtacgagtacgactcctggggccagggcacccaggtcaccgtctcctccggtaccggcggaggcggatctggcggcggaggtagcggtggcggaggatctgaattcgacatccagatgacacagagccctagcagcctgtctgccagcgtgggagacagagtgaccatcacatgcaaggccagcgaccacatcaacaactggctggcctggtatcagcagaagcctggacaggcccctaagctgctgatctacggcgctaccacactggaaacaggcgtgcccagcagattttctggcagcggctctggcaccgactacaccctgacaatatccagcctccagcctgaggacttcgccacctactactgtcagcagagctggaacaccccttggacattcggccagggcaccaagctggaaatcaagagaggcggaggcggaagtggaggcggaggatctggcggcggaggctctcaagttcagcttcaacagcctggcgctgagctggtcaaacctggcgcttctgtgaagatgagctgcaaagccagcggctacgccttcagcagctactggatcaactggatgaagcagaaacccggccagggactcgaatggatcggccaaatctatcccggcgacggcgacaccaactacaacggcaagttcaagggcagagccacactgaccgccgatacctctagcagcacagcctacatgcagctgagcagcctgaccagcgaagatagcgccgtgtacttctgtgcccggtccatcacaacagtcgtgggctgcgctatggactattggggccagggaacaagcgtgaccgtgtctagtacgcgtatccagaaccctgatcctgccgtgtaccagctgcgggatagcaagagcagcgacaagagcgtgtgtctgttcaccgacttcgacagccagaccaacgtgtcccagagcaaggactccgacgtgtacatcaccgataagtgcgtgctggacatgcggagcatggacttcaagagcaactccgccgtggcctggtccaacaagtccgatttcgcctgcgccaacgccttcaacaacagcattatccccgaggacacattcttcccaagccccgagagcagctgcggctttaccagcgagagctaccagcagggcgtgctgagcgccaccatcctgtacgagatcctgctgggcaaggccaccctgtacgccgtgctggtgtctgccctggtgctgatggctatggtcaagcggaaggacagccggggacgcgccaagagaagcggatctggcgtgaagcagaccctgaatttcgacctgctgaagctggctggcgacgtggaatccaacccaggcccttctagaggccatatgaccgagtacaagcccacggtgcgcctcgccacccgcgacgacgtccccagggccgtacgcaccctcgccgccgcgttcgccgactaccccgccacgcgccacaccgtcgatccggaccgccacatcgagcgggtcaccgagctgcaagaactcttcctcacgcgcgtcgggctcgacatcggcaaggtgtgggtcgcggacgacggcgccgcggtggcggtctggaccacgccggagagcgtcgaagcgggggcggtgttcgccgagatcggcccgcgcatggccgagttgagcggttcccggctggccgcgcagcaacagatggaaggcctcctggcgccgcaccggcccaaggagcccgcgtggttcctggccaccgtcggcgtctcgcccgaccaccagggcaagggtctgggcagcgccgtcgtgctccccggagtggaggcggccgagcgcgccggggtgcccgccttcctggagacctccgcgccccgcaacctccccttctacgagcggctcggcttcaccgtcaccgccgacgtcgaggtgcccgaaggaccgcgcacctggtgcatgacccgcaagcccggtgcctga

SEQ ID NO: 17741 - DNA, 3405 bp, synthetic construct
  source 1..3405: mol_type = other DNA
atggccttaccagtgaccgccttgctcctgccgctggccttgctgctccacgccgccaggccgctcgaggaggacctgaagaacgtgttcccacctgaggtggccgtgttcgagcctagcgaggccgagatcagccacacccagaaagccaccctcgtgtgcctggctaccggcttctaccccgaccatgtggaactgtcttggtgggtcaacggcaaagaggtgcacagcggcgtgtgtaccgacccccagccactgaaagaacagcccgccctgaacgacagccggtactgcctgagcagcagactgagagtgtccgccaccttctggcagaacccccggaaccacttcagatgccaggtgcagttctacggcctgagcgagaacgacgagtggacccaggacagagccaagcccgtgacccagatcgtgtctgccgaagcctggggcagagccgattgcgacgtgaagctggtggaaaagagcttcgagacagacaccaacctgaacttccagaacctgagcgtgatcggcttcagaatcctgctgctgaaagtggccggctttaacctgctgatgaccctgcggctgtggtccagcagggccaagcgatctggatctggagcaacaaacttctcactactcaaacaagcaggtgacgtggaggagaatcccgggcctactagcatggccttaccagtgaccgccttgctcctgccgctggccttgctgctccacgccgccaggccgggcgtgacacagagccccacacacctgattaagaccagaggccagcaggccacactgagatgcagccctatcagcggccacaccagcgtgtactggtatcagcaggctctcggactgggcctccagttcctgctttggtacgacgagggcgaagagagaaaccggggcaacttccctcctcggttttccggcagacagttccccaactacagcagcgagctgaacgtgaacgccctggaactggaagatagcgccctgtacctgtgtgcctcttctcttggtggacctcgcggactggctggactgagaggggatgagcagtttttcggccctggcaccagactgaccgtgctggaaggcggaggaagcggcggaggatctggcgtgacacagagccccacacacctgattaagaccagaggccagcaggccacactgagatgcagccctatcagcggccacaccagcgtgtactggtatcagcaggctctcggactgggcctccagttcctgctttggtacgacgagggcgaagagagaaaccggggcaacttccctcctcggttttccggcagacagttccccaactacagcagcgagctgaacgtgaacgccctggaactggaagatagcgccctgtacctgtgtgccagctctctcggcggagatgaactgggagccgatggcaacgagcagttctttggccctggcaccagactgaccgtgctggaaggtaccggcggaggcggatctggcggcggaggtagcggtggcggaggatctgaattcgacatccagatgacacagagccctagcagcctgtctgccagcgtgggagacagagtgaccatcacatgcaaggccagcgaccacatcaacaactggctggcctggtatcagcagaagcctggacaggcccctaagctgctgatctacggcgctaccacactggaaacaggcgtgcccagcagattttctggcagcggctctggcaccgactacaccctgacaatatccagcctccagcctgaggacttcgccacctactactgtcagcagagctggaacaccccttggacattcggccagggcaccaagctggaaatcaagagaggcggaggcggaagtggaggcggaggatctggcggcggaggctctcaagttcagcttcaacagcctggcgctgagctggtcaaacctggcgcttctgtgaagatgagctgcaaagccagcggctacgccttcagcagctactggatcaactggatgaagcagaaacccggccagggactcgaatggatcggccaaatctatcccggcgacggcgacaccaactacaacggcaagttcaagggcagagccacactgaccgccgatacctctagcagcacagcctacatgcagctgagcagcctgaccagcgaagatagcgccgtgtacttctgtgcccggtccatcacaacagtcgtgggctgcgctatggactattggggccagggaacaagcgtgaccgtgtctagtacgcgtatccagaaccctgatcctgccgtgtaccagctgcgggatagcaagagcagcgacaagagcgtgtgtctgttcaccgacttcgacagccagaccaacgtgtcccagagcaaggactccgacgtgtacatcaccgataagtgcgtgctggacatgcggagcatggacttcaagagcaactccgccgtggcctggtccaacaagtccgatttcgcctgcgccaacgccttcaacaacagcattatccccgaggacacattcttcccaagccccgagagcagctgcggctttaccagcgagagctaccagcagggcgtgctgagcgccaccatcctgtacgagatcctgctgggcaaggccaccctgtacgccgtgctggtgtctgccctggtgctgatggctatggtcaagcggaaggacagccggggacgcgccaagagaagcggatctggcgtgaagcagaccctgaatttcgacctgctgaagctggctggcgacgtggaatccaacccaggcccttctagaggccatatgaccgagtacaagcccacggtgcgcctcgccacccgcgacgacgtccccagggccgtacgcaccctcgccgccgcgttcgccgactaccccgccacgcgccacaccgtcgatccggaccgccacatcgagcgggtcaccgagctgcaagaactcttcctcacgcgcgtcgggctcgacatcggcaaggtgtgggtcgcggacgacggcgccgcggtggcggtctggaccacgccggagagcgtcgaagcgggggcggtgttcgccgagatcggcccgcgcatggccgagttgagcggttcccggctggccgcgcagcaacagatggaaggcctcctggcgccgcaccggcccaaggagcccgcgtggttcctggccaccgtcggcgtctcgcccgaccaccagggcaagggtctgggcagcgccgtcgtgctccccggagtggaggcggccgagcgcgccggggtgcccgccttcctggagacctccgcgccccgcaacctccccttctacgagcggctcggcttcaccgtcaccgccgacgtcgaggtgcccgaaggaccgcgcacctggtgcatgacccgcaagcccggtgcctga

SEQ ID NO: 17742 - DNA, 2265 bp, synthetic construct
  source 1..2265: mol_type = other DNA
atggccttaccagtgaccgccttgctcctgccgctggccttgctgctccacgccgccaggccgctcgaggaggacctgaagaacgtgttcccacctgaggtggccgtgttcgagcctagcgaggccgagatcagccacacccagaaagccaccctcgtgtgcctggctaccggcttctaccccgaccatgtggaactgtcttggtgggtcaacggcaaagaggtgcacagcggcgtgtgtaccgacccccagccactgaaagaacagcccgccctgaacgacagccggtactgcctgagcagcagactgagagtgtccgccaccttctggcagaacccccggaaccacttcagatgccaggtgcagttctacggcctgagcgagaacgacgagtggacccaggacagagccaagcccgtgacccagatcgtgtctgccgaagcctggggcagagccgattgcgacgtgaagctggtggaaaagagcttcgagacagacaccaacctgaacttccagaacctgagcgtgatcggcttcagaatcctgctgctgaaagtggccggctttaacctgctgatgaccctgcggctgtggtccagcagggccaagcgatctggatctggagcaacaaacttctcactactcaaacaagcaggtgacgtggaggagaatcccgggcctactagcatggccctgcccgtgacagccctgctgctgcctctggctctgctgctgcacgccgccagacccgatgaattcggctctgacctgggcatcaagctgctgttcgccgctgccaagggccaggacgacgaagtgcggattctgctggctgctggggccgacgtgaacgccaaggatttcgagggctacacccccctgcacgtggccgcctatgatggacacctggaaatcgtggaagtgctgctgaaggctggcgctgatgtgaatgccaaagacagccagggccggacccctctgcatgaagccgcctacagcggccatctggaaattgtggaagtgctgctgaaagccggggcagacgtgaacgctcaggacgacgctggcgagacaccagccgatctggctgcagcttggggccacgaagatatcgccgaggtgctgcagaagacgcgtatccagaaccctgatcctgccgtgtaccagctgcgggatagcaagagcagcgacaagagcgtgtgtctgttcaccgacttcgacagccagaccaacgtgtcccagagcaaggactccgacgtgtacatcaccgataagtgcgtgctggacatgcggagcatggacttcaagagcaactccgccgtggcctggtccaacaagtccgatttcgcctgcgccaacgccttcaacaacagcattatccccgaggacacattcttcccaagccccgagagcagctgcggctttaccagcgagagctaccagcagggcgtgctgagcgccaccatcctgtacgagatcctgctgggcaaggccaccctgtacgccgtgctggtgtctgccctggtgctgatggctatggtcaagcggaaggacagccggggacgcgccaagagaagcggatctggcgtgaagcagaccctgaatttcgacctgctgaagctggctggcgacgtggaatccaacccaggcccttctagaggccatatgaccgagtacaagcccacggtgcgcctcgccacccgcgacgacgtccccagggccgtacgcaccctcgccgccgcgttcgccgactaccccgccacgcgccacaccgtcgatccggaccgccacatcgagcgggtcaccgagctgcaagaactcttcctcacgcgcgtcgggctcgacatcggcaaggtgtgggtcgcggacgacggcgccgcggtggcggtctggaccacgccggagagcgtcgaagcgggggcggtgttcgccgagatcggcccgcgcatggccgagttgagcggttcccggctggccgcgcagcaacagatggaaggcctcctggcgccgcaccggcccaaggagcccgcgtggttcctggccaccgtcggcgtctcgcccgaccaccagggcaagggtctgggcagcgccgtcgtgctccccggagtggaggcggccgagcgcgccggggtgcccgccttcctggagacctccgcgccccgcaacctccccttctacgagcggctcggcttcaccgtcaccgccgacgtcgaggtgcccgaaggaccgcgcacctggtgcatgacccgcaagcccggtgcctga

SEQ ID NO: 17743 - DNA, 2052 bp, synthetic construct
  source 1..2052: mol_type = other DNA
atggccttaccagtgaccgccttgctcctgccgctggccttgctgctccacgccgccaggccgctcgaggaggacctgaagaacgtgttcccacctgaggtggccgtgttcgagcctagcgaggccgagatcagccacacccagaaagccaccctcgtgtgcctggctaccggcttctaccccgaccatgtggaactgtcttggtgggtcaacggcaaagaggtgcacagcggcgtgtgtaccgacccccagccactgaaagaacagcccgccctgaacgacagccggtactgcctgagcagcagactgagagtgtccgccaccttctggcagaacccccggaaccacttcagatgccaggtgcagttctacggcctgagcgagaacgacgagtggacccaggacagagccaagcccgtgacccagatcgtgtctgccgaagcctggggcagagccgattgcgacgtgaagctggtggaaaagagcttcgagacagacaccaacctgaacttccagaacctgagcgtgatcggcttcagaatcctgctgctgaaagtggccggctttaacctgctgatgaccctgcggctgtggtccagcagggccaagcgatctggatctggagcaacaaacttctcactactcaaacaagcaggtgacgtggaggagaatcccgggcctactagcatggactggatttggcgcatccttttccttgtcggcgctgctaccggcgcccattccttcgaaggcagcggattcgaatacgccaaagagatgcggaacgcctactgggagatcgccctgctgcccaatctgaccaaccagcagaagagagcccccatcagaaagctgtacgacgacccctcccagagcagcgagctgctgtctgaggctaaaaaactgaacgatagccagacgcgtatccagaaccctgatcctgccgtgtaccagctgcgggatagcaagagcagcgacaagagcgtgtgtctgttcaccgacttcgacagccagaccaacgtgtcccagagcaaggactccgacgtgtacatcaccgataagtgcgtgctggacatgcggagcatggacttcaagagcaactccgccgtggcctggtccaacaagtccgatttcgcctgcgccaacgccttcaacaacagcattatccccgaggacacattcttcccaagccccgagagcagctgcggctttaccagcgagagctaccagcagggcgtgctgagcgccaccatcctgtacgagatcctgctgggcaaggccaccctgtacgccgtgctggtgtctgccctggtgctgatggctatggtcaagcggaaggacagccggggacgcgccaagagaagcggatctggcgtgaagcagaccctgaatttcgacctgctgaagctggctggcgacgtggaatccaacccaggcccttctagaggccatatgaccgagtacaagcccacggtgcgcctcgccacccgcgacgacgtccccagggccgtacgcaccctcgccgccgcgttcgccgactaccccgccacgcgccacaccgtcgatccggaccgccacatcgagcgggtcaccgagctgcaagaactcttcctcacgcgcgtcgggctcgacatcggcaaggtgtgggtcgcggacgacggcgccgcggtggcggtctggaccacgccggagagcgtcgaagcgggggcggtgttcgccgagatcggcccgcgcatggccgagttgagcggttcccggctggccgcgcagcaacagatggaaggcctcctggcgccgcaccggcccaaggagcccgcgtggttcctggccaccgtcggcgtctcgcccgaccaccagggcaagggtctgggcagcgccgtcgtgctccccggagtggaggcggccgagcgcgccggggtgcccgccttcctggagacctccgcgccccgcaacctccccttctacgagcggctcggcttcaccgtcaccgccgacgtcgaggtgcccgaaggaccgcgcacctggtgcatgacccgcaagcccggtgcctga

SEQ ID NO: 17744 - DNA, 2718 bp, synthetic construct
  source 1..2718: mol_type = other DNA
atggccttaccagtgaccgccttgctcctgccgctggccttgctgctccacgccgccaggccgctcgaggaggacctgaagaacgtgttcccacctgaggtggccgtgttcgagcctagcgaggccgagatcagccacacccagaaagccaccctcgtgtgcctggctaccggcttctaccccgaccatgtggaactgtcttggtgggtcaacggcaaagaggtgcacagcggcgtgtgtaccgacccccagccactgaaagaacagcccgccctgaacgacagccggtactgcctgagcagcagactgagagtgtccgccaccttctggcagaacccccggaaccacttcagatgccaggtgcagttctacggcctgagcgagaacgacgagtggacccaggacagagccaagcccgtgacccagatcgtgtctgccgaagcctggggcagagccgattgcgacgtgaagctggtggaaaagagcttcgagacagacaccaacctgaacttccagaacctgagcgtgatcggcttcagaatcctgctgctgaaagtggccggctttaacctgctgatgaccctgcggctgtggtccagcagggccaagcgatctggatctggagcaacaaacttctcactactcaaacaagcaggtgacgtggaggagaatcccgggcctactagcatggccctgcccgtgacagccctgctgctgcctctggctctgctgctgcacgccgccagacccgatgaattcgaggtgcaactggtggaaagcggcggaggcctggtgcaggctggcggatctctgagactgagctgtgccgccagcggcatcaccttcagcatcaacacaatgggctggtacagacaggcccctggcaagcagagggaactggtggccctgatctccagcatcggcgacacctactacgccgacagcgtgaagggccggttcaccatcagccgggacaacgccaagaacaccgtgtacctccagatgaacagcctgaagcccgaggacaccgccgtgtactactgcaagcggttcagaacagccgcccagggcaccgattattggggccagggaacacaagtgaccgtgtcctctctcgagggaggaggcggctccgggggaggcggaagtggaggcggaggatctgggtctggaggaagcggatctggaggctcagggtcagggggctcaggcagtggaggctctttcgaagtgcaactggtggaatctgggggcggactggtgcagccaggcggaagtctgaggctgtcttgtgccgcctccggcagcatcttcggcttcaacgacatggcctggtatcggcaggctcccggaaaacagcgcgagctggtggctctgattagcagagtgggcgtgaccagcagcgccgactctgtgaagggcagattcacaatctccagagtgaacgccaaggatacagtgtacctccagatgaactctctgaaacctgaggatacagcagtgtactattgctacatggaccagcggctggacggcagcacactggcctactggggacagggaactcaagtgacagtgtctagcacgcgtatccagaaccctgatcctgccgtgtaccagctgcgggatagcaagagcagcgacaagagcgtgtgtctgttcaccgacttcgacagccagaccaacgtgtcccagagcaaggactccgacgtgtacatcaccgataagtgcgtgctggacatgcggagcatggacttcaagagcaactccgccgtggcctggtccaacaagtccgatttcgcctgcgccaacgccttcaacaacagcattatccccgaggacacattcttcccaagccccgagagcagctgcggctttaccagcgagagctaccagcagggcgtgctgagcgccaccatcctgtacgagatcctgctgggcaaggccaccctgtacgccgtgctggtgtctgccctggtgctgatggctatggtcaagcggaaggacagccggggacgcgccaagagaagcggatctggcgtgaagcagaccctgaatttcgacctgctgaagctggctggcgacgtggaatccaacccaggcccttctagaggccatatgaccgagtacaagcccacggtgcgcctcgccacccgcgacgacgtccccagggccgtacgcaccctcgccgccgcgttcgccgactaccccgccacgcgccacaccgtcgatccggaccgccacatcgagcgggtcaccgagctgcaagaactcttcctcacgcgcgtcgggctcgacatcggcaaggtgtgggtcgcggacgacggcgccgcggtggcggtctggaccacgccggagagcgtcgaagcgggggcggtgttcgccgagatcggcccgcgcatggccgagttgagcggttcccggctggccgcgcagcaacagatggaaggcctcctggcgccgcaccggcccaaggagcccgcgtggttcctggccaccgtcggcgtctcgcccgaccaccagggcaagggtctgggcagcgccgtcgtgctccccggagtggaggcggccgagcgcgccggggtgcccgccttcctggagacctccgcgccccgcaacctccccttctacgagcggctcggcttcaccgtcaccgccgacgtcgaggtgcccgaaggaccgcgcacctggtgcatgacccgcaagcccggtgcctga

SEQ ID NO: 17745 - DNA, 2460 bp, synthetic construct
  source 1..2460: mol_type = other DNA
atggccttaccagtgaccgccttgctcctgccgctggccttgctgctccacgccgccaggccgctcgaggaggacctgaagaacgtgttcccacctgaggtggccgtgttcgagcctagcgaggccgagatcagccacacccagaaagccaccctcgtgtgcctggctaccggcttctaccccgaccatgtggaactgtcttggtgggtcaacggcaaagaggtgcacagcggcgtgtgtaccgacccccagccactgaaagaacagcccgccctgaacgacagccggtactgcctgagcagcagactgagagtgtccgccaccttctggcagaacccccggaaccacttcagatgccaggtgcagttctacggcctgagcgagaacgacgagtggacccaggacagagccaagcccgtgacccagatcgtgtctgccgaagcctggggcagagccgattgcgacgtgaagctggtggaaaagagcttcgagacagacaccaacctgaacttccagaacctgagcgtgatcggcttcagaatcctgctgctgaaagtggccggctttaacctgctgatgaccctgcggctgtggtccagcagggccaagcgatctggatctggagcaacaaacttctcactactcaaacaagcaggtgacgtggaggagaatcccgggcctactagcatggcccttccagtcactgccttgctgttgcctctggcgctcctgctccacgccgctagaccgggcatgagaaccgaggacctgcctaaggccgtggtgttcctggaaccccagtggtacagagtgctggaaaaggacagcgtgaccctgaagtgccagggcgcctacagccccgaggacaatagcacccagtggttccacaacgagagcctgatctccagccaggccagcagctacttcatcgacgccgccaccgtggacgacagcggcgagtatagatgccagaccaacctgagcaccctgagcgaccccgtgcagctggaagtgcacatcggatggctgctgctgcaggcccccagatgggtgttcaaagaagaggaccccatccacctgagatgccactcttggaagaacaccgccctgcacaaagtgacctacctgcagaacggcaagggcagaaagtacttccaccacaacagcgacttctacatccccaaggccaccctgaaggactccggctcctacttctgcagaggcctcgtgggcagcaagaacgtgtccagcgagacagtgaacatcaccatcacccagggcctggccgtgtctaccatcagcagctttttcccacccggctaccagacgcgtatccagaaccctgatcctgccgtgtaccagctgcgggatagcaagagcagcgacaagagcgtgtgtctgttcaccgacttcgacagccagaccaacgtgtcccagagcaaggactccgacgtgtacatcaccgataagtgcgtgctggacatgcggagcatggacttcaagagcaactccgccgtggcctggtccaacaagtccgatttcgcctgcgccaacgccttcaacaacagcattatccccgaggacacattcttcccaagccccgagagcagctgcggctttaccagcgagagctaccagcagggcgtgctgagcgccaccatcctgtacgagatcctgctgggcaaggccaccctgtacgccgtgctggtgtctgccctggtgctgatggctatggtcaagcggaaggacagccggggacgcgccaagagaagcggatctggcgtgaagcagaccctgaatttcgacctgctgaagctggctggcgacgtggaatccaacccaggcccttctagaggccatatgaccgagtacaagcccacggtgcgcctcgccacccgcgacgacgtccccagggccgtacgcaccctcgccgccgcgttcgccgactaccccgccacgcgccacaccgtcgatccggaccgccacatcgagcgggtcaccgagctgcaagaactcttcctcacgcgcgtcgggctcgacatcggcaaggtgtgggtcgcggacgacggcgccgcggtggcggtctggaccacgccggagagcgtcgaagcgggggcggtgttcgccgagatcggcccgcgcatggccgagttgagcggttcccggctggccgcgcagcaacagatggaaggcctcctggcgccgcaccggcccaaggagcccgcgtggttcctggccaccgtcggcgtctcgcccgaccaccagggcaagggtctgggcagcgccgtcgtgctccccggagtggaggcggccgagcgcgccggggtgcccgccttcctggagacctccgcgccccgcaacctccccttctacgagcggctcggcttcaccgtcaccgccgacgtcgaggtgcccgaaggaccgcgcacctggtgcatgacccgcaagcccggtgcctga

SEQ ID NO: 17746 - DNA, 1341 bp, synthetic construct
  source 1..1341: mol_type = other DNA
atggccttaccagtgaccgccttgctcctgccgctggccttgctgctccacgccgccaggccgctcgaggaggacctgaagaacgtgttcccacctgaggtggccgtgttcgagcctagcgaggccgagatcagccacacccagaaagccaccctcgtgtgcctggctaccggcttctaccccgaccatgtggaactgtcttggtgggtcaacggcaaagaggtgcacagcggcgtgtgtaccgacccccagccactgaaagaacagcccgccctgaacgacagccggtactgcctgagcagcagactgagagtgtccgccaccttctggcagaacccccggaaccacttcagatgccaggtgcagttctacggcctgagcgagaacgacgagtggacccaggacagagccaagcccgtgacccagatcgtgtctgccgaagcctggggcagagccgattgcgacgtgaagctggtggaaaagagcttcgagacagacaccaacctgaacttccagaacctgagcgtgatcggcttcagaatcctgctgctgaaagtggccggctttaacctgctgatgaccctgcggctgtggtccagcagggccaagcgatctggatctggagcaacaaacttctcactactcaaacaagcaggtgacgtggaggagaatcccgggcctactagcgccaccatggccttaccagtgaccgccttgctcctgccgctggccttgctgctccacgccgccaggccgatggaccccgacctggaaatcagagccgccttcctgcggcagagaaacacagccctgagaacagaggtggccgagctggaacaagaggtgcagcggctggaaaacgaggtgtcccagtacgagacaagatacggccctctcggaggcggaaaaacgcgtatccagaaccctgatcctgccgtgtaccagctgcgggatagcaagagcagcgacaagagcgtgtgtctgttcaccgacttcgacagccagaccaacgtgtcccagagcaaggactccgacgtgtacatcaccgataagtgcgtgctggacatgcggagcatggacttcaagagcaactccgccgtggcctggtccaacaagtccgatttcgcctgcgccaacgccttcaacaacagcattatccccgaggacacattcttcccaagccccgagagcagctgcggctttaccagcgagagctaccagcagggcgtgctgagcgccaccatcctgtacgagatcctgctgggcaaggccaccctgtacgccgtgctggtgtctgccctggtgctgatggctatggtcaagcggaaggacagccgggga

SEQ ID NO: 17747 - DNA, 1341 bp, synthetic construct
  source 1..1341: mol_type = other DNA
atggccttaccagtgaccgccttgctcctgccgctggccttgctgctccacgccgccaggccgctcgaggaggacctgaagaacgtgttcccacctgaggtggccgtgttcgagcctagcgaggccgagatcagccacacccagaaagccaccctcgtgtgcctggctaccggcttctaccccgaccatgtggaactgtcttggtgggtcaacggcaaagaggtgcacagcggcgtgtgtaccgacccccagccactgaaagaacagcccgccctgaacgacagccggtactgcctgagcagcagactgagagtgtccgccaccttctggcagaacccccggaaccacttcagatgccaggtgcagttctacggcctgagcgagaacgacgagtggacccaggacagagccaagcccgtgacccagatcgtgtctgccgaagcctggggcagagccgattgcgacgtgaagctggtggaaaagagcttcgagacagacaccaacctgaacttccagaacctgagcgtgatcggcttcagaatcctgctgctgaaagtggccggctttaacctgctgatgaccctgcggctgtggtccagcagggccaagcgatctggatctggagcaacaaacttctcactactcaaacaagcaggtgacgtggaggagaatcccgggcctactagcgccaccatggccttaccagtgaccgccttgctcctgccgctggccttgctgctccacgccgccaggccgatggaccctgatctcgaaattgaggccgcctttctggaacgcgagaacactgccctggaaaccagggtcgcagagctgagacagagagtgcagagactgcggaacagagtgtctcagtaccgcaccagatatggcccactcggcggaggtaaaacgcgtatccagaaccctgatcctgccgtgtaccagctgcgggatagcaagagcagcgacaagagcgtgtgtctgttcaccgacttcgacagccagaccaacgtgtcccagagcaaggactccgacgtgtacatcaccgataagtgcgtgctggacatgcggagcatggacttcaagagcaactccgccgtggcctggtccaacaagtccgatttcgcctgcgccaacgccttcaacaacagcattatccccgaggacacattcttcccaagccccgagagcagctgcggctttaccagcgagagctaccagcagggcgtgctgagcgccaccatcctgtacgagatcctgctgggcaaggccaccctgtacgccgtgctggtgtctgccctggtgctgatggctatggtcaagcggaaggacagccgggga

SEQ ID NO: 17748 - DNA, 1272 bp, synthetic construct
  source 1..1272: mol_type = other DNA
atggccttaccagtgaccgccttgctcctgccgctggccttgctgctccacgccgccaggccgctcgaggaggacctgaagaacgtgttcccacctgaggtggccgtgttcgagcctagcgaggccgagatcagccacacccagaaagccaccctcgtgtgcctggctaccggcttctaccccgaccatgtggaactgtcttggtgggtcaacggcaaagaggtgcacagcggcgtgtgtaccgacccccagccactgaaagaacagcccgccctgaacgacagccggtactgcctgagcagcagactgagagtgtccgccaccttctggcagaacccccggaaccacttcagatgccaggtgcagttctacggcctgagcgagaacgacgagtggacccaggacagagccaagcccgtgacccagatcgtgtctgccgaagcctggggcagagccgattgcgacgtgaagctggtggaaaagagcttcgagacagacaccaacctgaacttccagaacctgagcgtgatcggcttcagaatcctgctgctgaaagtggccggctttaacctgctgatgaccctgcggctgtggtccagcagggccaagcgatctggatctggagcaacaaacttctcactactcaaacaagcaggtgacgtggaggagaatcccgggcctactagcgccaccatggccttaccagtgaccgccttgctcctgccgctggccttgctgctccacgccgccaggccggaagttgctgccctcgagaaggaggtagcagctttggaaaaagaagtcgcagcccttgagaaagaagttgcggctctggagaagacgcgtatccagaaccctgatcctgccgtgtaccagctgcgggatagcaagagcagcgacaagagcgtgtgtctgttcaccgacttcgacagccagaccaacgtgtcccagagcaaggactccgacgtgtacatcaccgataagtgcgtgctggacatgcggagcatggacttcaagagcaactccgccgtggcctggtccaacaagtccgatttcgcctgcgccaacgccttcaacaacagcattatccccgaggacacattcttcccaagccccgagagcagctgcggctttaccagcgagagctaccagcagggcgtgctgagcgccaccatcctgtacgagatcctgctgggcaaggccaccctgtacgccgtgctggtgtctgccctggtgctgatggctatggtcaagcggaaggacagccgggga

SEQ ID NO: 17749 - DNA, 2046 bp, synthetic construct
  source 1..2046: mol_type = other DNA
atggccttaccagtgaccgccttgctcctgccgctggccttgctgctccacgccgccaggccgctcgaggaggacctgaagaacgtgttcccacctgaggtggccgtgttcgagcctagcgaggccgagatcagccacacccagaaagccaccctcgtgtgcctggctaccggcttctaccccgaccatgtggaactgtcttggtgggtcaacggcaaagaggtgcacagcggcgtgtgtaccgacccccagccactgaaagaacagcccgccctgaacgacagccggtactgcctgagcagcagactgagagtgtccgccaccttctggcagaacccccggaaccacttcagatgccaggtgcagttctacggcctgagcgagaacgacgagtggacccaggacagagccaagcccgtgacccagatcgtgtctgccgaagcctggggcagagccgattgcgacgtgaagctggtggaaaagagcttcgagacagacaccaacctgaacttccagaacctgagcgtgatcggcttcagaatcctgctgctgaaagtggccggctttaacctgctgatgaccctgcggctgtggtccagcagggccaagcgatctggatctggagcaacaaacttctcactactcaaacaagcaggtgacgtggaggagaatcccgggcctactagcgccaccatggccttaccagtgaccgccttgctcctgccgctggccttgctgctccacgccgccaggccgctgttcaatcaagaggtgcagatccctctgaccgagagctactgtggcccctgtcctaagaactggatctgctacaagaacaactgctaccagttcttcgacgagagcaagaattggtacgagagccaggccagctgcatgagccagaatgccagcctgctgaaggtgtacagcaaagaggaccaggacctgctgaaactggtcaagagcgcccactggatgggccttgtgcacatccccaccaatggctcttggcagtgggaggacggcagcattctgagccctaacctgctgaccatcatcgagatgcagaagggcgactgcgccctgtacgccagcagctttaagggctacatcgagaattgcagcaccccgaacacctacatctgtatgcagagaaccgtttctggcggaggcggctctggaggaggcggaagtggcggcggaggcgacctctttaatcaagaagtccagattccactcaccgaatcctactgcggaccttgtccaaaaaattggatttgttataagaacaactgttatcaattctttgatgagtctaaaaattggtatgagtcccaggcttcctgcatgtctcagaacgcttctctgctgaaagtctactctaaagaagatcaggatctcctgaagctcgtcaagtctgcccattggatggggctcgtccacattcctaccaacggaagctggcaatgggaagatggctccatcctgtctccaaatctgctcacgattattgaaatgcagaaaggggattgtgctctctacgccagctccttcaagggatatattgagaactgtagcacgcccaatacttatatctgtatgcaacggaccgtgacgcgtatccagaaccctgatcctgccgtgtaccagctgcgggatagcaagagcagcgacaagagcgtgtgtctgttcaccgacttcgacagccagaccaacgtgtcccagagcaaggactccgacgtgtacatcaccgataagtgcgtgctggacatgcggagcatggacttcaagagcaactccgccgtggcctggtccaacaagtccgatttcgcctgcgccaacgccttcaacaacagcattatccccgaggacacattcttcccaagccccgagagcagctgcggctttaccagcgagagctaccagcagggcgtgctgagcgccaccatcctgtacgagatcctgctgggcaaggccaccctgtacgccgtgctggtgtctgccctggtgctgatggctatggtcaagcggaaggacagccgggga

SEQ ID NO: 17750 - DNA, 2046 bp, synthetic construct
  source 1..2046: mol_type = other DNA
atggccttaccagtgaccgccttgctcctgccgctggccttgctgctccacgccgccaggccgctcgaggaggacctgaagaacgtgttcccacctgaggtggccgtgttcgagcctagcgaggccgagatcagccacacccagaaagccaccctcgtgtgcctggctaccggcttctaccccgaccatgtggaactgtcttggtgggtcaacggcaaagaggtgcacagcggcgtgtgtaccgacccccagccactgaaagaacagcccgccctgaacgacagccggtactgcctgagcagcagactgagagtgtccgccaccttctggcagaacccccggaaccacttcagatgccaggtgcagttctacggcctgagcgagaacgacgagtggacccaggacagagccaagcccgtgacccagatcgtgtctgccgaagcctggggcagagccgattgcgacgtgaagctggtggaaaagagcttcgagacagacaccaacctgaacttccagaacctgagcgtgatcggcttcagaatcctgctgctgaaagtggccggctttaacctgctgatgaccctgcggctgtggtccagcagggccaagcgatctggatctggagcaacaaacttctcactactcaaacaagcaggtgacgtggaggagaatcccgggcctactagcgccaccatggccttaccagtgaccgccttgctcctgccgctggccttgctgctccacgccgccaggccgctgttcaatcaagaggtgcagatccctctgaccgagagctactgtggcccctgtcctaagaactggatctgctacaagaacaactgctaccagttcttcgacgagagcaagaattggtacgagagccaggccagctgcatgagccagaatgccagcctgctgaaggtgtacagcaaagaggaccaggacctgctgaaactggtcaagagcgcccactggatgggccttgtgcacatccccaccaatggctcttggcagtgggaggacggcagcattctgagccctaacctgctgaccatcatcgagatgcagaagggcgactgcgccctgtacgccagcagctttaagggcttcatcgagaattgcagcaccccgaacacctacatctgtatgcagagaaccgttggcggaggcggaagtggaggcggaggatctggcggcggaggctctgacctctttaatcaagaagtccagattccactcaccgaatcctactgcggaccttgtccaaaaaattggatttgttataagaacaactgttatcaattctttgatgagtctaaaaattggtatgagtcccaggcttcctgcatgtctcagaacgcttctctgctgaaagtctactctaaagaagatcaggatctcctgaagctcgtcaagtctgcccattggatggggctcgtccacattcctaccaacggaagctggcaatgggaagatggctccatcctgtctccaaatctgctcacgattattgaaatgcagaaaggggattgtgctctctacgccagctccttcaagggatttattgagaactgtagcacgcccaatacttatatctgtatgcaacggaccgtgacgcgtatccagaaccctgatcctgccgtgtaccagctgcgggatagcaagagcagcgacaagagcgtgtgtctgttcaccgacttcgacagccagaccaacgtgtcccagagcaaggactccgacgtgtacatcaccgataagtgcgtgctggacatgcggagcatggacttcaagagcaactccgccgtggcctggtccaacaagtccgatttcgcctgcgccaacgccttcaacaacagcattatccccgaggacacattcttcccaagccccgagagcagctgcggctttaccagcgagagctaccagcagggcgtgctgagcgccaccatcctgtacgagatcctgctgggcaaggccaccctgtacgccgtgctggtgtctgccctggtgctgatggctatggtcaagcggaaggacagccgggga

SEQ ID NO: 17751 - DNA, 2124 bp, synthetic construct
  source 1..2124: mol_type = other DNA
atggccttaccagtgaccgccttgctcctgccgctggccttgctgctccacgccgccaggccgctcgaggaggacctgaagaacgtgttcccacctgaggtggccgtgttcgagcctagcgaggccgagatcagccacacccagaaagccaccctcgtgtgcctggctaccggcttctaccccgaccatgtggaactgtcttggtgggtcaacggcaaagaggtgcacagcggcgtgtgtaccgacccccagccactgaaagaacagcccgccctgaacgacagccggtactgcctgagcagcagactgagagtgtccgccaccttctggcagaacccccggaaccacttcagatgccaggtgcagttctacggcctgagcgagaacgacgagtggacccaggacagagccaagcccgtgacccagatcgtgtctgccgaagcctggggcagagccgattgcgacgtgaagctggtggaaaagagcttcgagacagacaccaacctgaacttccagaacctgagcgtgatcggcttcagaatcctgctgctgaaagtggccggctttaacctgctgatgaccctgcggctgtggtccagcagggccaagcgatctggatctggagcaacaaacttctcactactcaaacaagcaggtgacgtggaggagaatcccgggcctactagcatggccttaccagtgaccgccttgctcctgccgctggccttgctgctccacgccgccaggccgatggaccccgacctggaaatcagagccgccttcctgcggcagagaaacacagccctgagaacagaggtggccgagctggaacaagaggtgcagcggctggaaaacgaggtgtcccagtacgagacaagatacggccctctcggaggcggaaaaggtaccggcggaggcggatctggcggcggaggtagcggtggcggaggatctgaattcgacatccagatgacacagagccctagcagcctgtctgccagcgtgggagacagagtgaccatcacatgcaaggccagcgaccacatcaacaactggctggcctggtatcagcagaagcctggacaggcccctaagctgctgatctacggcgctaccacactggaaacaggcgtgcccagcagattttctggcagcggctctggcaccgactacaccctgacaatatccagcctccagcctgaggacttcgccacctactactgtcagcagagctggaacaccccttggacattcggccagggcaccaagctggaaatcaagagaggcggaggcggaagtggaggcggaggatctggcggcggaggctctcaagttcagcttcaacagcctggcgctgagctggtcaaacctggcgcttctgtgaagatgagctgcaaagccagcggctacgccttcagcagctactggatcaactggatgaagcagaaacccggccagggactcgaatggatcggccaaatctatcccggcgacggcgacaccaactacaacggcaagttcaagggcagagccacactgaccgccgatacctctagcagcacagcctacatgcagctgagcagcctgaccagcgaagatagcgccgtgtacttctgtgcccggtccatcacaacagtcgtgggctgcgctatggactattggggccagggaacaagcgtgaccgtgtctagtacgcgtatccagaaccctgatcctgccgtgtaccagctgcgggatagcaagagcagcgacaagagcgtgtgtctgttcaccgacttcgacagccagaccaacgtgtcccagagcaaggactccgacgtgtacatcaccgataagtgcgtgctggacatgcggagcatggacttcaagagcaactccgccgtggcctggtccaacaagtccgatttcgcctgcgccaacgccttcaacaacagcattatccccgaggacacattcttcccaagccccgagagcagctgcggctttaccagcgagagctaccagcagggcgtgctgagcgccaccatcctgtacgagatcctgctgggcaaggccaccctgtacgccgtgctggtgtctgccctggtgctgatggctatggtcaagcggaaggacagccgggga

SEQ ID NO: 17752 - DNA, 2829 bp, synthetic construct
  source 1..2829: mol_type = other DNA
atggccttaccagtgaccgccttgctcctgccgctggccttgctgctccacgccgccaggccgctcgaggaggacctgaagaacgtgttcccacctgaggtggccgtgttcgagcctagcgaggccgagatcagccacacccagaaagccaccctcgtgtgcctggctaccggcttctaccccgaccatgtggaactgtcttggtgggtcaacggcaaagaggtgcacagcggcgtgtgtaccgacccccagccactgaaagaacagcccgccctgaacgacagccggtactgcctgagcagcagactgagagtgtccgccaccttctggcagaacccccggaaccacttcagatgccaggtgcagttctacggcctgagcgagaacgacgagtggacccaggacagagccaagcccgtgacccagatcgtgtctgccgaagcctggggcagagccgattgcgacgtgaagctggtggaaaagagcttcgagacagacaccaacctgaacttccagaacctgagcgtgatcggcttcagaatcctgctgctgaaagtggccggctttaacctgctgatgaccctgcggctgtggtccagcagggccaagcgatctggatctggagcaacaaacttctcactactcaaacaagcaggtgacgtggaggagaatcccgggcctactagcatggccttaccagtgaccgccttgctcctgccgctggccttgctgctccacgccgccaggccgctgttcaatcaagaggtgcagatccctctgaccgagagctactgtggcccctgtcctaagaactggatctgctacaagaacaactgctaccagttcttcgacgagagcaagaattggtacgagagccaggccagctgcatgagccagaatgccagcctgctgaaggtgtacagcaaagaggaccaggacctgctgaaactggtcaagagcgcccactggatgggccttgtgcacatccccaccaatggctcttggcagtgggaggacggcagcattctgagccctaacctgctgaccatcatcgagatgcagaagggcgactgcgccctgtacgccagcagctttaagggcttcatcgagaattgcagcaccccgaacacctacatctgtatgcagagaaccgttggcggaggcggaagtggaggcggaggatctggcggcggaggctctgacctctttaatcaagaagtccagattccactcaccgaatcctactgcggaccttgtccaaaaaattggatttgttataagaacaactgttatcaattctttgatgagtctaaaaattggtatgagtcccaggcttcctgcatgtctcagaacgcttctctgctgaaagtctactctaaagaagatcaggatctcctgaagctcgtcaagtctgcccattggatggggctcgtccacattcctaccaacggaagctggcaatgggaagatggctccatcctgtctccaaatctgctcacgattattgaaatgcagaaaggggattgtgctctctacgccagctccttcaagggatttattgagaactgtagcacgcccaatacttatatctgtatgcaacggaccgtgggtaccggcggaggcggatctggcggcggaggtagcggtggcggaggatctgaattcgacatccagatgacacagagccctagcagcctgtctgccagcgtgggagacagagtgaccatcacatgcaaggccagcgaccacatcaacaactggctggcctggtatcagcagaagcctggacaggcccctaagctgctgatctacggcgctaccacactggaaacaggcgtgcccagcagattttctggcagcggctctggcaccgactacaccctgacaatatccagcctccagcctgaggacttcgccacctactactgtcagcagagctggaacaccccttggacattcggccagggcaccaagctggaaatcaagagaggcggaggcggaagtggaggcggaggatctggcggcggaggctctcaagttcagcttcaacagcctggcgctgagctggtcaaacctggcgcttctgtgaagatgagctgcaaagccagcggctacgccttcagcagctactggatcaactggatgaagcagaaacccggccagggactcgaatggatcggccaaatctatcccggcgacggcgacaccaactacaacggcaagttcaagggcagagccacactgaccgccgatacctctagcagcacagcctacatgcagctgagcagcctgaccagcgaagatagcgccgtgtacttctgtgcccggtccatcacaacagtcgtgggctgcgctatggactattggggccagggaacaagcgtgaccgtgtctagtacgcgtatccagaaccctgatcctgccgtgtaccagctgcgggatagcaagagcagcgacaagagcgtgtgtctgttcaccgacttcgacagccagaccaacgtgtcccagagcaaggactccgacgtgtacatcaccgataagtgcgtgctggacatgcggagcatggacttcaagagcaactccgccgtggcctggtccaacaagtccgatttcgcctgcgccaacgccttcaacaacagcattatccccgaggacacattcttcccaagccccgagagcagctgcggctttaccagcgagagctaccagcagggcgtgctgagcgccaccatcctgtacgagatcctgctgggcaaggccaccctgtacgccgtgctggtgtctgccctggtgctgatggctatggtcaagcggaaggacagccgggga

SEQ ID NO: 17753 - DNA, 1944 bp, synthetic construct
  source 1..1944: mol_type = other DNA
atggccttaccagtgaccgccttgctcctgccgctggccttgctgctccacgccgccaggccgctcgaggaggacctgaagaacgtgttcccacctgaggtggccgtgttcgagcctagcgaggccgagatcagccacacccagaaagccaccctcgtgtgcctggctaccggcttctaccccgaccatgtggaactgtcttggtgggtcaacggcaaagaggtgcacagcggcgtgtgtaccgacccccagccactgaaagaacagcccgccctgaacgacagccggtactgcctgagcagcagactgagagtgtccgccaccttctggcagaacccccggaaccacttcagatgccaggtgcagttctacggcctgagcgagaacgacgagtggacccaggacagagccaagcccgtgacccagatcgtgtctgccgaagcctggggcagagccgattgcgacgtgaagctggtggaaaagagcttcgagacagacaccaacctgaacttccagaacctgagcgtgatcggcttcagaatcctgctgctgaaagtggccggctttaacctgctgatgaccctgcggctgtggtccagcagggccaagcgatctggatctggagcaacaaacttctcactactcaaacaagcaggtgacgtggaggagaatcccgggcctactagcatggccttaccagtgaccgccttgctcctgccgctggccttgctgctccacgccgccaggccgcagtctgtgctgacacagcctcctagtgtgtctggcgctcctggacagagagtgaccatctcttgtaccggcagcagcagcaatatcggagccggctatgacgtgcactggtatcagcagctccctggcacagcccctaaactgctgatcttcggcaacagcaacagacccagcggcgtgcccgatagattcagcggctttaagagcggcacaagcgccagcctggctatcactggactgcaagccgaggacgaggccgactacttctgccagagctacgatagcagcctgagcggcagcggagtgtttggcacaggcaccaaagtgacagtgcttggcggcggaggcggaagtggaggcggaggatctggcggcggaggctctcaaatgcaactggttcaaagcggcggtggcctggtgcaacctggaagaagtctgagactgagctgtgccgccagcggcttcaccttcgatgattacgccatgcactgggtccgacaggcccctggaaaaggactggaatgggtgtccggcatctcctggaatagcggctctatcggctacgccgacagcgtgaagggcagattcaccatcagccgggacaacgccaagaacagcctgtacctccagatgaactccctgagagccgaggatacagccctgtactactgcgccaaggacatccacagcggcagctactacggcctgctgtactacgctatggacgtgtggggccagggcacaaccgtgacagtttcttctacgcgtatccagaaccctgatcctgccgtgtaccagctgcgggatagcaagagcagcgacaagagcgtgtgtctgttcaccgacttcgacagccagaccaacgtgtcccagagcaaggactccgacgtgtacatcaccgataagtgcgtgctggacatgcggagcatggacttcaagagcaactccgccgtggcctggtccaacaagtccgatttcgcctgcgccaacgccttcaacaacagcattatccccgaggacacattcttcccaagccccgagagcagctgcggctttaccagcgagagctaccagcagggcgtgctgagcgccaccatcctgtacgagatcctgctgggcaaggccaccctgtacgccgtgctggtgtctgccctggtgctgatggctatggtcaagcggaaggacagccgggga

SEQ ID NO: 17754 - DNA, 1455 bp, synthetic construct
  source 1..1455: mol_type = other DNA
atggccttaccagtgaccgccttgctcctgccgctggccttgctgctccacgccgccaggccgctcgaggaggacctgaagaacgtgttcccacctgaggtggccgtgttcgagcctagcgaggccgagatcagccacacccagaaagccaccctcgtgtgcctggctaccggcttctaccccgaccatgtggaactgtcttggtgggtcaacggcaaagaggtgcacagcggcgtgtgtaccgacccccagccactgaaagaacagcccgccctgaacgacagccggtactgcctgagcagcagactgagagtgtccgccaccttctggcagaacccccggaaccacttcagatgccaggtgcagttctacggcctgagcgagaacgacgagtggacccaggacagagccaagcccgtgacccagatcgtgtctgccgaagcctggggcagagccgattgcgacgtgaagctggtggaaaagagcttcgagacagacaccaacctgaacttccagaacctgagcgtgatcggcttcagaatcctgctgctgaaagtggccggctttaacctgctgatgaccctgcggctgtggtccagcagggccaagcgatctggatctggagcaacaaacttctcactactcaaacaagcaggtgacgtggaggagaatcccgggcctactagcatggccttaccagtgaccgccttgctcctgccgctggccttgctgctccacgccgccaggccgatgtgtatgccctgcttcaccaccgaccatcagatggcccggaagtgcgacgattgctgtggcggaaaaggcagaggcaagtgctacggccctcagtgcttgtgtagactcgagggcggaggcggaagtggaggcggaggatctggcggcggaggctctttcgaagtgtgtatgccttgttttaccacggatcaacaaatggctcgcaagtgttctgactgctgcggaggcaaaggccggggaaagtgttatggcccacagtgtctgtgccggacgcgtatccagaaccctgatcctgccgtgtaccagctgcgggatagcaagagcagcgacaagagcgtgtgtctgttcaccgacttcgacagccagaccaacgtgtcccagagcaaggactccgacgtgtacatcaccgataagtgcgtgctggacatgcggagcatggacttcaagagcaactccgccgtggcctggtccaacaagtccgatttcgcctgcgccaacgccttcaacaacagcattatccccgaggacacattcttcccaagccccgagagcagctgcggctttaccagcgagagctaccagcagggcgtgctgagcgccaccatcctgtacgagatcctgctgggcaaggccaccctgtacgccgtgctggtgtctgccctggtgctgatggctatggtcaagcggaaggacagccgggga

SEQ ID NO: 17755 - DNA, 2244 bp, synthetic construct
  source 1..2244: mol_type = other DNA
atggccttaccagtgaccgccttgctcctgccgctggccttgctgctccacgccgccaggccgctcgaggaggacctgaagaacgtgttcccacctgaggtggccgtgttcgagcctagcgaggccgagatcagccacacccagaaagccaccctcgtgtgcctggctaccggcttctaccccgaccatgtggaactgtcttggtgggtcaacggcaaagaggtgcacagcggcgtgtgtaccgacccccagccactgaaagaacagcccgccctgaacgacagccggtactgcctgagcagcagactgagagtgtccgccaccttctggcagaacccccggaaccacttcagatgccaggtgcagttctacggcctgagcgagaacgacgagtggacccaggacagagccaagcccgtgacccagatcgtgtctgccgaagcctggggcagagccgattgcgacgtgaagctggtggaaaagagcttcgagacagacaccaacctgaacttccagaacctgagcgtgatcggcttcagaatcctgctgctgaaagtggccggctttaacctgctgatgaccctgcggctgtggtccagcagggccaagcgatctggatctggagcaacaaacttctcactactcaaacaagcaggtgacgtggaggagaatcccgggcctactagcatggccttaccagtgaccgccttgctcctgccgctggccttgctgctccacgccgccaggccgatgtgtatgccctgcttcaccaccgaccatcagatggcccggaagtgcgacgattgctgtggcggaaaaggcagaggcaagtgctacggccctcagtgcttgtgtagactcgagggcggaggcggaagtggaggcggaggatctggcggcggaggctctttcgaagtgtgtatgccttgttttaccacggatcaacaaatggctcgcaagtgttctgactgctgcggaggcaaaggccggggaaagtgttatggcccacagtgtctgtgccggggtaccggcggaggcggatctggcggcggaggtagcggtggcggaggatctgaattcgacatccagatgacacagagccctagcagcctgtctgccagcgtgggagacagagtgaccatcacatgcaaggccagcgaccacatcaacaactggctggcctggtatcagcagaagcctggacaggcccctaagctgctgatctacggcgctaccacactggaaacaggcgtgcccagcagattttctggcagcggctctggcaccgactacaccctgacaatatccagcctccagcctgaggacttcgccacctactactgtcagcagagctggaacaccccttggacattcggccagggcaccaagctggaaatcaagagaggcggaggcggaagtggaggcggaggatctggcggcggaggctctcaagttcagcttcaacagcctggcgctgagctggtcaaacctggcgcttctgtgaagatgagctgcaaagccagcggctacgccttcagcagctactggatcaactggatgaagcagaaacccggccagggactcgaatggatcggccaaatctatcccggcgacggcgacaccaactacaacggcaagttcaagggcagagccacactgaccgccgatacctctagcagcacagcctacatgcagctgagcagcctgaccagcgaagatagcgccgtgtacttctgtgcccggtccatcacaacagtcgtgggctgcgctatggactattggggccagggaacaagcgtgaccgtgtctagtacgcgtatccagaaccctgatcctgccgtgtaccagctgcgggatagcaagagcagcgacaagagcgtgtgtctgttcaccgacttcgacagccagaccaacgtgtcccagagcaaggactccgacgtgtacatcaccgataagtgcgtgctggacatgcggagcatggacttcaagagcaactccgccgtggcctggtccaacaagtccgatttcgcctgcgccaacgccttcaacaacagcattatccccgaggacacattcttcccaagccccgagagcagctgcggctttaccagcgagagctaccagcagggcgtgctgagcgccaccatcctgtacgagatcctgctgggcaaggccaccctgtacgccgtgctggtgtctgccctggtgctgatggctatggtcaagcggaaggacagccgggga

SEQ ID NO: 17756 - DNA, 2469 bp, synthetic construct
  source 1..2469: mol_type = other DNA
atggccttaccagtgaccgccttgctcctgccgctggccttgctgctccacgccgccaggccgctcgaggaggacctgaagaacgtgttcccacctgaggtggccgtgttcgagcctagcgaggccgagatcagccacacccagaaagccaccctcgtgtgcctggctaccggcttctaccccgaccatgtggaactgtcttggtgggtcaacggcaaagaggtgcacagcggcgtgtgtaccgacccccagccactgaaagaacagcccgccctgaacgacagccggtactgcctgagcagcagactgagagtgtccgccaccttctggcagaacccccggaaccacttcagatgccaggtgcagttctacggcctgagcgagaacgacgagtggacccaggacagagccaagcccgtgacccagatcgtgtctgccgaagcctggggcagagccgattgcgacgtgaagctggtggaaaagagcttcgagacagacaccaacctgaacttccagaacctgagcgtgatcggcttcagaatcctgctgctgaaagtggccggctttaacctgctgatgaccctgcggctgtggtccagcagggccaagcgatctggatctggagcaacaaacttctcactactcaaacaagcaggtgacgtggaggagaatcccgggcctactagcatggccttaccagtgaccgccttgctcctgccgctggccttgctgctccacgccgccaggccgagccccgtagctcctgcctgtgaccccagactcctaaataaactgctgcgtgactcccacctccttcacagccgactgagtcagtgtcccgacgtggaccctttgtctatccctgttctgctgcctgctgtggactttagcctgggagaatggaaaacccagacggaacagagcaaggcacaggacattctaggggcagtgtcccttctactggagggagtgatggcagcacgaggacagttggaaccctcctgcctctcatccctcctgggacagctttctgggcaggttcgcctcctcttgggggccctgcagggcctcctaggaacccagcttcctctacagggcaggaccacagctcacaaggaccccaatgccctcttcttgagcttgcaacaactgcttcggggaaaggtgcgcttcctgcttctggtagaaggtcccaccctctgtgtcagacggaccctgccaaccacagctgtcccaagcagtacttctggtaccggcggaggcggatctggcggcggaggtagcggtggcggaggatctgaattcgacatccagatgacacagagccctagcagcctgtctgccagcgtgggagacagagtgaccatcacatgcaaggccagcgaccacatcaacaactggctggcctggtatcagcagaagcctggacaggcccctaagctgctgatctacggcgctaccacactggaaacaggcgtgcccagcagattttctggcagcggctctggcaccgactacaccctgacaatatccagcctccagcctgaggacttcgccacctactactgtcagcagagctggaacaccccttggacattcggccagggcaccaagctggaaatcaagagaggcggaggcggaagtggaggcggaggatctggcggcggaggctctcaagttcagcttcaacagcctggcgctgagctggtcaaacctggcgcttctgtgaagatgagctgcaaagccagcggctacgccttcagcagctactggatcaactggatgaagcagaaacccggccagggactcgaatggatcggccaaatctatcccggcgacggcgacaccaactacaacggcaagttcaagggcagagccacactgaccgccgatacctctagcagcacagcctacatgcagctgagcagcctgaccagcgaagatagcgccgtgtacttctgtgcccggtccatcacaacagtcgtgggctgcgctatggactattggggccagggaacaagcgtgaccgtgtctagtacgcgtatccagaaccctgatcctgccgtgtaccagctgcgggatagcaagagcagcgacaagagcgtgtgtctgttcaccgacttcgacagccagaccaacgtgtcccagagcaaggactccgacgtgtacatcaccgataagtgcgtgctggacatgcggagcatggacttcaagagcaactccgccgtggcctggtccaacaagtccgatttcgcctgcgccaacgccttcaacaacagcattatccccgaggacacattcttcccaagccccgagagcagctgcggctttaccagcgagagctaccagcagggcgtgctgagcgccaccatcctgtacgagatcctgctgggcaaggccaccctgtacgccgtgctggtgtctgccctggtgctgatggctatggtcaagcggaaggacagccgggga

SEQ ID NO: 17757 - DNA, 2190 bp, synthetic construct
  source 1..2190: mol_type = other DNA
atggccttaccagtgaccgccttgctcctgccgctggccttgctgctccacgccgccaggccgctcgaggaggacctgaagaacgtgttcccacctgaggtggccgtgttcgagcctagcgaggccgagatcagccacacccagaaagccaccctcgtgtgcctggctaccggcttctaccccgaccatgtggaactgtcttggtgggtcaacggcaaagaggtgcacagcggcgtgtgtaccgacccccagccactgaaagaacagcccgccctgaacgacagccggtactgcctgagcagcagactgagagtgtccgccaccttctggcagaacccccggaaccacttcagatgccaggtgcagttctacggcctgagcgagaacgacgagtggacccaggacagagccaagcccgtgacccagatcgtgtctgccgaagcctggggcagagccgattgcgacgtgaagctggtggaaaagagcttcgagacagacaccaacctgaacttccagaacctgagcgtgatcggcttcagaatcctgctgctgaaagtggccggctttaacctgctgatgaccctgcggctgtggtccagcagggccaagcgatctggatctggagcaacaaacttctcactactcaaacaagcaggtgacgtggaggagaatcccgggcctactagcatggccttaccagtgaccgccttgctcctgccgctggccttgctgctccacgccgccaggccgatgggcagctgggaagagttcgagctgagactgaacgccatcgaggaacggctgtatgccctcggaggatctgaagccgagctggcctacttcgagtacgtgatcgccgacttcgagggcaacctgcagcggtacaaaggcaagggcaaccctgaagtggaagccctgtacttcgaggccgacgccatcttcgaggaactggtggcctacagacacaacggtaccggcggaggcggatctggcggcggaggtagcggtggcggaggatctgaattcgacatccagatgacacagagccctagcagcctgtctgccagcgtgggagacagagtgaccatcacatgcaaggccagcgaccacatcaacaactggctggcctggtatcagcagaagcctggacaggcccctaagctgctgatctacggcgctaccacactggaaacaggcgtgcccagcagattttctggcagcggctctggcaccgactacaccctgacaatatccagcctccagcctgaggacttcgccacctactactgtcagcagagctggaacaccccttggacattcggccagggcaccaagctggaaatcaagagaggcggaggcggaagtggaggcggaggatctggcggcggaggctctcaagttcagcttcaacagcctggcgctgagctggtcaaacctggcgcttctgtgaagatgagctgcaaagccagcggctacgccttcagcagctactggatcaactggatgaagcagaaacccggccagggactcgaatggatcggccaaatctatcccggcgacggcgacaccaactacaacggcaagttcaagggcagagccacactgaccgccgatacctctagcagcacagcctacatgcagctgagcagcctgaccagcgaagatagcgccgtgtacttctgtgcccggtccatcacaacagtcgtgggctgcgctatggactattggggccagggaacaagcgtgaccgtgtctagtacgcgtatccagaaccctgatcctgccgtgtaccagctgcgggatagcaagagcagcgacaagagcgtgtgtctgttcaccgacttcgacagccagaccaacgtgtcccagagcaaggactccgacgtgtacatcaccgataagtgcgtgctggacatgcggagcatggacttcaagagcaactccgccgtggcctggtccaacaagtccgatttcgcctgcgccaacgccttcaacaacagcattatccccgaggacacattcttcccaagccccgagagcagctgcggctttaccagcgagagctaccagcagggcgtgctgagcgccaccatcctgtacgagatcctgctgggcaaggccaccctgtacgccgtgctggtgtctgccctggtgctgatggctatggtcaagcggaaggacagccgggga

SEQ ID NO: 17758 - DNA, 2610 bp, synthetic construct
  source 1..2610: mol_type = other DNA
atggccttaccagtgaccgccttgctcctgccgctggccttgctgctccacgccgccaggccgctcgagatccagaaccctgatcctgccgtgtaccagctgcgggatagcaagagcagcgacaagagcgtgtgtctgttcaccgacttcgacagccagaccaacgtgtcccagagcaaggactccgacgtgtacatcaccgataagtgcgtgctggacatgcggagcatggacttcaagagcaactccgccgtggcctggtccaacaagtccgatttcgcctgcgccaacgccttcaacaacagcattatccccgaggacacattcttcccaagccccgagagcagctgcggctttaccagcgagagctaccagcagggcgtgctgagcgccaccatcctgtacgagatcctgctgggcaaggccaccctgtacgccgtgctggtgtctgccctggtgctgatggctatggtcaagcggaaggacagccggggaagggccaagcgatctggatctggagcaacaaacttctcactactcaaacaagcaggtgacgtggaggagaatcccgggcctactagcatggccttaccagtgaccgccttgctcctgccgctggccttgctgctccacgccgccaggccggacatccagatgacacagactacatcctccctgtctgcctctctgggagacagagtcaccatcagttgcagggcaagtcaggacattagtaaatatttaaattggtatcagcagaaaccagatggaactgttaaactcctgatctaccatacatcaagattacactcaggagtcccatcaaggttcagtggcagtgggtctggaacagattattctctcaccattagcaacctggagcaagaagatattgccacttacttttgccaacagggtaatacgcttccgtacacgttcggaggggggaccaagctggagatcacaggtggcggtggctcgggcggtggtgggtcgggtggcggcggatctgaggtgaaactgcaggagtcaggacctggcctggtggcgccctcacagagcctgtccgtcacatgcactgtctcaggggtctcattacccgactatggtgtaagctggattcgccagcctccacgaaagggtctggagtggctgggagtaatatggggtagtgaaaccacatactataattcagctctcaaatccagactgaccatcatcaaggacaactccaagagccaagttttcttaaaaatgaacagtctgcaaactgatgacacagccatttactactgtgccaaacattattactacggtggtagctatgctatggactactggggtcaaggaacctcagtcaccgtctcctcaacgcgtgaggacctgaagaacgtgttcccacctgaggtggccgtgttcgagcctagcgaggccgagatcagccacacccagaaagccaccctcgtgtgcctggctaccggcttctaccccgaccatgtggaactgtcttggtgggtcaacggcaaagaggtgcacagcggcgtgtgtaccgacccccagccactgaaagaacagcccgccctgaacgacagccggtactgcctgagcagcagactgagagtgtccgccaccttctggcagaacccccggaaccacttcagatgccaggtgcagttctacggcctgagcgagaacgacgagtggacccaggacagagccaagcccgtgacccagatcgtgtctgccgaagcctggggcagagccgattgcgacgtgaagctggtggaaaagagcttcgagacagacaccaacctgaacttccagaacctgagcgtgatcggcttcagaatcctgctgctgaaagtggccggctttaacctgctgatgaccctgcggctgtggtccagccgcgccaagagaagcggatctggcgtgaagcagaccctgaatttcgacctgctgaagctggctggcgacgtggaatccaacccaggcccttctagaggccatatgaccgagtacaagcccacggtgcgcctcgccacccgcgacgacgtccccagggccgtacgcaccctcgccgccgcgttcgccgactaccccgccacgcgccacaccgtcgatccggaccgccacatcgagcgggtcaccgagctgcaagaactcttcctcacgcgcgtcgggctcgacatcggcaaggtgtgggtcgcggacgacggcgccgcggtggcggtctggaccacgccggagagcgtcgaagcgggggcggtgttcgccgagatcggcccgcgcatggccgagttgagcggttcccggctggccgcgcagcaacagatggaaggcctcctggcgccgcaccggcccaaggagcccgcgtggttcctggccaccgtcggcgtctcgcccgaccaccagggcaagggtctgggcagcgccgtcgtgctccccggagtggaggcggccgagcgcgccggggtgcccgccttcctggagacctccgcgccccgcaacctccccttctacgagcggctcggcttcaccgtcaccgccgacgtcgaggtgcccgaaggaccgcgcacctggtgcatgacccgcaagcccggtgcctga

SEQ ID NO: 17759 - DNA, 2613 bp, synthetic construct
  source 1..2613: mol_type = other DNA
atggccttaccagtgaccgccttgctcctgccgctggccttgctgctccacgccgccaggccgctcgagatccagaaccctgatcctgccgtgtaccagctgcgggatagcaagagcagcgacaagagcgtgtgtctgttcaccgacttcgacagccagaccaacgtgtcccagagcaaggactccgacgtgtacatcaccgataagtgcgtgctggacatgcggagcatggacttcaagagcaactccgccgtggcctggtccaacaagtccgatttcgcctgcgccaacgccttcaacaacagcattatccccgaggacacattcttcccaagccccgagagcagctgcggctttaccagcgagagctaccagcagggcgtgctgagcgccaccatcctgtacgagatcctgctgggcaaggccaccctgtacgccgtgctggtgtctgccctggtgctgatggctatggtcaagcggaaggacagccggggaagggccaagcgatctggatctggagcaacaaacttctcactactcaaacaagcaggtgacgtggaggagaatcccgggcctactagcaccatggccttaccagtgaccgccttgctcctgccgctggccttgctgctccacgccgccaggccggagatcgtgatgacccagagccctgccaccctgtctctgagccctggcgaaagagccaccctgagctgtagagccagccaggacatcagcaagtacctgaactggtatcagcagaagcccggccaggcccccagactgctgatctaccacaccagcagactgcacagcggcatccccgccagattttctggctctggcagcggcaccgactacaccctgacaatcagcagcctccagcccgaggacttcgccgtgtacttctgtcagcaaggcaacaccctgccctacaccttcggccagggcaccaagctggaaatcaagggcggaggcggaagtggaggcggaggatctggcggcggaggctctcaggtgcaactccaggaatctggccctggcctcgtgaagcccagcgagacactgagcctgacctgtaccgtgtccggcgtgtccctgcctgactatggcgtgtcctggatcagacagccccctggcaagggcctggaatggatcggagtgatttggggcagcgaaaccacctactacaacagctccctgaagtccagagtgaccatctccaaggacaactccaagaaccaggtgtccctgaagctgagcagcgtgacagccgccgacaccgccgtgtattactgcgccaagcactactactacggcggcagctacgctatggactactggggccagggaaccctcgtgaccgtgtctagtacgcgtgaggacctgaagaacgtgttcccacctgaggtggccgtgttcgagcctagcgaggccgagatcagccacacccagaaagccaccctcgtgtgcctggctaccggcttctaccccgaccatgtggaactgtcttggtgggtcaacggcaaagaggtgcacagcggcgtgtgtaccgacccccagccactgaaagaacagcccgccctgaacgacagccggtactgcctgagcagcagactgagagtgtccgccaccttctggcagaacccccggaaccacttcagatgccaggtgcagttctacggcctgagcgagaacgacgagtggacccaggacagagccaagcccgtgacccagatcgtgtctgccgaagcctggggcagagccgattgcgacgtgaagctggtggaaaagagcttcgagacagacaccaacctgaacttccagaacctgagcgtgatcggcttcagaatcctgctgctgaaagtggccggctttaacctgctgatgaccctgcggctgtggtccagccgcgccaagagaagcggatctggcgtgaagcagaccctgaatttcgacctgctgaagctggctggcgacgtggaatccaacccaggcccttctagaggccatatgaccgagtacaagcccacggtgcgcctcgccacccgcgacgacgtccccagggccgtacgcaccctcgccgccgcgttcgccgactaccccgccacgcgccacaccgtcgatccggaccgccacatcgagcgggtcaccgagctgcaagaactcttcctcacgcgcgtcgggctcgacatcggcaaggtgtgggtcgcggacgacggcgccgcggtggcggtctggaccacgccggagagcgtcgaagcgggggcggtgttcgccgagatcggcccgcgcatggccgagttgagcggttcccggctggccgcgcagcaacagatggaaggcctcctggcgccgcaccggcccaaggagcccgcgtggttcctggccaccgtcggcgtctcgcccgaccaccagggcaagggtctgggcagcgccgtcgtgctccccggagtggaggcggccgagcgcgccggggtgcccgccttcctggagacctccgcgccccgcaacctccccttctacgagcggctcggcttcaccgtcaccgccgacgtcgaggtgcccgaaggaccgcgcacctggtgcatgacccgcaagcccggtgcctga

SEQ ID NO: 17760 - DNA, 2616 bp, synthetic construct
  source 1..2616: mol_type = other DNA
atggccttaccagtgaccgccttgctcctgccgctggccttgctgctccacgccgccaggccgctcgagatccagaaccctgatcctgccgtgtaccagctgcgggatagcaagagcagcgacaagagcgtgtgtctgttcaccgacttcgacagccagaccaacgtgtcccagagcaaggactccgacgtgtacatcaccgataagtgcgtgctggacatgcggagcatggacttcaagagcaactccgccgtggcctggtccaacaagtccgatttcgcctgcgccaacgccttcaacaacagcattatccccgaggacacattcttcccaagccccgagagcagctgcggctttaccagcgagagctaccagcagggcgtgctgagcgccaccatcctgtacgagatcctgctgggcaaggccaccctgtacgccgtgctggtgtctgccctggtgctgatggctatggtcaagcggaaggacagccggggaagggccaagcgatctggatctggagcaacaaacttctcactactcaaacaagcaggtgacgtggaggagaatcccgggcctactagcaccatggccttaccagtgaccgccttgctcctgccgctggccttgctgctccacgccgccaggccggacgagatcgtgctgacacagagccccgccaccctgtcactgtctccaggcgaaagagccaccctgagctgtagcgccagcagcagcgtgtcctacatgcactggtatcagcagaagcccggccaggcccccagactgctgatctacgataccagcaagctggcctccggcatccccgccagattttctggcagcggctccggcaccgacttcaccctgacaatcagcagcctggaacccgaggacgtggccgtgtactactgttttcaaggcagcgtgtaccccttcaccttcggccagggcaccaagctggaaatcaagagaggtggcggtggctcgggcggtggtgggtcgggtggcggcggatctcaggtgcagctccaggaatctggccctggcctcgtgaagcctagccagaccctgagcctgacctgtaccgtgtctggcggcagcatcagcacaagcggcatgggcgtgggctggatcagacagcaccctggcaagggcctggaatggatcggccacatttggtgggacgacgacaagcggtacaaccccgccctgaagtccagagtgaccatcagcgtggacaccagcaagaaccagttcagcctgaagctgagcagcgtgacagccgccgataccgccgtgtattattgcgcccggatggaactgtggtcctactacttcgactactggggccagggaaccctcgtgaccgtgtctagtacgcgtgaggacctgaagaacgtgttcccacctgaggtggccgtgttcgagcctagcgaggccgagatcagccacacccagaaagccaccctcgtgtgcctggctaccggcttctaccccgaccatgtggaactgtcttggtgggtcaacggcaaagaggtgcacagcggcgtgtgtaccgacccccagccactgaaagaacagcccgccctgaacgacagccggtactgcctgagcagcagactgagagtgtccgccaccttctggcagaacccccggaaccacttcagatgccaggtgcagttctacggcctgagcgagaacgacgagtggacccaggacagagccaagcccgtgacccagatcgtgtctgccgaagcctggggcagagccgattgcgacgtgaagctggtggaaaagagcttcgagacagacaccaacctgaacttccagaacctgagcgtgatcggcttcagaatcctgctgctgaaagtggccggctttaacctgctgatgaccctgcggctgtggtccagccgcgccaagagaagcggatctggcgtgaagcagaccctgaatttcgacctgctgaagctggctggcgacgtggaatccaacccaggcccttctagaggccatatgaccgagtacaagcccacggtgcgcctcgccacccgcgacgacgtccccagggccgtacgcaccctcgccgccgcgttcgccgactaccccgccacgcgccacaccgtcgatccggaccgccacatcgagcgggtcaccgagctgcaagaactcttcctcacgcgcgtcgggctcgacatcggcaaggtgtgggtcgcggacgacggcgccgcggtggcggtctggaccacgccggagagcgtcgaagcgggggcggtgttcgccgagatcggcccgcgcatggccgagttgagcggttcccggctggccgcgcagcaacagatggaaggcctcctggcgccgcaccggcccaaggagcccgcgtggttcctggccaccgtcggcgtctcgcccgaccaccagggcaagggtctgggcagcgccgtcgtgctccccggagtggaggcggccgagcgcgccggggtgcccgccttcctggagacctccgcgccccgcaacctccccttctacgagcggctcggcttcaccgtcaccgccgacgtcgaggtgcccgaaggaccgcgcacctggtgcatgacccgcaagcccggtgcctga

SEQ ID NO: 17761 - DNA, 2604 bp, synthetic construct
  source 1..2604: mol_type = other DNA
atggccttaccagtgaccgccttgctcctgccgctggccttgctgctccacgccgccaggccgctcgagatccagaaccctgatcctgccgtgtaccagctgcgggatagcaagagcagcgacaagagcgtgtgtctgttcaccgacttcgacagccagaccaacgtgtcccagagcaaggactccgacgtgtacatcaccgataagtgcgtgctggacatgcggagcatggacttcaagagcaactccgccgtggcctggtccaacaagtccgatttcgcctgcgccaacgccttcaacaacagcattatccccgaggacacattcttcccaagccccgagagcagctgcggctttaccagcgagagctaccagcagggcgtgctgagcgccaccatcctgtacgagatcctgctgggcaaggccaccctgtacgccgtgctggtgtctgccctggtgctgatggctatggtcaagcggaaggacagccggggaagggccaagcgatctggatctggagcaacaaacttctcactactcaaacaagcaggtgacgtggaggagaatcccgggcctactagcatggccttaccagtgaccgccttgctcctgccgctggccttgctgctccacgccgccaggccggacatccagatgacacagagccctagcagcctgtctgccagcgtgggagacagagtgaccatcacctgtagagccagccaggacatcagcaactacctgaactggtatcagcagaagcccggcaaggcccctaagctgctgatctactacaccagcagactgcacagcggcgtgcccagcagattttctggctctggcagcggcaccgacttcaccctgacaatatctagcctccagcctgaggacttcgccacctactattgccagcagggcaacaccctgccttacacatttggacagggcaccaaggtggaaatcaagagaggcggaggcggaagtggaggcggaggatctggcggcggaggctctgaagtgcagctggttgaatcaggtggcggcctggttcaacctggcggatctctgagactgagctgtgccgccagcggcttcaccttcagcgactactttatgagctgggtccgacaggcccctggcaaaggacttgaatgggtcgccaccatcagcaatggcggcacctacacttactaccccgacagcgtgaagggcagattcaccatctccagagacaacagcaagaacaccctgtacctccagatgaactccctgagagccgaggacaccgccgtgtactactgcgccagattcgacggctacatcttcgactattggggccagggcaccctggtcacagtctcttctacgcgtgaggacctgaagaacgtgttcccacctgaggtggccgtgttcgagcctagcgaggccgagatcagccacacccagaaagccaccctcgtgtgcctggctaccggcttctaccccgaccatgtggaactgtcttggtgggtcaacggcaaagaggtgcacagcggcgtgtgtaccgacccccagccactgaaagaacagcccgccctgaacgacagccggtactgcctgagcagcagactgagagtgtccgccaccttctggcagaacccccggaaccacttcagatgccaggtgcagttctacggcctgagcgagaacgacgagtggacccaggacagagccaagcccgtgacccagatcgtgtctgccgaagcctggggcagagccgattgcgacgtgaagctggtggaaaagagcttcgagacagacaccaacctgaacttccagaacctgagcgtgatcggcttcagaatcctgctgctgaaagtggccggctttaacctgctgatgaccctgcggctgtggtccagccgcgccaagagaagcggatctggcgtgaagcagaccctgaatttcgacctgctgaagctggctggcgacgtggaatccaacccaggcccttctagaggccatatgaccgagtacaagcccacggtgcgcctcgccacccgcgacgacgtccccagggccgtacgcaccctcgccgccgcgttcgccgactaccccgccacgcgccacaccgtcgatccggaccgccacatcgagcgggtcaccgagctgcaagaactcttcctcacgcgcgtcgggctcgacatcggcaaggtgtgggtcgcggacgacggcgccgcggtggcggtctggaccacgccggagagcgtcgaagcgggggcggtgttcgccgagatcggcccgcgcatggccgagttgagcggttcccggctggccgcgcagcaacagatggaaggcctcctggcgccgcaccggcccaaggagcccgcgtggttcctggccaccgtcggcgtctcgcccgaccaccagggcaagggtctgggcagcgccgtcgtgctccccggagtggaggcggccgagcgcgccggggtgcccgccttcctggagacctccgcgccccgcaacctccccttctacgagcggctcggcttcaccgtcaccgccgacgtcgaggtgcccgaaggaccgcgcacctggtgcatgacccgcaagcccggtgcctga

SEQ ID NO: 17762 - DNA, 2616 bp, synthetic construct
  source 1..2616: mol_type = other DNA
atggccttaccagtgaccgccttgctcctgccgctggccttgctgctccacgccgccaggccgctcgagatccagaaccctgatcctgccgtgtaccagctgcgggatagcaagagcagcgacaagagcgtgtgtctgttcaccgacttcgacagccagaccaacgtgtcccagagcaaggactccgacgtgtacatcaccgataagtgcgtgctggacatgcggagcatggacttcaagagcaactccgccgtggcctggtccaacaagtccgatttcgcctgcgccaacgccttcaacaacagcattatccccgaggacacattcttcccaagccccgagagcagctgcggctttaccagcgagagctaccagcagggcgtgctgagcgccaccatcctgtacgagatcctgctgggcaaggccaccctgtacgccgtgctggtgtctgccctggtgctgatggctatggtcaagcggaaggacagccggggaagggccaagcgatctggatctggagcaacaaacttctcactactcaaacaagcaggtgacgtggaggagaatcccgggcctactagcatggccttaccagtgaccgccttgctcctgccgctggccttgctgctccacgccgccaggccggacatccagatgacacagagccctagcagcctgtctgccagcgtgggagacagagtgaccatcacatgcaaggccagcgaccacatcaacaactggctggcctggtatcagcagaagcctggacaggcccctaagctgctgatctacggcgctaccacactggaaacaggcgtgcccagcagattttctggcagcggctctggcaccgactacaccctgacaatatccagcctccagcctgaggacttcgccacctactactgtcagcagagctggaacaccccttggacattcggccagggcaccaagctggaaatcaagagaggcggaggcggaagtggaggcggaggatctggcggcggaggctctcaagttcagcttcaacagcctggcgctgagctggtcaaacctggcgcttctgtgaagatgagctgcaaagccagcggctacgccttcagcagctactggatcaactggatgaagcagaaacccggccagggactcgaatggatcggccaaatctatcccggcgacggcgacaccaactacaacggcaagttcaagggcagagccacactgaccgccgatacctctagcagcacagcctacatgcagctgagcagcctgaccagcgaagatagcgccgtgtacttctgtgcccggtccatcacaacagtcgtgggctgcgctatggactattggggccagggaacaagcgtgaccgtgtctagtacgcgtgaggacctgaagaacgtgttcccacctgaggtggccgtgttcgagcctagcgaggccgagatcagccacacccagaaagccaccctcgtgtgcctggctaccggcttctaccccgaccatgtggaactgtcttggtgggtcaacggcaaagaggtgcacagcggcgtgtgtaccgacccccagccactgaaagaacagcccgccctgaacgacagccggtactgcctgagcagcagactgagagtgtccgccaccttctggcagaacccccggaaccacttcagatgccaggtgcagttctacggcctgagcgagaacgacgagtggacccaggacagagccaagcccgtgacccagatcgtgtctgccgaagcctggggcagagccgattgcgacgtgaagctggtggaaaagagcttcgagacagacaccaacctgaacttccagaacctgagcgtgatcggcttcagaatcctgctgctgaaagtggccggctttaacctgctgatgaccctgcggctgtggtccagccgcgccaagagaagcggatctggcgtgaagcagaccctgaatttcgacctgctgaagctggctggcgacgtggaatccaacccaggcccttctagaggccatatgaccgagtacaagcccacggtgcgcctcgccacccgcgacgacgtccccagggccgtacgcaccctcgccgccgcgttcgccgactaccccgccacgcgccacaccgtcgatccggaccgccacatcgagcgggtcaccgagctgcaagaactcttcctcacgcgcgtcgggctcgacatcggcaaggtgtgggtcgcggacgacggcgccgcggtggcggtctggaccacgccggagagcgtcgaagcgggggcggtgttcgccgagatcggcccgcgcatggccgagttgagcggttcccggctggccgcgcagcaacagatggaaggcctcctggcgccgcaccggcccaaggagcccgcgtggttcctggccaccgtcggcgtctcgcccgaccaccagggcaagggtctgggcagcgccgtcgtgctccccggagtggaggcggccgagcgcgccggggtgcccgccttcctggagacctccgcgccccgcaacctccccttctacgagcggctcggcttcaccgtcaccgccgacgtcgaggtgcccgaaggaccgcgcacctggtgcatgacccgcaagcccggtgcctga

SEQ ID NO: 17763 - DNA, 2622 bp, synthetic construct
  source 1..2622: mol_type = other DNA
atggccttaccagtgaccgccttgctcctgccgctggccttgctgctccacgccgccaggccgctcgagatccagaaccctgatcctgccgtgtaccagctgcgggatagcaagagcagcgacaagagcgtgtgtctgttcaccgacttcgacagccagaccaacgtgtcccagagcaaggactccgacgtgtacatcaccgataagtgcgtgctggacatgcggagcatggacttcaagagcaactccgccgtggcctggtccaacaagtccgatttcgcctgcgccaacgccttcaacaacagcattatccccgaggacacattcttcccaagccccgagagcagctgcggctttaccagcgagagctaccagcagggcgtgctgagcgccaccatcctgtacgagatcctgctgggcaaggccaccctgtacgccgtgctggtgtctgccctggtgctgatggctatggtcaagcggaaggacagccggggaagggccaagcgatctggatctggagcaacaaacttctcactactcaaacaagcaggtgacgtggaggagaatcccgggcctactagcatggccttaccagtgaccgccttgctcctgccgctggccttgctgctccacgccgccaggccgcagatcgtgctgtctcagtctcctgccatcctgagcgcttccccaggcgagaaagtgaccatgacctgtagagccagcagcagcgtgtcctacatgcactggtatcagcagaagcccggcagcagccctaagccttggatctacgccaccagcaatctggcctctggcgtgccagccagattttctggctctggcagcggcaccagctacagcttcacaatcagcagagtggaagccgaggacgccgccacctactattgtcagcagtggaccttcaatcctcctaccttcggcggaggcacccggctggaaatcaaaagaacagtggctgctggcggaggcggaagtggaggcggaggatctggcggcggaggctctcaggcttatctgcaacagagcggagccgaactcgtcagacctggcgcttctgtgaagatgagctgcaaggccagcggctacaccttcaccagctataatatgcactgggtcaagcagacccctcggcagggactcgaatggatcggcggaatctatcccggcaacggcgacacctcctacaaccagaagttcaagggcaaagccacactgaccgtgggcaagagcagcagcaccgcctatatgcagctcagcagcctgaccagcgaggacagcgccgtgtacttctgcgccagatacgactacaactacgctatggactactggggccagggcaccagcgtgacagttagctctgccagcacgcgtgaggacctgaagaacgtgttcccacctgaggtggccgtgttcgagcctagcgaggccgagatcagccacacccagaaagccaccctcgtgtgcctggctaccggcttctaccccgaccatgtggaactgtcttggtgggtcaacggcaaagaggtgcacagcggcgtgtgtaccgacccccagccactgaaagaacagcccgccctgaacgacagccggtactgcctgagcagcagactgagagtgtccgccaccttctggcagaacccccggaaccacttcagatgccaggtgcagttctacggcctgagcgagaacgacgagtggacccaggacagagccaagcccgtgacccagatcgtgtctgccgaagcctggggcagagccgattgcgacgtgaagctggtggaaaagagcttcgagacagacaccaacctgaacttccagaacctgagcgtgatcggcttcagaatcctgctgctgaaagtggccggctttaacctgctgatgaccctgcggctgtggtccagccgcgccaagagaagcggatctggcgtgaagcagaccctgaatttcgacctgctgaagctggctggcgacgtggaatccaacccaggcccttctagaggccatatgaccgagtacaagcccacggtgcgcctcgccacccgcgacgacgtccccagggccgtacgcaccctcgccgccgcgttcgccgactaccccgccacgcgccacaccgtcgatccggaccgccacatcgagcgggtcaccgagctgcaagaactcttcctcacgcgcgtcgggctcgacatcggcaaggtgtgggtcgcggacgacggcgccgcggtggcggtctggaccacgccggagagcgtcgaagcgggggcggtgttcgccgagatcggcccgcgcatggccgagttgagcggttcccggctggccgcgcagcaacagatggaaggcctcctggcgccgcaccggcccaaggagcccgcgtggttcctggccaccgtcggcgtctcgcccgaccaccagggcaagggtctgggcagcgccgtcgtgctccccggagtggaggcggccgagcgcgccggggtgcccgccttcctggagacctccgcgccccgcaacctccccttctacgagcggctcggcttcaccgtcaccgccgacgtcgaggtgcccgaaggaccgcgcacctggtgcatgacccgcaagcccggtgcctga

SEQ ID NO: 17764 - DNA, 2616 bp, synthetic construct
  source 1..2616: mol_type = other DNA
atggccttaccagtgaccgccttgctcctgccgctggccttgctgctccacgccgccaggccgctcgagatccagaaccctgatcctgccgtgtaccagctgcgggatagcaagagcagcgacaagagcgtgtgtctgttcaccgacttcgacagccagaccaacgtgtcccagagcaaggactccgacgtgtacatcaccgataagtgcgtgctggacatgcggagcatggacttcaagagcaactccgccgtggcctggtccaacaagtccgatttcgcctgcgccaacgccttcaacaacagcattatccccgaggacacattcttcccaagccccgagagcagctgcggctttaccagcgagagctaccagcagggcgtgctgagcgccaccatcctgtacgagatcctgctgggcaaggccaccctgtacgccgtgctggtgtctgccctggtgctgatggctatggtcaagcggaaggacagccggggaagggccaagcgatctggatctggagcaacaaacttctcactactcaaacaagcaggtgacgtggaggagaatcccgggcctactagcatggccttaccagtgaccgccttgctcctgccgctggccttgctgctccacgccgccaggccggagatcgtgctgacacagagccctgccaccctgtctctgagccctggcgaaagagccaccctgagctgtagagccagccagagcgtgtccagctacctggcctggtatcagcagaagcccggccaggctccccggctgctgatctacgatgccagcaatagagccaccggcatccccgccagattttccggctctggcagcggcaccgacttcaccctgaccatcagctccctggaacccgaggacttcgccgtgtactactgccagcagcggagcaactggcccatcacattcggccagggcacccggctggaaatcaaaggcggaggcggaagtggaggcggaggatctggcggcggaggctctgaggtgcagcttgttgagtctggcggaggactggtgcagcccgatagaagcctgagactgtcttgtgccgccagcggcttcaccttccacgattatgccatgcactgggtccgacaggcccctggcaaaggacttgaatgggtgtccaccatctcttggaacagcggcacaatcggctacgccgactctgtgaagggcagattcaccatcagccgggacaacgccaagaacagcctgtacctccagatgaactccctgagagccgaggacacagccctgtactactgcgccaaggacatccagtacggcaactactactacggcatggacgtgtggggccagggcacaacagtgacagtctcttctacgcgtgaggacctgaagaacgtgttcccacctgaggtggccgtgttcgagcctagcgaggccgagatcagccacacccagaaagccaccctcgtgtgcctggctaccggcttctaccccgaccatgtggaactgtcttggtgggtcaacggcaaagaggtgcacagcggcgtgtgtaccgacccccagccactgaaagaacagcccgccctgaacgacagccggtactgcctgagcagcagactgagagtgtccgccaccttctggcagaacccccggaaccacttcagatgccaggtgcagttctacggcctgagcgagaacgacgagtggacccaggacagagccaagcccgtgacccagatcgtgtctgccgaagcctggggcagagccgattgcgacgtgaagctggtggaaaagagcttcgagacagacaccaacctgaacttccagaacctgagcgtgatcggcttcagaatcctgctgctgaaagtggccggctttaacctgctgatgaccctgcggctgtggtccagccgcgccaagagaagcggatctggcgtgaagcagaccctgaatttcgacctgctgaagctggctggcgacgtggaatccaacccaggcccttctagaggccatatgaccgagtacaagcccacggtgcgcctcgccacccgcgacgacgtccccagggccgtacgcaccctcgccgccgcgttcgccgactaccccgccacgcgccacaccgtcgatccggaccgccacatcgagcgggtcaccgagctgcaagaactcttcctcacgcgcgtcgggctcgacatcggcaaggtgtgggtcgcggacgacggcgccgcggtggcggtctggaccacgccggagagcgtcgaagcgggggcggtgttcgccgagatcggcccgcgcatggccgagttgagcggttcccggctggccgcgcagcaacagatggaaggcctcctggcgccgcaccggcccaaggagcccgcgtggttcctggccaccgtcggcgtctcgcccgaccaccagggcaagggtctgggcagcgccgtcgtgctccccggagtggaggcggccgagcgcgccggggtgcccgccttcctggagacctccgcgccccgcaacctccccttctacgagcggctcggcttcaccgtcaccgccgacgtcgaggtgcccgaaggaccgcgcacctggtgcatgacccgcaagcccggtgcctga

SEQ ID NO: 17765 - DNA, 2610 bp, synthetic construct
  source 1..2610: mol_type = other DNA
atggccttaccagtgaccgccttgctcctgccgctggccttgctgctccacgccgccaggccgctcgagatccagaaccctgatcctgccgtgtaccagctgcgggatagcaagagcagcgacaagagcgtgtgtctgttcaccgacttcgacagccagaccaacgtgtcccagagcaaggactccgacgtgtacatcaccgataagtgcgtgctggacatgcggagcatggacttcaagagcaactccgccgtggcctggtccaacaagtccgatttcgcctgcgccaacgccttcaacaacagcattatccccgaggacacattcttcccaagccccgagagcagctgcggctttaccagcgagagctaccagcagggcgtgctgagcgccaccatcctgtacgagatcctgctgggcaaggccaccctgtacgccgtgctggtgtctgccctggtgctgatggctatggtcaagcggaaggacagccggggaagggccaagcgatctggatctggagcaacaaacttctcactactcaaacaagcaggtgacgtggaggagaatcccgggcctactagcatggccttaccagtgaccgccttgctcctgccgctggccttgctgctccacgccgccaggccggacatccagatgacccagagccccagcagcctgtctgccagcgtgggcgacagagtgaccatcacctgtagagccagccaggacgtgaacaccgccgtggcctggtatcagcagaagcctggcaaggcccccaagctgctgatctacagcgccagcttcctggaaagcggcgtgcccagcagattcagcggaagcagaagcggcaccgacttcaccctgaccatcagctccctccagcccgaggacttcgccacctactactgccagcagcactacaccacccctcccaccttcggccagaccaaggtggaaatcaagagaggcggaggcggaagtggaggcggaggatctggcggcggaggctctgaagtgcaactggtggaatctggcggcggactggtgcagcctggcggatctctgagactgagctgtgccgccagcggcttcaacatcaaggacacctacatccactgggtgcgccaggcccctggaaagggactggaatgggtggcccggatctaccccaccaacggctacaccagatacgccgacagcgtgaagggccggttcaccatcagcgccgacaccagcaagaataccgcctacctccagatgaacagcctgcgggccgaggataccgccgtgtactactgctcaagatggggaggcgacggcttctacgctatggacgtgtggggccagggcacccttgtgaccgtgtcatctacgcgtgaggacctgaagaacgtgttcccacctgaggtggccgtgttcgagcctagcgaggccgagatcagccacacccagaaagccaccctcgtgtgcctggctaccggcttctaccccgaccatgtggaactgtcttggtgggtcaacggcaaagaggtgcacagcggcgtgtgtaccgacccccagccactgaaagaacagcccgccctgaacgacagccggtactgcctgagcagcagactgagagtgtccgccaccttctggcagaacccccggaaccacttcagatgccaggtgcagttctacggcctgagcgagaacgacgagtggacccaggacagagccaagcccgtgacccagatcgtgtctgccgaagcctggggcagagccgattgcgacgtgaagctggtggaaaagagcttcgagacagacaccaacctgaacttccagaacctgagcgtgatcggcttcagaatcctgctgctgaaagtggccggctttaacctgctgatgaccctgcggctgtggtccagccgcgccaagagaagcggatctggcgtgaagcagaccctgaatttcgacctgctgaagctggctggcgacgtggaatccaacccaggcccttctagaggccatatgaccgagtacaagcccacggtgcgcctcgccacccgcgacgacgtccccagggccgtacgcaccctcgccgccgcgttcgccgactaccccgccacgcgccacaccgtcgatccggaccgccacatcgagcgggtcaccgagctgcaagaactcttcctcacgcgcgtcgggctcgacatcggcaaggtgtgggtcgcggacgacggcgccgcggtggcggtctggaccacgccggagagcgtcgaagcgggggcggtgttcgccgagatcggcccgcgcatggccgagttgagcggttcccggctggccgcgcagcaacagatggaaggcctcctggcgccgcaccggcccaaggagcccgcgtggttcctggccaccgtcggcgtctcgcccgaccaccagggcaagggtctgggcagcgccgtcgtgctccccggagtggaggcggccgagcgcgccggggtgcccgccttcctggagacctccgcgccccgcaacctccccttctacgagcggctcggcttcaccgtcaccgccgacgtcgaggtgcccgaaggaccgcgcacctggtgcatgacccgcaagcccggtgcctga

SEQ ID NO: 17766 - DNA, 2247 bp, synthetic construct
  source 1..2247: mol_type = other DNA
atggccttaccagtgaccgccttgctcctgccgctggccttgctgctccacgccgccaggccgctcgagatccagaaccctgatcctgccgtgtaccagctgcgggatagcaagagcagcgacaagagcgtgtgtctgttcaccgacttcgacagccagaccaacgtgtcccagagcaaggactccgacgtgtacatcaccgataagtgcgtgctggacatgcggagcatggacttcaagagcaactccgccgtggcctggtccaacaagtccgatttcgcctgcgccaacgccttcaacaacagcattatccccgaggacacattcttcccaagccccgagagcagctgcggctttaccagcgagagctaccagcagggcgtgctgagcgccaccatcctgtacgagatcctgctgggcaaggccaccctgtacgccgtgctggtgtctgccctggtgctgatggctatggtcaagcggaaggacagccggggaagggccaagcgatctggatctggagcaacaaacttctcactactcaaacaagcaggtgacgtggaggagaatcccgggcctactagcatggccctgcccgtgacagccctgctgctgcctctggctctgctgctgcacgccgccagacccgatgaattcgaggtgcaactggtggaaagcggcggaggcctggtgcaggctggcggatctctgagactgagctgtgccgccagcggcatcaccttcagcatcaacacaatgggctggtacagacaggcccctggcaagcagagggaactggtggccctgatctccagcatcggcgacacctactacgccgacagcgtgaagggccggttcaccatcagccgggacaacgccaagaacaccgtgtacctccagatgaacagcctgaagcccgaggacaccgccgtgtactactgcaagcggttcagaacagccgcccagggcaccgattattggggccagggaacacaagtgaccgtgtcctctacgcgtgaggacctgaagaacgtgttcccacctgaggtggccgtgttcgagcctagcgaggccgagatcagccacacccagaaagccaccctcgtgtgcctggctaccggcttctaccccgaccatgtggaactgtcttggtgggtcaacggcaaagaggtgcacagcggcgtgtgtaccgacccccagccactgaaagaacagcccgccctgaacgacagccggtactgcctgagcagcagactgagagtgtccgccaccttctggcagaacccccggaaccacttcagatgccaggtgcagttctacggcctgagcgagaacgacgagtggacccaggacagagccaagcccgtgacccagatcgtgtctgccgaagcctggggcagagccgattgcgacgtgaagctggtggaaaagagcttcgagacagacaccaacctgaacttccagaacctgagcgtgatcggcttcagaatcctgctgctgaaagtggccggctttaacctgctgatgaccctgcggctgtggtccagccgcgccaagagaagcggatctggcgtgaagcagaccctgaatttcgacctgctgaagctggctggcgacgtggaatccaacccaggcccttctagaggccatatgaccgagtacaagcccacggtgcgcctcgccacccgcgacgacgtccccagggccgtacgcaccctcgccgccgcgttcgccgactaccccgccacgcgccacaccgtcgatccggaccgccacatcgagcgggtcaccgagctgcaagaactcttcctcacgcgcgtcgggctcgacatcggcaaggtgtgggtcgcggacgacggcgccgcggtggcggtctggaccacgccggagagcgtcgaagcgggggcggtgttcgccgagatcggcccgcgcatggccgagttgagcggttcccggctggccgcgcagcaacagatggaaggcctcctggcgccgcaccggcccaaggagcccgcgtggttcctggccaccgtcggcgtctcgcccgaccaccagggcaagggtctgggcagcgccgtcgtgctccccggagtggaggcggccgagcgcgccggggtgcccgccttcctggagacctccgcgccccgcaacctccccttctacgagcggctcggcttcaccgtcaccgccgacgtcgaggtgcccgaaggaccgcgcacctggtgcatgacccgcaagcccggtgcctga

SEQ ID NO: 17767 - DNA, 2247 bp, synthetic construct; identical to SEQ ID NO: 17766
  source 1..2247: mol_type = other DNA

SEQ ID NO: 17768 - DNA, 3042 bp, synthetic construct
  source 1..3042: mol_type = other DNA
atggccttaccagtgaccgccttgctcctgccgctggccttgctgctccacgccgccaggccgctcgagatccagaaccctgatcctgccgtgtaccagctgcgggatagcaagagcagcgacaagagcgtgtgtctgttcaccgacttcgacagccagaccaacgtgtcccagagcaaggactccgacgtgtacatcaccgataagtgcgtgctggacatgcggagcatggacttcaagagcaactccgccgtggcctggtccaacaagtccgatttcgcctgcgccaacgccttcaacaacagcattatccccgaggacacattcttcccaagccccgagagcagctgcggctttaccagcgagagctaccagcagggcgtgctgagcgccaccatcctgtacgagatcctgctgggcaaggccaccctgtacgccgtgctggtgtctgccctggtgctgatggctatggtcaagcggaaggacagccggggaagggccaagcgatctggatctggagcaacaaacttctcactactcaaacaagcaggtgacgtggaggagaatcccgggcctactagcatggccttaccagtgaccgccttgctcctgccgctggccttgctgctccacgccgccaggccgcaggtccagctcgtcgagtccggcggcggcctcgtccaggccggcgactccgtcaccctctcctgcaccgcctccggccgcaccttctcctcctacgccctcgcctggttccgccagcgccccggcaaggagcgcgagttcgtcgccggcctccgctggggcggccccaccaactacgccgactccgtcaaggaccgcttcaccatctccggcgactccgccaagcacaccatgtacctccagatgaactccctcaagcccgaggacaccgccgtctactactgcggctacaaccccggcggctgggccgtcccctcccagtacgagtacgactcctggggccagggcacccaggtcaccgtctcctccggtaccggcggaggcggatctggcggcggaggtagcggtggcggaggatctgaattcgacatccagatgacacagagccctagcagcctgtctgccagcgtgggagacagagtgaccatcacatgcaaggccagcgaccacatcaacaactggctggcctggtatcagcagaagcctggacaggcccctaagctgctgatctacggcgctaccacactggaaacaggcgtgcccagcagattttctggcagcggctctggcaccgactacaccctgacaatatccagcctccagcctgaggacttcgccacctactactgtcagcagagctggaacaccccttggacattcggccagggcaccaagctggaaatcaagagaggcggaggcggaagtggaggcggaggatctggcggcggaggctctcaagttcagcttcaacagcctggcgctgagctggtcaaacctggcgcttctgtgaagatgagctgcaaagccagcggctacgccttcagcagctactggatcaactggatgaagcagaaacccggccagggactcgaatggatcggccaaatctatcccggcgacggcgacaccaactacaacggcaagttcaagggcagagccacactgaccgccgatacctctagcagcacagcctacatgcagctgagcagcctgaccagcgaagatagcgccgtgtacttctgtgcccggtccatcacaacagtcgtgggctgcgctatggactattggggccagggaacaagcgtgaccgtgtctagtacgcgtgaggacctgaagaacgtgttcccacctgaggtggccgtgttcgagcctagcgaggccgagatcagccacacccagaaagccaccctcgtgtgcctggctaccggcttctaccccgaccatgtggaactgtcttggtgggtcaacggcaaagaggtgcacagcggcgtgtgtaccgacccccagccactgaaagaacagcccgccctgaacgacagccggtactgcctgagcagcagactgagagtgtccgccaccttctggcagaacccccggaaccacttcagatgccaggtgcagttctacggcctgagcgagaacgacgagtggacccaggacagagccaagcccgtgacccagatcgtgtctgccgaagcctggggcagagccgattgcgacgtgaagctggtggaaaagagcttcgagacagacaccaacctgaacttccagaacctgagcgtgatcggcttcagaatcctgctgctgaaagtggccggctttaacctgctgatgaccctgcggctgtggtccagccgcgccaagagaagcggatctggcgtgaagcagaccctgaatttcgacctgctgaagctggctggcgacgtggaatccaacccaggcccttctagaggccatatgaccgagtacaagcccacggtgcgcctcgccacccgcgacgacgtccccagggccgtacgcaccctcgccgccgcgttcgccgactaccccgccacgcgccacaccgtcgatccggaccgccacatcgagcgggtcaccgagctgcaagaactcttcctcacgcgcgtcgggctcgacatcggcaaggtgtgggtcgcggacgacggcgccgcggtggcggtctggaccacgccggagagcgtcgaagcgggggcggtgttcgccgagatcggcccgcgcatggccgagttgagcggttcccggctggccgcgcagcaacagatggaaggcctcctggcgccgcaccggcccaaggagcccgcgtggttcctggccaccgtcggcgtctcgcccgaccaccagggcaagggtctgggcagcgccgtcgtgctccccggagtggaggcggccgagcgcgccggggtgcccgccttcctggagacctccgcgccccgcaacctccccttctacgagcggctcggcttcaccgtcaccgccgacgtcgaggtgcccgaaggaccgcgcacctggtgcatgacccgcaagcccggtgcctga

SEQ ID NO: 17769 - DNA, 3429 bp, synthetic construct
  source 1..3429: mol_type = other DNA
atggccttaccagtgaccgccttgctcctgccgctggccttgctgctccacgccgccaggccgctcgagatccagaaccctgatcctgccgtgtaccagctgcgggatagcaagagcagcgacaagagcgtgtgtctgttcaccgacttcgacagccagaccaacgtgtcccagagcaaggactccgacgtgtacatcaccgataagtgcgtgctggacatgcggagcatggacttcaagagcaactccgccgtggcctggtccaacaagtccgatttcgcctgcgccaacgccttcaacaacagcattatccccgaggacacattcttcccaagccccgagagcagctgcggctttaccagcgagagctaccagcagggcgtgctgagcgccaccatcctgtacgagatcctgctgggcaaggccaccctgtacgccgtgctggtgtctgccctggtgctgatggctatggtcaagcggaaggacagccggggaagggccaagcgatctggatctggagcaacaaacttctcactactcaaacaagcaggtgacgtggaggagaatcccgggcctactagcatggccttaccagtgaccgccttgctcctgccgctggccttgctgctccacgccgccaggccggaggttcagctgcttgagtctggcggaggactggttcaacctggcggaagcctgagactgtcttgtgccgccagcggcttcacctttagcagctacgccatgagctgggtccgacaggctcctggcaaaggactggaatgggtgtccagcatcagcggcagcggcgactacatctactacgccgatagcgtgaagggcagattcaccatcagccgggacatcagcaagaacaccctgtacctccagatgaacagcctgagagccgaggacaccgccgtgtactactgtgccaaagaaggcaccggcgctaacagcagcctggccgattatagaggccagggcacactggtcaccgtgtctagtggcggaggaagcggcggaggatctcaggtccagctcgtcgagtccggcggcggcctcgtccaggccggcgactccgtcaccctctcctgcaccgcctccggccgcaccttctcctcctacgccctcgcctggttccgccagcgccccggcaaggagcgcgagttcgtcgccggcctccgctggggcggccccaccaactacgccgactccgtcaaggaccgcttcaccatctccggcgactccgccaagcacaccatgtacctccagatgaactccctcaagcccgaggacaccgccgtctactactgcggctacaaccccggcggctgggccgtcccctcccagtacgagtacgactcctggggccagggcacccaggtcaccgtctcctccggtaccggcggaggcggatctggcggcggaggtagcggtggcggaggatctgaattcgacatccagatgacacagagccctagcagcctgtctgccagcgtgggagacagagtgaccatcacatgcaaggccagcgaccacatcaacaactggctggcctggtatcagcagaagcctggacaggcccctaagctgctgatctacggcgctaccacactggaaacaggcgtgcccagcagattttctggcagcggctctggcaccgactacaccctgacaatatccagcctccagcctgaggacttcgccacctactactgtcagcagagctggaacaccccttggacattcggccagggcaccaagctggaaatcaagagaggcggaggcggaagtggaggcggaggatctggcggcggaggctctcaagttcagcttcaacagcctggcgctgagctggtcaaacctggcgcttctgtgaagatgagctgcaaagccagcggctacgccttcagcagctactggatcaactggatgaagcagaaacccggccagggactcgaatggatcggccaaatctatcccggcgacggcgacaccaactacaacggcaagttcaagggcagagccacactgaccgccgatacctctagcagcacagcctacatgcagctgagcagcctgaccagcgaagatagcgccgtgtacttctgtgcccggtccatcacaacagtcgtgggctgcgctatggactattggggccagggaacaagcgtgaccgtgtctagtacgcgtgaggacctgaagaacgtgttcccacctgaggtggccgtgttcgagcctagcgaggccgagatcagccacacccagaaagccaccctcgtgtgcctggctaccggcttctaccccgaccatgtggaactgtcttggtgggtcaacggcaaagaggtgcacagcggcgtgtgtaccgacccccagccactgaaagaacagcccgccctgaacgacagccggtactgcctgagcagcagactgagagtgtccgccaccttctggcagaacccccggaaccacttcagatgccaggtgcagttctacggcctgagcgagaacgacgagtggacccaggacagagccaagcccgtgacccagatcgtgtctgccgaagcctggggcagagccgattgcgacgtgaagctggtggaaaagagcttcgagacagacaccaacctgaacttccagaacctgagcgtgatcggcttcagaatcctgctgctgaaagtggccggctttaacctgctgatgaccctgcggctgtggtccagccgcgccaagagaagcggatctggcgtgaagcagaccctgaatttcgacctgctgaagctggctggcgacgtggaatccaacccaggcccttctagaggccatatgaccgagtacaagcccacggtgcgcctcgccacccgcgacgacgtccccagggccgtacgcaccctcgccgccgcgttcgccgactaccccgccacgcgccacaccgtcgatccggaccgccacatcgagcgggtcaccgagctgcaagaactcttcctcacgcgcgtcgggctcgacatcggcaaggtgtgggtcgcggacgacggcgccgcggtggcggtctggaccacgccggagagcgtcgaagcgggggcggtgttcgccgagatcggcccgcgcatggccgagttgagcggttcccggctggccgcgcagcaacagatggaaggcctcctggcgccgcaccggcccaaggagcccgcgtggttcctggccaccgtcggcgtctcgcccgaccaccagggcaagggtctgggcagcgccgtcgtgctccccggagtggaggcggccgagcgcgccggggtgcccgccttcctggagacctccgcgccccgcaacctccccttctacgagcggctcggcttcaccgtcaccgccgacgtcgaggtgcccgaaggaccgcgcacctggtgcatgacccgcaagcccggtgcctga

SEQ ID NO: 17770 - DNA, 3423 bp, synthetic construct
  source 1..3423: mol_type = other DNA
atggccttaccagtgaccgccttgctcctgccgctggccttgctgctccacgccgccaggccgctcgagatccagaaccctgatcctgccgtgtaccagctgcgggatagcaagagcagcgacaagagcgtgtgtctgttcaccgacttcgacagccagaccaacgtgtcccagagcaaggactccgacgtgtacatcaccgataagtgcgtgctggacatgcggagcatggacttcaagagcaactccgccgtggcctggtccaacaagtccgatttcgcctgcgccaacgccttcaacaacagcattatccccgaggacacattcttcccaagccccgagagcagctgcggctttaccagcgagagctaccagcagggcgtgctgagcgccaccatcctgtacgagatcctgctgggcaaggccaccctgtacgccgtgctggtgtctgccctggtgctgatggctatggtcaagcggaaggacagccggggaagggccaagcgatctggatctggagcaacaaacttctcactactcaaacaagcaggtgacgtggaggagaatcccgggcctactagcatggccttaccagtgaccgccttgctcctgccgctggccttgctgctccacgccgccaggccgggcgtgacacagagccccacacacctgattaagaccagaggccagcaggccacactgagatgcagccctatcagcggccacaccagcgtgtactggtatcagcaggctctcggactgggcctccagttcctgctttggtacgacgagggcgaagagagaaaccggggcaacttccctcctcggttttccggcagacagttccccaactacagcagcgagctgaacgtgaacgccctggaactggaagatagcgccctgtacctgtgtgcctcttctcttggtggacctcgcggactggctggactgagaggggatgagcagtttttcggccctggcaccagactgaccgtgctggaaggcggaggaagcggcggaggatctcaggtccagctcgtcgagtccggcggcggcctcgtccaggccggcgactccgtcaccctctcctgcaccgcctccggccgcaccttctcctcctacgccctcgcctggttccgccagcgccccggcaaggagcgcgagttcgtcgccggcctccgctggggcggccccaccaactacgccgactccgtcaaggaccgcttcaccatctccggcgactccgccaagcacaccatgtacctccagatgaactccctcaagcccgaggacaccgccgtctactactgcggctacaaccccggcggctgggccgtcccctcccagtacgagtacgactcctggggccagggcacccaggtcaccgtctcctccggtaccggcggaggcggatctggcggcggaggtagcggtggcggaggatctgaattcgacatccagatgacacagagccctagcagcctgtctgccagcgtgggagacagagtgaccatcacatgcaaggccagcgaccacatcaacaactggctggcctggtatcagcagaagcctggacaggcccctaagctgctgatctacggcgctaccacactggaaacaggcgtgcccagcagattttctggcagcggctctggcaccgactacaccctgacaatatccagcctccagcctgaggacttcgccacctactactgtcagcagagctggaacaccccttggacattcggccagggcaccaagctggaaatcaagagaggcggaggcggaagtggaggcggaggatctggcggcggaggctctcaagttcagcttcaacagcctggcgctgagctggtcaaacctggcgcttctgtgaagatgagctgcaaagccagcggctacgccttcagcagctactggatcaactggatgaagcagaaacccggccagggactcgaatggatcggccaaatctatcccggcgacggcgacaccaactacaacggcaagttcaagggcagagccacactgaccgccgatacctctagcagcacagcctacatgcagctgagcagcctgaccagcgaagatagcgccgtgtacttctgtgcccggtccatcacaacagtcgtgggctgcgctatggactattggggccagggaacaagcgtgaccgtgtctagtacgcgtgaggacctgaagaacgtgttcccacctgaggtggccgtgttcgagcctagcgaggccgagatcagccacacccagaaagccaccctcgtgtgcctggctaccggcttctaccccgaccatgtggaactgtcttggtgggtcaacggcaaagaggtgcacagcggcgtgtgtaccgacccccagccactgaaagaacagcccgccctgaacgacagccggtactgcctgagcagcagactgagagtgtccgccaccttctggcagaacccccggaaccacttcagatgccaggtgcagttctacggcctgagcgagaacgacgagtggacccaggacagagccaagcccgtgacccagatcgtgtctgccgaagcctggggcagagccgattgcgacgtgaagctggtggaaaagagcttcgagacagacaccaacctgaacttccagaacctgagcgtgatcggcttcagaatcctgctgctgaaagtggccggctttaacctgctgatgaccctgcggctgtggtccagccgcgccaagagaagcggatctggcgtgaagcagaccctgaatttcgacctgctgaagctggctggcgacgtggaatccaacccaggcccttctagaggccatatgaccgagtacaagcccacggtgcgcctcgccacccgcgacgacgtccccagggccgtacgcaccctcgccgccgcgttcgccgactaccccgccacgcgccacaccgtcgatccggaccgccacatcgagcgggtcaccgagctgcaagaactcttcctcacgcgcgtcgggctcgacatcggcaaggtgtgggtcgcggacgacggcgccgcggtggcggtctggaccacgccggagagcgtcgaagcgggggcggtgttcgccgagatcggcccgcgcatggccgagttgagcggttcccggctggccgcgcagcaacagatggaaggcctcctggcgccgcaccggcccaaggagcccgcgtggttcctggccaccgtcggcgtctcgcccgaccaccagggcaagggtctgggcagcgccgtcgtgctccccggagtggaggcggccgagcgcgccggggtgcccgccttcctggagacctccgcgccccgcaacctccccttctacgagcggctcggcttcaccgtcaccgccgacgtcgaggtgcccgaaggaccgcgcacctggtgcatgacccgcaagcccggtgcctga

SEQ ID NO: 17771 - DNA, 2703 bp, synthetic construct
  source 1..2703: mol_type = other DNA
atggccttaccagtgaccgccttgctcctgccgctggccttgctgctccacgccgccaggccgctcgagatccagaaccctgatcctgccgtgtaccagctgcgggatagcaagagcagcgacaagagcgtgtgtctgttcaccgacttcgacagccagaccaacgtgtcccagagcaaggactccgacgtgtacatcaccgataagtgcgtgctggacatgcggagcatggacttcaagagcaactccgccgtggcctggtccaacaagtccgatttcgcctgcgccaacgccttcaacaacagcattatccccgaggacacattcttcccaagccccgagagcagctgcggctttaccagcgagagctaccagcagggcgtgctgagcgccaccatcctgtacgagatcctgctgggcaaggccaccctgtacgccgtgctggtgtctgccctggtgctgatggctatggtcaagcggaaggacagccggggaagggccaagcgatctggatctggagcaacaaacttctcactactcaaacaagcaggtgacgtggaggagaatcccgggcctactagcatggccttaccagtgaccgccttgctcctgccgctggccttgctgctccacgccgccaggccgggcgtgacacagagccccacacacctgattaagaccagaggccagcaggccacactgagatgcagccctatcagcggccacaccagcgtgtactggtatcagcaggctctcggactgggcctccagttcctgctttggtacgacgagggcgaagagagaaaccggggcaacttccctcctcggttttccggcagacagttccccaactacagcagcgagctgaacgtgaacgccctggaactggaagatagcgccctgtacctgtgtgcctcttctcttggtggacctcgcggactggctggactgagaggggatgagcagtttttcggccctggcaccagactgaccgtgctggaaggcggaggaagcggcggaggatctggcgtgacacagagccccacacacctgattaagaccagaggccagcaggccacactgagatgcagccctatcagcggccacaccagcgtgtactggtatcagcaggctctcggactgggcctccagttcctgctttggtacgacgagggcgaagagagaaaccggggcaacttccctcctcggttttccggcagacagttccccaactacagcagcgagctgaacgtgaacgccctggaactggaagatagcgccctgtacctgtgtgccagctctctcggcggagatgaactgggagccgatggcaacgagcagttctttggccctggcaccagactgaccgtgctggaaggtaccggcggaggcggatctggcggcggaggtagcggtggcggaggatctgaattcgacatccagatgacacagagccctagcagcctgtctgccagcgtgggagacagagtgaccatcacatgcaaggccagcgaccacatcaacaactggctggcctggtatcagcagaagcctggacaggcccctaagctgctgatctacggcgctaccacactggaaacaggcgtgcccagcagattttctggcagcggctctggcaccgactacaccctgacaatatccagcctccagcctgaggacttcgccacctactactgtcagcagagctggaacaccccttggacattcggccagggcaccaagctggaaatcaagagaggcggaggcggaagtggaggcggaggatctggcggcggaggctctcaagttcagcttcaacagcctggcgctgagctggtcaaacctggcgcttctgtgaagatgagctgcaaagccagcggctacgccttcagcagctactggatcaactggatgaagcagaaacccggccagggactcgaatggatcggccaaatctatcccggcgacggcgacaccaactacaacggcaagttcaagggcagagccacactgaccgccgatacctctagcagcacagcctacatgcagctgagcagcctgaccagcgaagatagcgccgtgtacttctgtgcccggtccatcacaacagtcgtgggctgcgctatggactattggggccagggaacaagcgtgaccgtgtctagtacgcgtgaggacctgaagaacgtgttcccacctgaggtggccgtgttcgagcctagcgaggccgagatcagccacacccagaaagccaccctcgtgtgcctggctaccggcttctaccccgaccatgtggaactgtcttggtgggtcaacggcaaagaggtgcacagcggcgtgtgtaccgacccccagccactgaaagaacagcccgccctgaacgacagccggtactgcctgagcagcagactgagagtgtccgccaccttctggcagaacccccggaaccacttcagatgccaggtgcagttctacggcctgagcgagaacgacgagtggacccaggacagagccaagcccgtgacccagatcgtgtctgccgaagcctggggcagagccgattgcgacgtgaagctggtggaaaagagcttcgagacagacaccaacctgaacttccagaacctgagcgtgatcggcttcagaatcctgctgctgaaagtggccggctttaacctgctgatgaccctgcggctgtggtccagc

SEQ ID NO: 17772 - DNA, 2265 bp, synthetic construct
  source 1..2265: mol_type = other DNA
atggccttaccagtgaccgccttgctcctgccgctggccttgctgctccacgccgccaggccgctcgagatccagaaccctgatcctgccgtgtaccagctgcgggatagcaagagcagcgacaagagcgtgtgtctgttcaccgacttcgacagccagaccaacgtgtcccagagcaaggactccgacgtgtacatcaccgataagtgcgtgctggacatgcggagcatggacttcaagagcaactccgccgtggcctggtccaacaagtccgatttcgcctgcgccaacgccttcaacaacagcattatccccgaggacacattcttcccaagccccgagagcagctgcggctttaccagcgagagctaccagcagggcgtgctgagcgccaccatcctgtacgagatcctgctgggcaaggccaccctgtacgccgtgctggtgtctgccctggtgctgatggctatggtcaagcggaaggacagccggggaagggccaagcgatctggatctggagcaacaaacttctcactactcaaacaagcaggtgacgtggaggagaatcccgggcctactagcatggccctgcccgtgacagccctgctgctgcctctggctctgctgctgcacgccgccagacccgatgaattcggctctgacctgggcatcaagctgctgttcgccgctgccaagggccaggacgacgaagtgcggattctgctggctgctggggccgacgtgaacgccaaggatttcgagggctacacccccctgcacgtggccgcctatgatggacacctggaaatcgtggaagtgctgctgaaggctggcgctgatgtgaatgccaaagacagccagggccggacccctctgcatgaagccgcctacagcggccatctggaaattgtggaagtgctgctgaaagccggggcagacgtgaacgctcaggacgacgctggcgagacaccagccgatctggctgcagcttggggccacgaagatatcgccgaggtgctgcagaagacgcgtgaggacctgaagaacgtgttcccacctgaggtggccgtgttcgagcctagcgaggccgagatcagccacacccagaaagccaccctcgtgtgcctggctaccggcttctaccccgaccatgtggaactgtcttggtgggtcaacggcaaagaggtgcacagcggcgtgtgtaccgacccccagccactgaaagaacagcccgccctgaacgacagccggtactgcctgagcagcagactgagagtgtccgccaccttctggcagaacccccggaaccacttcagatgccaggtgcagttctacggcctgagcgagaacgacgagtggacccaggacagagccaagcccgtgacccagatcgtgtctgccgaagcctggggcagagccgattgcgacgtgaagctggtggaaaagagcttcgagacagacaccaacctgaacttccagaacctgagcgtgatcggcttcagaatcctgctgctgaaagtggccggctttaacctgctgatgaccctgcggctgtggtccagccgcgccaagagaagcggatctggcgtgaagcagaccctgaatttcgacctgctgaagctggctggcgacgtggaatccaacccaggcccttctagaggccatatgaccgagtacaagcccacggtgcgcctcgccacccgcgacgacgtccccagggccgtacgcaccctcgccgccgcgttcgccgactaccccgccacgcgccacaccgtcgatccggaccgccacatcgagcgggtcaccgagctgcaagaactcttcctcacgcgcgtcgggctcgacatcggcaaggtgtgggtcgcggacgacggcgccgcggtggcggtctggaccacgccggagagcgtcgaagcgggggcggtgttcgccgagatcggcccgcgcatggccgagttgagcggttcccggctggccgcgcagcaacagatggaaggcctcctggcgccgcaccggcccaaggagcccgcgtggttcctggccaccgtcggcgtctcgcccgaccaccagggcaagggtctgggcagcgccgtcgtgctccccggagtggaggcggccgagcgcgccggggtgcccgccttcctggagacctccgcgccccgcaacctccccttctacgagcggctcggcttcaccgtcaccgccgacgtcgaggtgcccgaaggaccgcgcacctggtgcatgacccgcaagcccggtgcctga

SEQ ID NO: 17773 - DNA, 2052 bp, synthetic construct
  source 1..2052: mol_type = other DNA
atggccttaccagtgaccgccttgctcctgccgctggccttgctgctccacgccgccaggccgctcgagatccagaaccctgatcctgccgtgtaccagctgcgggatagcaagagcagcgacaagagcgtgtgtctgttcaccgacttcgacagccagaccaacgtgtcccagagcaaggactccgacgtgtacatcaccgataagtgcgtgctggacatgcggagcatggacttcaagagcaactccgccgtggcctggtccaacaagtccgatttcgcctgcgccaacgccttcaacaacagcattatccccgaggacacattcttcccaagccccgagagcagctgcggctttaccagcgagagctaccagcagggcgtgctgagcgccaccatcctgtacgagatcctgctgggcaaggccaccctgtacgccgtgctggtgtctgccctggtgctgatggctatggtcaagcggaaggacagccggggaagggccaagcgatctggatctggagcaacaaacttctcactactcaaacaagcaggtgacgtggaggagaatcccgggcctactagcatggactggatttggcgcatccttttccttgtcggcgctgctaccggcgcccattccttcgaaggcagcggattcgaatacgccaaagagatgcggaacgcctactgggagatcgccctgctgcccaatctgaccaaccagcagaagagagcccccatcagaaagctgtacgacgacccctcccagagcagcgagctgctgtctgaggctaaaaaactgaacgatagccagacgcgtgaggacctgaagaacgtgttcccacctgaggtggccgtgttcgagcctagcgaggccgagatcagccacacccagaaagccaccctcgtgtgcctggctaccggcttctaccccgaccatgtggaactgtcttggtgggtcaacggcaaagaggtgcacagcggcgtgtgtaccgacccccagccactgaaagaacagcccgccctgaacgacagccggtactgcctgagcagcagactgagagtgtccgccaccttctggcagaacccccggaaccacttcagatgccaggtgcagttctacggcctgagcgagaacgacgagtggacccaggacagagccaagcccgtgacccagatcgtgtctgccgaagcctggggcagagccgattgcgacgtgaagctggtggaaaagagcttcgagacagacaccaacctgaacttccagaacctgagcgtgatcggcttcagaatcctgctgctgaaagtggccggctttaacctgctgatgaccctgcggctgtggtccagccgcgccaagagaagcggatctggcgtgaagcagaccctgaatttcgacctgctgaagctggctggcgacgtggaatccaacccaggcccttctagaggccatatgaccgagtacaagcccacggtgcgcctcgccacccgcgacgacgtccccagggccgtacgcaccctcgccgccgcgttcgccgactaccccgccacgcgccacaccgtcgatccggaccgccacatcgagcgggtcaccgagctgcaagaactcttcctcacgcgcgtcgggctcgacatcggcaaggtgtgggtcgcggacgacggcgccgcggtggcggtctggaccacgccggagagcgtcgaagcgggggcggtgttcgccgagatcggcccgcgcatggccgagttgagcggttcccggctggccgcgcagcaacagatggaaggcctcctggcgccgcaccggcccaaggagcccgcgtggttcctggccaccgtcggcgtctcgcccgaccaccagggcaagggtctgggcagcgccgtcgtgctccccggagtggaggcggccgagcgcgccggggtgcccgccttcctggagacctccgcgccccgcaacctccccttctacgagcggctcggcttcaccgtcaccgccgacgtcgaggtgcccgaaggaccgcgcacctggtgcatgacccgcaagcccggtgcctga

SEQ ID NO: 17774 - DNA, 2718 bp, synthetic construct
  source 1..2718: mol_type = other DNA
atggccttaccagtgaccgccttgctcctgccgctggccttgctgctccacgccgccaggccgctcgagatccagaaccctgatcctgccgtgtaccagctgcgggatagcaagagcagcgacaagagcgtgtgtctgttcaccgacttcgacagccagaccaacgtgtcccagagcaaggactccgacgtgtacatcaccgataagtgcgtgctggacatgcggagcatggacttcaagagcaactccgccgtggcctggtccaacaagtccgatttcgcctgcgccaacgccttcaacaacagcattatccccgaggacacattcttcccaagccccgagagcagctgcggctttaccagcgagagctaccagcagggcgtgctgagcgccaccatcctgtacgagatcctgctgggcaaggccaccctgtacgccgtgctggtgtctgccctggtgctgatggctatggtcaagcggaaggacagccggggaagggccaagcgatctggatctggagcaacaaacttctcactactcaaacaagcaggtgacgtggaggagaatcccgggcctactagcatggccctgcccgtgacagccctgctgctgcctctggctctgctgctgcacgccgccagacccgatgaattcgaggtgcaactggtggaaagcggcggaggcctggtgcaggctggcggatctctgagactgagctgtgccgccagcggcatcaccttcagcatcaacacaatgggctggtacagacaggcccctggcaagcagagggaactggtggccctgatctccagcatcggcgacacctactacgccgacagcgtgaagggccggttcaccatcagccgggacaacgccaagaacaccgtgtacctccagatgaacagcctgaagcccgaggacaccgccgtgtactactgcaagcggttcagaacagccgcccagggcaccgattattggggccagggaacacaagtgaccgtgtcctctctcgagggaggaggcggctccgggggaggcggaagtggaggcggaggatctgggtctggaggaagcggatctggaggctcagggtcagggggctcaggcagtggaggctctttcgaagtgcaactggtggaatctgggggcggactggtgcagccaggcggaagtctgaggctgtcttgtgccgcctccggcagcatcttcggcttcaacgacatggcctggtatcggcaggctcccggaaaacagcgcgagctggtggctctgattagcagagtgggcgtgaccagcagcgccgactctgtgaagggcagattcacaatctccagagtgaacgccaaggatacagtgtacctccagatgaactctctgaaacctgaggatacagcagtgtactattgctacatggaccagcggctggacggcagcacactggcctactggggacagggaactcaagtgacagtgtctagcacgcgtgaggacctgaagaacgtgttcccacctgaggtggccgtgttcgagcctagcgaggccgagatcagccacacccagaaagccaccctcgtgtgcctggctaccggcttctaccccgaccatgtggaactgtcttggtgggtcaacggcaaagaggtgcacagcggcgtgtgtaccgacccccagccactgaaagaacagcccgccctgaacgacagccggtactgcctgagcagcagactgagagtgtccgccaccttctggcagaacccccggaaccacttcagatgccaggtgcagttctacggcctgagcgagaacgacgagtggacccaggacagagccaagcccgtgacccagatcgtgtctgccgaagcctggggcagagccgattgcgacgtgaagctggtggaaaagagcttcgagacagacaccaacctgaacttccagaacctgagcgtgatcggcttcagaatcctgctgctgaaagtggccggctttaacctgctgatgaccctgcggctgtggtccagccgcgccaagagaagcggatctggcgtgaagcagaccctgaatttcgacctgctgaagctggctggcgacgtggaatccaacccaggcccttctagaggccatatgaccgagtacaagcccacggtgcgcctcgccacccgcgacgacgtccccagggccgtacgcaccctcgccgccgcgttcgccgactaccccgccacgcgccacaccgtcgatccggaccgccacatcgagcgggtcaccgagctgcaagaactcttcctcacgcgcgtcgggctcgacatcggcaaggtgtgggtcgcggacgacggcgccgcggtggcggtctggaccacgccggagagcgtcgaagcgggggcggtgttcgccgagatcggcccgcgcatggccgagttgagcggttcccggctggccgcgcagcaacagatggaaggcctcctggcgccgcaccggcccaaggagcccgcgtggttcctggccaccgtcggcgtctcgcccgaccaccagggcaagggtctgggcagcgccgtcgtgctccccggagtggaggcggccgagcgcgccggggtgcccgccttcctggagacctccgcgccccgcaacctccccttctacgagcggctcggcttcaccgtcaccgccgacgtcgaggtgcccgaaggaccgcgcacctggtgcatgacccgcaagcccggtgcctga

SEQ ID NO: 17775 - DNA, 2460 bp, synthetic construct
  source 1..2460: mol_type = other DNA
atggccttaccagtgaccgccttgctcctgccgctggccttgctgctccacgccgccaggccgctcgagatccagaaccctgatcctgccgtgtaccagctgcgggatagcaagagcagcgacaagagcgtgtgtctgttcaccgacttcgacagccagaccaacgtgtcccagagcaaggactccgacgtgtacatcaccgataagtgcgtgctggacatgcggagcatggacttcaagagcaactccgccgtggcctggtccaacaagtccgatttcgcctgcgccaacgccttcaacaacagcattatccccgaggacacattcttcccaagccccgagagcagctgcggctttaccagcgagagctaccagcagggcgtgctgagcgccaccatcctgtacgagatcctgctgggcaaggccaccctgtacgccgtgctggtgtctgccctggtgctgatggctatggtcaagcggaaggacagccggggaagggccaagcgatctggatctggagcaacaaacttctcactactcaaacaagcaggtgacgtggaggagaatcccgggcctactagcatggcccttccagtcactgccttgctgttgcctctggcgctcctgctccacgccgctagaccgggcatgagaaccgaggacctgcctaaggccgtggtgttcctggaaccccagtggtacagagtgctggaaaaggacagcgtgaccctgaagtgccagggcgcctacagccccgaggacaatagcacccagtggttccacaacgagagcctgatctccagccaggccagcagctacttcatcgacgccgccaccgtggacgacagcggcgagtatagatgccagaccaacctgagcaccctgagcgaccccgtgcagctggaagtgcacatcggatggctgctgctgcaggcccccagatgggtgttcaaagaagaggaccccatccacctgagatgccactcttggaagaacaccgccctgcacaaagtgacctacctgcagaacggcaagggcagaaagtacttccaccacaacagcgacttctacatccccaaggccaccctgaaggactccggctcctacttctgcagaggcctcgtgggcagcaagaacgtgtccagcgagacagtgaacatcaccatcacccagggcctggccgtgtctaccatcagcagctttttcccacccggctaccagacgcgtgaggacctgaagaacgtgttcccacctgaggtggccgtgttcgagcctagcgaggccgagatcagccacacccagaaagccaccctcgtgtgcctggctaccggcttctaccccgaccatgtggaactgtcttggtgggtcaacggcaaagaggtgcacagcggcgtgtgtaccgacccccagccactgaaagaacagcccgccctgaacgacagccggtactgcctgagcagcagactgagagtgtccgccaccttctggcagaacccccggaaccacttcagatgccaggtgcagttctacggcctgagcgagaacgacgagtggacccaggacagagccaagcccgtgacccagatcgtgtctgccgaagcctggggcagagccgattgcgacgtgaagctggtggaaaagagcttcgagacagacaccaacctgaacttccagaacctgagcgtgatcggcttcagaatcctgctgctgaaagtggccggctttaacctgctgatgaccctgcggctgtggtccagccgcgccaagagaagcggatctggcgtgaagcagaccctgaatttcgacctgctgaagctggctggcgacgtggaatccaacccaggcccttctagaggccatatgaccgagtacaagcccacggtgcgcctcgccacccgcgacgacgtccccagggccgtacgcaccctcgccgccgcgttcgccgactaccccgccacgcgccacaccgtcgatccggaccgccacatcgagcgggtcaccgagctgcaagaactcttcctcacgcgcgtcgggctcgacatcggcaaggtgtgggtcgcggacgacggcgccgcggtggcggtctggaccacgccggagagcgtcgaagcgggggcggtgttcgccgagatcggcccgcgcatggccgagttgagcggttcccggctggccgcgcagcaacagatggaaggcctcctggcgccgcaccggcccaaggagcccgcgtggttcctggccaccgtcggcgtctcgcccgaccaccagggcaagggtctgggcagcgccgtcgtgctccccggagtggaggcggccgagcgcgccggggtgcccgccttcctggagacctccgcgccccgcaacctccccttctacgagcggctcggcttcaccgtcaccgccgacgtcgaggtgcccgaaggaccgcgcacctggtgcatgacccgcaagcccggtgcctga

SEQ ID NO: 17776 - DNA, 1341 bp, synthetic construct
  source 1..1341: mol_type = other DNA
atggccttaccagtgaccgccttgctcctgccgctggccttgctgctccacgccgccaggccgctcgagatccagaaccctgatcctgccgtgtaccagctgcgggatagcaagagcagcgacaagagcgtgtgtctgttcaccgacttcgacagccagaccaacgtgtcccagagcaaggactccgacgtgtacatcaccgataagtgcgtgctggacatgcggagcatggacttcaagagcaactccgccgtggcctggtccaacaagtccgatttcgcctgcgccaacgccttcaacaacagcattatccccgaggacacattcttcccaagccccgagagcagctgcggctttaccagcgagagctaccagcagggcgtgctgagcgccaccatcctgtacgagatcctgctgggcaaggccaccctgtacgccgtgctggtgtctgccctggtgctgatggctatggtcaagcggaaggacagccggggaagggccaagcgatctggatctggagcaacaaacttctcactactcaaacaagcaggtgacgtggaggagaatcccgggcctactagcgccaccatggccttaccagtgaccgccttgctcctgccgctggccttgctgctccacgccgccaggccgatggaccccgacctggaaatcagagccgccttcctgcggcagagaaacacagccctgagaacagaggtggccgagctggaacaagaggtgcagcggctggaaaacgaggtgtcccagtacgagacaagatacggccctctcggaggcggaaaaacgcgtgaggacctgaagaacgtgttcccacctgaggtggccgtgttcgagcctagcgaggccgagatcagccacacccagaaagccaccctcgtgtgcctggctaccggcttctaccccgaccatgtggaactgtcttggtgggtcaacggcaaagaggtgcacagcggcgtgtgtaccgacccccagccactgaaagaacagcccgccctgaacgacagccggtactgcctgagcagcagactgagagtgtccgccaccttctggcagaacccccggaaccacttcagatgccaggtgcagttctacggcctgagcgagaacgacgagtggacccaggacagagccaagcccgtgacccagatcgtgtctgccgaagcctggggcagagccgattgcgacgtgaagctggtggaaaagagcttcgagacagacaccaacctgaacttccagaacctgagcgtgatcggcttcagaatcctgctgctgaaagtggccggctttaacctgctgatgaccctgcggctgtggtccagc

SEQ ID NO: 17777 - DNA, 1341 bp, synthetic construct
  source 1..1341: mol_type = other DNA
atggccttaccagtgaccgccttgctcctgccgctggccttgctgctccacgccgccaggccgctcgagatccagaaccctgatcctgccgtgtaccagctgcgggatagcaagagcagcgacaagagcgtgtgtctgttcaccgacttcgacagccagaccaacgtgtcccagagcaaggactccgacgtgtacatcaccgataagtgcgtgctggacatgcggagcatggacttcaagagcaactccgccgtggcctggtccaacaagtccgatttcgcctgcgccaacgccttcaacaacagcattatccccgaggacacattcttcccaagccccgagagcagctgcggctttaccagcgagagctaccagcagggcgtgctgagcgccaccatcctgtacgagatcctgctgggcaaggccaccctgtacgccgtgctggtgtctgccctggtgctgatggctatggtcaagcggaaggacagccggggaagggccaagcgatctggatctggagcaacaaacttctcactactcaaacaagcaggtgacgtggaggagaatcccgggcctactagcgccaccatggccttaccagtgaccgccttgctcctgccgctggccttgctgctccacgccgccaggccgatggaccctgatctcgaaattgaggccgcctttctggaacgcgagaacactgccctggaaaccagggtcgcagagctgagacagagagtgcagagactgcggaacagagtgtctcagtaccgcaccagatatggcccactcggcggaggtaaaacgcgtgaggacctgaagaacgtgttcccacctgaggtggccgtgttcgagcctagcgaggccgagatcagccacacccagaaagccaccctcgtgtgcctggctaccggcttctaccccgaccatgtggaactgtcttggtgggtcaacggcaaagaggtgcacagcggcgtgtgtaccgacccccagccactgaaagaacagcccgccctgaacgacagccggtactgcctgagcagcagactgagagtgtccgccaccttctggcagaacccccggaaccacttcagatgccaggtgcagttctacggcctgagcgagaacgacgagtggacccaggacagagccaagcccgtgacccagatcgtgtctgccgaagcctggggcagagccgattgcgacgtgaagctggtggaaaagagcttcgagacagacaccaacctgaacttccagaacctgagcgtgatcggcttcagaatcctgctgctgaaagtggccggctttaacctgctgatgaccctgcggctgtggtccagc

SEQ ID NO: 17778 - DNA, 2046 bp, synthetic construct
  source 1..2046: mol_type = other DNA
atggccttaccagtgaccgccttgctcctgccgctggccttgctgctccacgccgccaggccgctcgagatccagaaccctgatcctgccgtgtaccagctgcgggatagcaagagcagcgacaagagcgtgtgtctgttcaccgacttcgacagccagaccaacgtgtcccagagcaaggactccgacgtgtacatcaccgataagtgcgtgctggacatgcggagcatggacttcaagagcaactccgccgtggcctggtccaacaagtccgatttcgcctgcgccaacgccttcaacaacagcattatccccgaggacacattcttcccaagccccgagagcagctgcggctttaccagcgagagctaccagcagggcgtgctgagcgccaccatcctgtacgagatcctgctgggcaaggccaccctgtacgccgtgctggtgtctgccctggtgctgatggctatggtcaagcggaaggacagccggggaagggccaagcgatctggatctggagcaacaaacttctcactactcaaacaagcaggtgacgtggaggagaatcccgggcctactagcgccaccatggccttaccagtgaccgccttgctcctgccgctggccttgctgctccacgccgccaggccgctgttcaatcaagaggtgcagatccctctgaccgagagctactgtggcccctgtcctaagaactggatctgctacaagaacaactgctaccagttcttcgacgagagcaagaattggtacgagagccaggccagctgcatgagccagaatgccagcctgctgaaggtgtacagcaaagaggaccaggacctgctgaaactggtcaagagcgcccactggatgggccttgtgcacatccccaccaatggctcttggcagtgggaggacggcagcattctgagccctaacctgctgaccatcatcgagatgcagaagggcgactgcgccctgtacgccagcagctttaagggctacatcgagaattgcagcaccccgaacacctacatctgtatgcagagaaccgtttctggcggaggcggctctggaggaggcggaagtggcggcggaggcgacctctttaatcaagaagtccagattccactcaccgaatcctactgcggaccttgtccaaaaaattggatttgttataagaacaactgttatcaattctttgatgagtctaaaaattggtatgagtcccaggcttcctgcatgtctcagaacgcttctctgctgaaagtctactctaaagaagatcaggatctcctgaagctcgtcaagtctgcccattggatggggctcgtccacattcctaccaacggaagctggcaatgggaagatggctccatcctgtctccaaatctgctcacgattattgaaatgcagaaaggggattgtgctctctacgccagctccttcaagggatatattgagaactgtagcacgcccaatacttatatctgtatgcaacggaccgtgacgcgtgaggacctgaagaacgtgttcccacctgaggtggccgtgttcgagcctagcgaggccgagatcagccacacccagaaagccaccctcgtgtgcctggctaccggcttctaccccgaccatgtggaactgtcttggtgggtcaacggcaaagaggtgcacagcggcgtgtgtaccgacccccagccactgaaagaacagcccgccctgaacgacagccggtactgcctgagcagcagactgagagtgtccgccaccttctggcagaacccccggaaccacttcagatgccaggtgcagttctacggcctgagcgagaacgacgagtggacccaggacagagccaagcccgtgacccagatcgtgtctgccgaagcctggggcagagccgattgcgacgtgaagctggtggaaaagagcttcgagacagacaccaacctgaacttccagaacctgagcgtgatcggcttcagaatcctgctgctgaaagtggccggctttaacctgctgatgaccctgcggctgtggtccagc

SEQ ID NO: 17779 - DNA, 2046 bp, synthetic construct
  source 1..2046: mol_type = other DNA
atggccttaccagtgaccgccttgctcctgccgctggccttgctgctccacgccgccaggccgctcgagatccagaaccctgatcctgccgtgtaccagctgcgggatagcaagagcagcgacaagagcgtgtgtctgttcaccgacttcgacagccagaccaacgtgtcccagagcaaggactccgacgtgtacatcaccgataagtgcgtgctggacatgcggagcatggacttcaagagcaactccgccgtggcctggtccaacaagtccgatttcgcctgcgccaacgccttcaacaacagcattatccccgaggacacattcttcccaagccccgagagcagctgcggctttaccagcgagagctaccagcagggcgtgctgagcgccaccatcctgtacgagatcctgctgggcaaggccaccctgtacgccgtgctggtgtctgccctggtgctgatggctatggtcaagcggaaggacagccggggaagggccaagcgatctggatctggagcaacaaacttctcactactcaaacaagcaggtgacgtggaggagaatcccgggcctactagcgccaccatggccttaccagtgaccgccttgctcctgccgctggccttgctgctccacgccgccaggccgctgttcaatcaagaggtgcagatccctctgaccgagagctactgtggcccctgtcctaagaactggatctgctacaagaacaactgctaccagttcttcgacgagagcaagaattggtacgagagccaggccagctgcatgagccagaatgccagcctgctgaaggtgtacagcaaagaggaccaggacctgctgaaactggtcaagagcgcccactggatgggccttgtgcacatccccaccaatggctcttggcagtgggaggacggcagcattctgagccctaacctgctgaccatcatcgagatgcagaagggcgactgcgccctgtacgccagcagctttaagggcttcatcgagaattgcagcaccccgaacacctacatctgtatgcagagaaccgttggcggaggcggaagtggaggcggaggatctggcggcggaggctctgacctctttaatcaagaagtccagattccactcaccgaatcctactgcggaccttgtccaaaaaattggatttgttataagaacaactgttatcaattctttgatgagtctaaaaattggtatgagtcccaggcttcctgcatgtctcagaacgcttctctgctgaaagtctactctaaagaagatcaggatctcctgaagctcgtcaagtctgcccattggatggggctcgtccacattcctaccaacggaagctggcaatgggaagatggctccatcctgtctccaaatctgctcacgattattgaaatgcagaaaggggattgtgctctctacgccagctccttcaagggatttattgagaactgtagcacgcccaatacttatatctgtatgcaacggaccgtgacgcgtgaggacctgaagaacgtgttcccacctgaggtggccgtgttcgagcctagcgaggccgagatcagccacacccagaaagccaccctcgtgtgcctggctaccggcttctaccccgaccatgtggaactgtcttggtgggtcaacggcaaagaggtgcacagcggcgtgtgtaccgacccccagccactgaaagaacagcccgccctgaacgacagccggtactgcctgagcagcagactgagagtgtccgccaccttctggcagaacccccggaaccacttcagatgccaggtgcagttctacggcctgagcgagaacgacgagtggacccaggacagagccaagcccgtgacccagatcgtgtctgccgaagcctggggcagagccgattgcgacgtgaagctggtggaaaagagcttcgagacagacaccaacctgaacttccagaacctgagcgtgatcggcttcagaatcctgctgctgaaagtggccggctttaacctgctgatgaccctgcggctgtggtccagc

SEQ ID NO: 17780 - DNA, 2124 bp, synthetic construct
  source 1..2124: mol_type = other DNA
atggccttaccagtgaccgccttgctcctgccgctggccttgctgctccacgccgccaggccgctcgagatccagaaccctgatcctgccgtgtaccagctgcgggatagcaagagcagcgacaagagcgtgtgtctgttcaccgacttcgacagccagaccaacgtgtcccagagcaaggactccgacgtgtacatcaccgataagtgcgtgctggacatgcggagcatggacttcaagagcaactccgccgtggcctggtccaacaagtccgatttcgcctgcgccaacgccttcaacaacagcattatccccgaggacacattcttcccaagccccgagagcagctgcggctttaccagcgagagctaccagcagggcgtgctgagcgccaccatcctgtacgagatcctgctgggcaaggccaccctgtacgccgtgctggtgtctgccctggtgctgatggctatggtcaagcggaaggacagccggggaagggccaagcgatctggatctggagcaacaaacttctcactactcaaacaagcaggtgacgtggaggagaatcccgggcctactagcatggccttaccagtgaccgccttgctcctgccgctggccttgctgctccacgccgccaggccgatggaccccgacctggaaatcagagccgccttcctgcggcagagaaacacagccctgagaacagaggtggccgagctggaacaagaggtgcagcggctggaaaacgaggtgtcccagtacgagacaagatacggccctctcggaggcggaaaaggtaccggcggaggcggatctggcggcggaggtagcggtggcggaggatctgaattcgacatccagatgacacagagccctagcagcctgtctgccagcgtgggagacagagtgaccatcacatgcaaggccagcgaccacatcaacaactggctggcctggtatcagcagaagcctggacaggcccctaagctgctgatctacggcgctaccacactggaaacaggcgtgcccagcagattttctggcagcggctctggcaccgactacaccctgacaatatccagcctccagcctgaggacttcgccacctactactgtcagcagagctggaacaccccttggacattcggccagggcaccaagctggaaatcaagagaggcggaggcggaagtggaggcggaggatctggcggcggaggctctcaagttcagcttcaacagcctggcgctgagctggtcaaacctggcgcttctgtgaagatgagctgcaaagccagcggctacgccttcagcagctactggatcaactggatgaagcagaaacccggccagggactcgaatggatcggccaaatctatcccggcgacggcgacaccaactacaacggcaagttcaagggcagagccacactgaccgccgatacctctagcagcacagcctacatgcagctgagcagcctgaccagcgaagatagcgccgtgtacttctgtgcccggtccatcacaacagtcgtgggctgcgctatggactattggggccagggaacaagcgtgaccgtgtctagtacgcgtgaggacctgaagaacgtgttcccacctgaggtggccgtgttcgagcctagcgaggccgagatcagccacacccagaaagccaccctcgtgtgcctggctaccggcttctaccccgaccatgtggaactgtcttggtgggtcaacggcaaagaggtgcacagcggcgtgtgtaccgacccccagccactgaaagaacagcccgccctgaacgacagccggtactgcctgagcagcagactgagagtgtccgccaccttctggcagaacccccggaaccacttcagatgccaggtgcagttctacggcctgagcgagaacgacgagtggacccaggacagagccaagcccgtgacccagatcgtgtctgccgaagcctggggcagagccgattgcgacgtgaagctggtggaaaagagcttcgagacagacaccaacctgaacttccagaacctgagcgtgatcggcttcagaatcctgctgctgaaagtggccggctttaacctgctgatgaccctgcggctgtggtccagc

SEQ ID NO: 17781 - DNA, 2829 bp, synthetic construct
  source 1..2829: mol_type = other DNA
atggccttaccagtgaccgccttgctcctgccgctggccttgctgctccacgccgccaggccgctcgagatccagaaccctgatcctgccgtgtaccagctgcgggatagcaagagcagcgacaagagcgtgtgtctgttcaccgacttcgacagccagaccaacgtgtcccagagcaaggactccgacgtgtacatcaccgataagtgcgtgctggacatgcggagcatggacttcaagagcaactccgccgtggcctggtccaacaagtccgatttcgcctgcgccaacgccttcaacaacagcattatccccgaggacacattcttcccaagccccgagagcagctgcggctttaccagcgagagctaccagcagggcgtgctgagcgccaccatcctgtacgagatcctgctgggcaaggccaccctgtacgccgtgctggtgtctgccctggtgctgatggctatggtcaagcggaaggacagccggggaagggccaagcgatctggatctggagcaacaaacttctcactactcaaacaagcaggtgacgtggaggagaatcccgggcctactagcatggccttaccagtgaccgccttgctcctgccgctggccttgctgctccacgccgccaggccgctgttcaatcaagaggtgcagatccctctgaccgagagctactgtggcccctgtcctaagaactggatctgctacaagaacaactgctaccagttcttcgacgagagcaagaattggtacgagagccaggccagctgcatgagccagaatgccagcctgctgaaggtgtacagcaaagaggaccaggacctgctgaaactggtcaagagcgcccactggatgggccttgtgcacatccccaccaatggctcttggcagtgggaggacggcagcattctgagccctaacctgctgaccatcatcgagatgcagaagggcgactgcgccctgtacgccagcagctttaagggcttcatcgagaattgcagcaccccgaacacctacatctgtatgcagagaaccgttggcggaggcggaagtggaggcggaggatctggcggcggaggctctgacctctttaatcaagaagtccagattccactcaccgaatcctactgcggaccttgtccaaaaaattggatttgttataagaacaactgttatcaattctttgatgagtctaaaaattggtatgagtcccaggcttcctgcatgtctcagaacgcttctctgctgaaagtctactctaaagaagatcaggatctcctgaagctcgtcaagtctgcccattggatggggctcgtccacattcctaccaacggaagctggcaatgggaagatggctccatcctgtctccaaatctgctcacgattattgaaatgcagaaaggggattgtgctctctacgccagctccttcaagggatttattgagaactgtagcacgcccaatacttatatctgtatgcaacggaccgtgggtaccggcggaggcggatctggcggcggaggtagcggtggcggaggatctgaattcgacatccagatgacacagagccctagcagcctgtctgccagcgtgggagacagagtgaccatcacatgcaaggccagcgaccacatcaacaactggctggcctggtatcagcagaagcctggacaggcccctaagctgctgatctacggcgctaccacactggaaacaggcgtgcccagcagattttctggcagcggctctggcaccgactacaccctgacaatatccagcctccagcctgaggacttcgccacctactactgtcagcagagctggaacaccccttggacattcggccagggcaccaagctggaaatcaagagaggcggaggcggaagtggaggcggaggatctggcggcggaggctctcaagttcagcttcaacagcctggcgctgagctggtcaaacctggcgcttctgtgaagatgagctgcaaagccagcggctacgccttcagcagctactggatcaactggatgaagcagaaacccggccagggactcgaatggatcggccaaatctatcccggcgacggcgacaccaactacaacggcaagttcaagggcagagccacactgaccgccgatacctctagcagcacagcctacatgcagctgagcagcctgaccagcgaagatagcgccgtgtacttctgtgcccggtccatcacaacagtcgtgggctgcgctatggactattggggccagggaacaagcgtgaccgtgtctagtacgcgtgaggacctgaagaacgtgttcccacctgaggtggccgtgttcgagcctagcgaggccgagatcagccacacccagaaagccaccctcgtgtgcctggctaccggcttctaccccgaccatgtggaactgtcttggtgggtcaacggcaaagaggtgcacagcggcgtgtgtaccgacccccagccactgaaagaacagcccgccctgaacgacagccggtactgcctgagcagcagactgagagtgtccgccaccttctggcagaacccccggaaccacttcagatgccaggtgcagttctacggcctgagcgagaacgacgagtggacccaggacagagccaagcccgtgacccagatcgtgtctgccgaagcctggggcagagccgattgcgacgtgaagctggtggaaaagagcttcgagacagacaccaacctgaacttccagaacctgagcgtgatcggcttcagaatcctgctgctgaaagtggccggctttaacctgctgatgaccctgcggctgtggtccagc

SEQ ID NO: 17782 - DNA, 1944 bp, synthetic construct
  source 1..1944: mol_type = other DNA
atggccttaccagtgaccgccttgctcctgccgctggccttgctgctccacgccgccaggccgctcgagatccagaaccctgatcctgccgtgtaccagctgcgggatagcaagagcagcgacaagagcgtgtgtctgttcaccgacttcgacagccagaccaacgtgtcccagagcaaggactccgacgtgtacatcaccgataagtgcgtgctggacatgcggagcatggacttcaagagcaactccgccgtggcctggtccaacaagtccgatttcgcctgcgccaacgccttcaacaacagcattatccccgaggacacattcttcccaagccccgagagcagctgcggctttaccagcgagagctaccagcagggcgtgctgagcgccaccatcctgtacgagatcctgctgggcaaggccaccctgtacgccgtgctggtgtctgccctggtgctgatggctatggtcaagcggaaggacagccggggaagggccaagcgatctggatctggagcaacaaacttctcactactcaaacaagcaggtgacgtggaggagaatcccgggcctactagcatggccttaccagtgaccgccttgctcctgccgctggccttgctgctccacgccgccaggccgcagtctgtgctgacacagcctcctagtgtgtctggcgctcctggacagagagtgaccatctcttgtaccggcagcagcagcaatatcggagccggctatgacgtgcactggtatcagcagctccctggcacagcccctaaactgctgatcttcggcaacagcaacagacccagcggcgtgcccgatagattcagcggctttaagagcggcacaagcgccagcctggctatcactggactgcaagccgaggacgaggccgactacttctgccagagctacgatagcagcctgagcggcagcggagtgtttggcacaggcaccaaagtgacagtgcttggcggcggaggcggaagtggaggcggaggatctggcggcggaggctctcaaatgcaactggttcaaagcggcggtggcctggtgcaacctggaagaagtctgagactgagctgtgccgccagcggcttcaccttcgatgattacgccatgcactgggtccgacaggcccctggaaaaggactggaatgggtgtccggcatctcctggaatagcggctctatcggctacgccgacagcgtgaagggcagattcaccatcagccgggacaacgccaagaacagcctgtacctccagatgaactccctgagagccgaggatacagccctgtactactgcgccaaggacatccacagcggcagctactacggcctgctgtactacgctatggacgtgtggggccagggcacaaccgtgacagtttcttctacgcgtgaggacctgaagaacgtgttcccacctgaggtggccgtgttcgagcctagcgaggccgagatcagccacacccagaaagccaccctcgtgtgcctggctaccggcttctaccccgaccatgtggaactgtcttggtgggtcaacggcaaagaggtgcacagcggcgtgtgtaccgacccccagccactgaaagaacagcccgccctgaacgacagccggtactgcctgagcagcagactgagagtgtccgccaccttctggcagaacccccggaaccacttcagatgccaggtgcagttctacggcctgagcgagaacgacgagtggacccaggacagagccaagcccgtgacccagatcgtgtctgccgaagcctggggcagagccgattgcgacgtgaagctggtggaaaagagcttcgagacagacaccaacctgaacttccagaacctgagcgtgatcggcttcagaatcctgctgctgaaagtggccggctttaacctgctgatgaccctgcggctgtggtccagc

SEQ ID NO: 17783 - DNA, 1455 bp, synthetic construct
  source 1..1455: mol_type = other DNA
atggccttaccagtgaccgccttgctcctgccgctggccttgctgctccacgccgccaggccgctcgagatccagaaccctgatcctgccgtgtaccagctgcgggatagcaagagcagcgacaagagcgtgtgtctgttcaccgacttcgacagccagaccaacgtgtcccagagcaaggactccgacgtgtacatcaccgataagtgcgtgctggacatgcggagcatggacttcaagagcaactccgccgtggcctggtccaacaagtccgatttcgcctgcgccaacgccttcaacaacagcattatccccgaggacacattcttcccaagccccgagagcagctgcggctttaccagcgagagctaccagcagggcgtgctgagcgccaccatcctgtacgagatcctgctgggcaaggccaccctgtacgccgtgctggtgtctgccctggtgctgatggctatggtcaagcggaaggacagccggggaagggccaagcgatctggatctggagcaacaaacttctcactactcaaacaagcaggtgacgtggaggagaatcccgggcctactagcatggccttaccagtgaccgccttgctcctgccgctggccttgctgctccacgccgccaggccgatgtgtatgccctgcttcaccaccgaccatcagatggcccggaagtgcgacgattgctgtggcggaaaaggcagaggcaagtgctacggccctcagtgcttgtgtagactcgagggcggaggcggaagtggaggcggaggatctggcggcggaggctctttcgaagtgtgtatgccttgttttaccacggatcaacaaatggctcgcaagtgttctgactgctgcggaggcaaaggccggggaaagtgttatggcccacagtgtctgtgccggacgcgtgaggacctgaagaacgtgttcccacctgaggtggccgtgttcgagcctagcgaggccgagatcagccacacccagaaagccaccctcgtgtgcctggctaccggcttctaccccgaccatgtggaactgtcttggtgggtcaacggcaaagaggtgcacagcggcgtgtgtaccgacccccagccactgaaagaacagcccgccctgaacgacagccggtactgcctgagcagcagactgagagtgtccgccaccttctggcagaacccccggaaccacttcagatgccaggtgcagttctacggcctgagcgagaacgacgagtggacccaggacagagccaagcccgtgacccagatcgtgtctgccgaagcctggggcagagccgattgcgacgtgaagctggtggaaaagagcttcgagacagacaccaacctgaacttccagaacctgagcgtgatcggcttcagaatcctgctgctgaaagtggccggctttaacctgctgatgaccctgcggctgtggtccagc

SEQ ID NO: 17784 - DNA, 2085 bp, synthetic construct
  source 1..2085: mol_type = other DNA
atggccttaccagtgaccgccttgctcctgccgctggccttgctgctccacgccgccaggccgctcgagatccagaaccctgatcctgccgtgtaccagctgcgggatagcaagagcagcgacaagagcgtgtgtctgttcaccgacttcgacagccagaccaacgtgtcccagagcaaggactccgacgtgtacatcaccgataagtgcgtgctggacatgcggagcatggacttcaagagcaactccgccgtggcctggtccaacaagtccgatttcgcctgcgccaacgccttcaacaacagcattatccccgaggacacattcttcccaagccccgagagcagctgcggctttaccagcgagagctaccagcagggcgtgctgagcgccaccatcctgtacgagatcctgctgggcaaggccaccctgtacgccgtgctggtgtctgccctggtgctgatggctatggtcaagcggaaggacagccggggaagggccaagcgatctggatctggagcaacaaacttctcactactcaaacaagcaggtgacgtggaggagaatcccgggcctactagcatggccttaccagtgaccgccttgctcctgccgctggccttgctgctccacgccgccaggccgttcgaagtgtgtatgccttgttttaccacggatcaacaaatggctcgcaagtgttctgactgctgcggaggcaaaggccggggaaagtgttatggcccacagtgtctgtgccggggtaccggcggaggcggatctggcggcggaggtagcggtggcggaggatctgaattcgacatccagatgacacagagccctagcagcctgtctgccagcgtgggagacagagtgaccatcacatgcaaggccagcgaccacatcaacaactggctggcctggtatcagcagaagcctggacaggcccctaagctgctgatctacggcgctaccacactggaaacaggcgtgcccagcagattttctggcagcggctctggcaccgactacaccctgacaatatccagcctccagcctgaggacttcgccacctactactgtcagcagagctggaacaccccttggacattcggccagggcaccaagctggaaatcaagagaggcggaggcggaagtggaggcggaggatctggcggcggaggctctcaagttcagcttcaacagcctggcgctgagctggtcaaacctggcgcttctgtgaagatgagctgcaaagccagcggctacgccttcagcagctactggatcaactggatgaagcagaaacccggccagggactcgaatggatcggccaaatctatcccggcgacggcgacaccaactacaacggcaagttcaagggcagagccacactgaccgccgatacctctagcagcacagcctacatgcagctgagcagcctgaccagcgaagatagcgccgtgtacttctgtgcccggtccatcacaacagtcgtgggctgcgctatggactattggggccagggaacaagcgtgaccgtgtctagtacgcgtgaggacctgaagaacgtgttcccacctgaggtggccgtgttcgagcctagcgaggccgagatcagccacacccagaaagccaccctcgtgtgcctggctaccggcttctaccccgaccatgtggaactgtcttggtgggtcaacggcaaagaggtgcacagcggcgtgtgtaccgacccccagccactgaaagaacagcccgccctgaacgacagccggtactgcctgagcagcagactgagagtgtccgccaccttctggcagaacccccggaaccacttcagatgccaggtgcagttctacggcctgagcgagaacgacgagtggacccaggacagagccaagcccgtgacccagatcgtgtctgccgaagcctggggcagagccgattgcgacgtgaagctggtggaaaagagcttcgagacagacaccaacctgaacttccagaacctgagcgtgatcggcttcagaatcctgctgctgaaagtggccggctttaacctgctgatgaccctgcggctgtggtccagc

SEQ ID NO: 17785 - DNA, 2475 bp, synthetic construct
  source 1..2475: mol_type = other DNA
atggccttaccagtgaccgccttgctcctgccgctggccttgctgctccacgccgccaggccgctcgagatccagaaccctgatcctgccgtgtaccagctgcgggatagcaagagcagcgacaagagcgtgtgtctgttcaccgacttcgacagccagaccaacgtgtcccagagcaaggactccgacgtgtacatcaccgataagtgcgtgctggacatgcggagcatggacttcaagagcaactccgccgtggcctggtccaacaagtccgatttcgcctgcgccaacgccttcaacaacagcattatccccgaggacacattcttcccaagccccgagagcagctgcggctttaccagcgagagctaccagcagggcgtgctgagcgccaccatcctgtacgagatcctgctgggcaaggccaccctgtacgccgtgctggtgtctgccctggtgctgatggctatggtcaagcggaaggacagccggggaagggccaagcgatctggatctggagcaacaaacttctcactactcaaacaagcaggtgacgtggaggagaatcccgggcctactagcatggccttaccagtgaccgccttgctcctgccgctggccttgctgctccacgccgccaggccgttcgaaagccccgtagctcctgcctgtgaccccagactcctaaataaactgctgcgtgactcccacctccttcacagccgactgagtcagtgtcccgacgtggaccctttgtctatccctgttctgctgcctgctgtggactttagcctgggagaatggaaaacccagacggaacagagcaaggcacaggacattctaggggcagtgtcccttctactggagggagtgatggcagcacgaggacagttggaaccctcctgcctctcatccctcctgggacagctttctgggcaggttcgcctcctcttgggggccctgcagggcctcctaggaacccagcttcctctacagggcaggaccacagctcacaaggaccccaatgccctcttcttgagcttgcaacaactgcttcggggaaaggtgcgcttcctgcttctggtagaaggtcccaccctctgtgtcagacggaccctgccaaccacagctgtcccaagcagtacttctggtaccggcggaggcggatctggcggcggaggtagcggtggcggaggatctgaattcgacatccagatgacacagagccctagcagcctgtctgccagcgtgggagacagagtgaccatcacatgcaaggccagcgaccacatcaacaactggctggcctggtatcagcagaagcctggacaggcccctaagctgctgatctacggcgctaccacactggaaacaggcgtgcccagcagattttctggcagcggctctggcaccgactacaccctgacaatatccagcctccagcctgaggacttcgccacctactactgtcagcagagctggaacaccccttggacattcggccagggcaccaagctggaaatcaagagaggcggaggcggaagtggaggcggaggatctggcggcggaggctctcaagttcagcttcaacagcctggcgctgagctggtcaaacctggcgcttctgtgaagatgagctgcaaagccagcggctacgccttcagcagctactggatcaactggatgaagcagaaacccggccagggactcgaatggatcggccaaatctatcccggcgacggcgacaccaactacaacggcaagttcaagggcagagccacactgaccgccgatacctctagcagcacagcctacatgcagctgagcagcctgaccagcgaagatagcgccgtgtacttctgtgcccggtccatcacaacagtcgtgggctgcgctatggactattggggccagggaacaagcgtgaccgtgtctagtacgcgtgaggacctgaagaacgtgttcccacctgaggtggccgtgttcgagcctagcgaggccgagatcagccacacccagaaagccaccctcgtgtgcctggctaccggcttctaccccgaccatgtggaactgtcttggtgggtcaacggcaaagaggtgcacagcggcgtgtgtaccgacccccagccactgaaagaacagcccgccctgaacgacagccggtactgcctgagcagcagactgagagtgtccgccaccttctggcagaacccccggaaccacttcagatgccaggtgcagttctacggcctgagcgagaacgacgagtggacccaggacagagccaagcccgtgacccagatcgtgtctgccgaagcctggggcagagccgattgcgacgtgaagctggtggaaaagagcttcgagacagacaccaacctgaacttccagaacctgagcgtgatcggcttcagaatcctgctgctgaaagtggccggctttaacctgctgatgaccctgcggctgtggtccagc

SEQ ID NO: 17786 - DNA, 2196 bp, synthetic construct
  source 1..2196: mol_type = other DNA
atggccttaccagtgaccgccttgctcctgccgctggccttgctgctccacgccgccaggccgctcgagatccagaaccctgatcctgccgtgtaccagctgcgggatagcaagagcagcgacaagagcgtgtgtctgttcaccgacttcgacagccagaccaacgtgtcccagagcaaggactccgacgtgtacatcaccgataagtgcgtgctggacatgcggagcatggacttcaagagcaactccgccgtggcctggtccaacaagtccgatttcgcctgcgccaacgccttcaacaacagcattatccccgaggacacattcttcccaagccccgagagcagctgcggctttaccagcgagagctaccagcagggcgtgctgagcgccaccatcctgtacgagatcctgctgggcaaggccaccctgtacgccgtgctggtgtctgccctggtgctgatggctatggtcaagcggaaggacagccggggaagggccaagcgatctggatctggagcaacaaacttctcactactcaaacaagcaggtgacgtggaggagaatcccgggcctactagcatggccttaccagtgaccgccttgctcctgccgctggccttgctgctccacgccgccaggccgttcgaaatgggcagctgggaagagttcgagctgagactgaacgccatcgaggaacggctgtatgccctcggaggatctgaagccgagctggcctacttcgagtacgtgatcgccgacttcgagggcaacctgcagcggtacaaaggcaagggcaaccctgaagtggaagccctgtacttcgaggccgacgccatcttcgaggaactggtggcctacagacacaacggtaccggcggaggcggatctggcggcggaggtagcggtggcggaggatctgaattcgacatccagatgacacagagccctagcagcctgtctgccagcgtgggagacagagtgaccatcacatgcaaggccagcgaccacatcaacaactggctggcctggtatcagcagaagcctggacaggcccctaagctgctgatctacggcgctaccacactggaaacaggcgtgcccagcagattttctggcagcggctctggcaccgactacaccctgacaatatccagcctccagcctgaggacttcgccacctactactgtcagcagagctggaacaccccttggacattcggccagggcaccaagctggaaatcaagagaggcggaggcggaagtggaggcggaggatctggcggcggaggctctcaagttcagcttcaacagcctggcgctgagctggtcaaacctggcgcttctgtgaagatgagctgcaaagccagcggctacgccttcagcagctactggatcaactggatgaagcagaaacccggccagggactcgaatggatcggccaaatctatcccggcgacggcgacaccaactacaacggcaagttcaagggcagagccacactgaccgccgatacctctagcagcacagcctacatgcagctgagcagcctgaccagcgaagatagcgccgtgtacttctgtgcccggtccatcacaacagtcgtgggctgcgctatggactattggggccagggaacaagcgtgaccgtgtctagtacgcgtgaggacctgaagaacgtgttcccacctgaggtggccgtgttcgagcctagcgaggccgagatcagccacacccagaaagccaccctcgtgtgcctggctaccggcttctaccccgaccatgtggaactgtcttggtgggtcaacggcaaagaggtgcacagcggcgtgtgtaccgacccccagccactgaaagaacagcccgccctgaacgacagccggtactgcctgagcagcagactgagagtgtccgccaccttctggcagaacccccggaaccacttcagatgccaggtgcagttctacggcctgagcgagaacgacgagtggacccaggacagagccaagcccgtgacccagatcgtgtctgccgaagcctggggcagagccgattgcgacgtgaagctggtggaaaagagcttcgagacagacaccaacctgaacttccagaacctgagcgtgatcggcttcagaatcctgctgctgaaagtggccggctttaacctgctgatgaccctgcggctgtggtccagc

SEQ ID NO: 17787 - DNA, 2610 bp, synthetic construct
  source 1..2610: mol_type = other DNA
atggccttaccagtgaccgccttgctcctgccgctggccttgctgctccacgccgccaggccgctcgaggaggacctgaagaacgtgttcccacctgaggtggccgtgttcgagcctagcgaggccgagatcagccacacccagaaagccaccctcgtgtgcctggctaccggcttctaccccgaccatgtggaactgtcttggtgggtcaacggcaaagaggtgcacagcggcgtgtctaccgacccccagccactgaaagaacagcccgccctgaacgacagccggtactgcctgagcagcagactgagagtgtccgccaccttctggcagaacccccggaaccacttcagatgccaggtgcagttctacggcctgagcgagaacgacgagtggacccaggacagagccaagcccgtgacccagatcgtgtctgccgaagcctggggcagagccgattgcgacgtgaagctggtggaaaagagcttcgagacagacaccaacctgaacttccagaacctgagcgtgatcggcttcagaatcctgctgctgaaagtggccggctttaacctgctgatgaccctgcggctgtggtccagcagggccaagcgatctggatctggagcaacaaacttctcactactcaaacaagcaggtgacgtggaggagaatcccgggcctactagcatggccttaccagtgaccgccttgctcctgccgctggccttgctgctccacgccgccaggccggacatccagatgacacagactacatcctccctgtctgcctctctgggagacagagtcaccatcagttgcagggcaagtcaggacattagtaaatatttaaattggtatcagcagaaaccagatggaactgttaaactcctgatctaccatacatcaagattacactcaggagtcccatcaaggttcagtggcagtgggtctggaacagattattctctcaccattagcaacctggagcaagaagatattgccacttacttttgccaacagggtaatacgcttccgtacacgttcggaggggggaccaagctggagatcacaggtggcggtggctcgggcggtggtgggtcgggtggcggcggatctgaggtgaaactgcaggagtcaggacctggcctggtggcgccctcacagagcctgtccgtcacatgcactgtctcaggggtctcattacccgactatggtgtaagctggattcgccagcctccacgaaagggtctggagtggctgggagtaatatggggtagtgaaaccacatactataattcagctctcaaatccagactgaccatcatcaaggacaactccaagagccaagttttcttaaaaatgaacagtctgcaaactgatgacacagccatttactactgtgccaaacattattactacggtggtagctatgctatggactactggggtcaaggaacctcagtcaccgtctcctcaacgcgtatccagaaccctgatcctgccgtgtaccagctgcgggatagcaagagcagcgacaagagcgtgtgtctgttcaccgacttcgacagccagaccaacgtgtcccagagcaaggactccgacgtgtacatcaccgataagaccgtgctggacatgcggagcatggacttcaagagcaactccgccgtggcctggtccaacaagtccgatttcgcctgcgccaacgccttcaacaacagcattatccccgaggacacattcttcccaagccccgagagcagctgcggctttaccagcgagagctaccagcagggcgtgctgagcgccaccatcctgtacgagatcctgctgggcaaggccaccctgtacgccgtgctggtgtctgccctggtgctgatggctatggtcaagcggaaggacagccggggacgcgccaagagaagcggatctggcgtgaagcagaccctgaatttcgacctgctgaagctggctggcgacgtggaatccaacccaggcccttctagaggccatatgaccgagtacaagcccacggtgcgcctcgccacccgcgacgacgtccccagggccgtacgcaccctcgccgccgcgttcgccgactaccccgccacgcgccacaccgtcgatccggaccgccacatcgagcgggtcaccgagctgcaagaactcttcctcacgcgcgtcgggctcgacatcggcaaggtgtgggtcgcggacgacggcgccgcggtggcggtctggaccacgccggagagcgtcgaagcgggggcggtgttcgccgagatcggcccgcgcatggccgagttgagcggttcccggctggccgcgcagcaacagatggaaggcctcctggcgccgcaccggcccaaggagcccgcgtggttcctggccaccgtcggcgtctcgcccgaccaccagggcaagggtctgggcagcgccgtcgtgctccccggagtggaggcggccgagcgcgccggggtgcccgccttcctggagacctccgcgccccgcaacctccccttctacgagcggctcggcttcaccgtcaccgccgacgtcgaggtgcccgaaggaccgcgcacctggtgcatgacccgcaagcccggtgcctga

SEQ ID NO: 17788 - DNA, 2613 bp, synthetic construct
  source 1..2613: mol_type = other DNA
atggccttaccagtgaccgccttgctcctgccgctggccttgctgctccacgccgccaggccgctcgaggaggacctgaagaacgtgttcccacctgaggtggccgtgttcgagcctagcgaggccgagatcagccacacccagaaagccaccctcgtgtgcctggctaccggcttctaccccgaccatgtggaactgtcttggtgggtcaacggcaaagaggtgcacagcggcgtgtctaccgacccccagccactgaaagaacagcccgccctgaacgacagccggtactgcctgagcagcagactgagagtgtccgccaccttctggcagaacccccggaaccacttcagatgccaggtgcagttctacggcctgagcgagaacgacgagtggacccaggacagagccaagcccgtgacccagatcgtgtctgccgaagcctggggcagagccgattgcgacgtgaagctggtggaaaagagcttcgagacagacaccaacctgaacttccagaacctgagcgtgatcggcttcagaatcctgctgctgaaagtggccggctttaacctgctgatgaccctgcggctgtggtccagcagggccaagcgatctggatctggagcaacaaacttctcactactcaaacaagcaggtgacgtggaggagaatcccgggcctactagcaccatggccttaccagtgaccgccttgctcctgccgctggccttgctgctccacgccgccaggccggagatcgtgatgacccagagccctgccaccctgtctctgagccctggcgaaagagccaccctgagctgtagagccagccaggacatcagcaagtacctgaactggtatcagcagaagcccggccaggcccccagactgctgatctaccacaccagcagactgcacagcggcatccccgccagattttctggctctggcagcggcaccgactacaccctgacaatcagcagcctccagcccgaggacttcgccgtgtacttctgtcagcaaggcaacaccctgccctacaccttcggccagggcaccaagctggaaatcaagggcggaggcggaagtggaggcggaggatctggcggcggaggctctcaggtgcaactccaggaatctggccctggcctcgtgaagcccagcgagacactgagcctgacctgtaccgtgtccggcgtgtccctgcctgactatggcgtgtcctggatcagacagccccctggcaagggcctggaatggatcggagtgatttggggcagcgaaaccacctactacaacagctccctgaagtccagagtgaccatctccaaggacaactccaagaaccaggtgtccctgaagctgagcagcgtgacagccgccgacaccgccgtgtattactgcgccaagcactactactacggcggcagctacgctatggactactggggccagggaaccctcgtgaccgtgtctagtacgcgtatccagaaccctgatcctgccgtgtaccagctgcgggatagcaagagcagcgacaagagcgtgtgtctgttcaccgacttcgacagccagaccaacgtgtcccagagcaaggactccgacgtgtacatcaccgataagaccgtgctggacatgcggagcatggacttcaagagcaactccgccgtggcctggtccaacaagtccgatttcgcctgcgccaacgccttcaacaacagcattatccccgaggacacattcttcccaagccccgagagcagctgcggctttaccagcgagagctaccagcagggcgtgctgagcgccaccatcctgtacgagatcctgctgggcaaggccaccctgtacgccgtgctggtgtctgccctggtgctgatggctatggtcaagcggaaggacagccggggacgcgccaagagaagcggatctggcgtgaagcagaccctgaatttcgacctgctgaagctggctggcgacgtggaatccaacccaggcccttctagaggccatatgaccgagtacaagcccacggtgcgcctcgccacccgcgacgacgtccccagggccgtacgcaccctcgccgccgcgttcgccgactaccccgccacgcgccacaccgtcgatccggaccgccacatcgagcgggtcaccgagctgcaagaactcttcctcacgcgcgtcgggctcgacatcggcaaggtgtgggtcgcggacgacggcgccgcggtggcggtctggaccacgccggagagcgtcgaagcgggggcggtgttcgccgagatcggcccgcgcatggccgagttgagcggttcccggctggccgcgcagcaacagatggaaggcctcctggcgccgcaccggcccaaggagcccgcgtggttcctggccaccgtcggcgtctcgcccgaccaccagggcaagggtctgggcagcgccgtcgtgctccccggagtggaggcggccgagcgcgccggggtgcccgccttcctggagacctccgcgccccgcaacctccccttctacgagcggctcggcttcaccgtcaccgccgacgtcgaggtgcccgaaggaccgcgcacctggtgcatgacccgcaagcccggtgcctga

SEQ ID NO: 17789 - DNA, 2616 bp, synthetic construct
  source 1..2616: mol_type = other DNA
atggccttaccagtgaccgccttgctcctgccgctggccttgctgctccacgccgccaggccgctcgaggaggacctgaagaacgtgttcccacctgaggtggccgtgttcgagcctagcgaggccgagatcagccacacccagaaagccaccctcgtgtgcctggctaccggcttctaccccgaccatgtggaactgtcttggtgggtcaacggcaaagaggtgcacagcggcgtgtctaccgacccccagccactgaaagaacagcccgccctgaacgacagccggtactgcctgagcagcagactgagagtgtccgccaccttctggcagaacccccggaaccacttcagatgccaggtgcagttctacggcctgagcgagaacgacgagtggacccaggacagagccaagcccgtgacccagatcgtgtctgccgaagcctggggcagagccgattgcgacgtgaagctggtggaaaagagcttcgagacagacaccaacctgaacttccagaacctgagcgtgatcggcttcagaatcctgctgctgaaagtggccggctttaacctgctgatgaccctgcggctgtggtccagcagggccaagcgatctggatctggagcaacaaacttctcactactcaaacaagcaggtgacgtggaggagaatcccgggcctactagcaccatggccttaccagtgaccgccttgctcctgccgctggccttgctgctccacgccgccaggccggacgagatcgtgctgacacagagccccgccaccctgtcactgtctccaggcgaaagagccaccctgagctgtagcgccagcagcagcgtgtcctacatgcactggtatcagcagaagcccggccaggcccccagactgctgatctacgataccagcaagctggcctccggcatccccgccagattttctggcagcggctccggcaccgacttcaccctgacaatcagcagcctggaacccgaggacgtggccgtgtactactgttttcaaggcagcgtgtaccccttcaccttcggccagggcaccaagctggaaatcaagagaggtggcggtggctcgggcggtggtgggtcgggtggcggcggatctcaggtgcagctccaggaatctggccctggcctcgtgaagcctagccagaccctgagcctgacctgtaccgtgtctggcggcagcatcagcacaagcggcatgggcgtgggctggatcagacagcaccctggcaagggcctggaatggatcggccacatttggtgggacgacgacaagcggtacaaccccgccctgaagtccagagtgaccatcagcgtggacaccagcaagaaccagttcagcctgaagctgagcagcgtgacagccgccgataccgccgtgtattattgcgcccggatggaactgtggtcctactacttcgactactggggccagggaaccctcgtgaccgtgtctagtacgcgtatccagaaccctgatcctgccgtgtaccagctgcgggatagcaagagcagcgacaagagcgtgtgtctgttcaccgacttcgacagccagaccaacgtgtcccagagcaaggactccgacgtgtacatcaccgataagaccgtgctggacatgcggagcatggacttcaagagcaactccgccgtggcctggtccaacaagtccgatttcgcctgcgccaacgccttcaacaacagcattatccccgaggacacattcttcccaagccccgagagcagctgcggctttaccagcgagagctaccagcagggcgtgctgagcgccaccatcctgtacgagatcctgctgggcaaggccaccctgtacgccgtgctggtgtctgccctggtgctgatggctatggtcaagcggaaggacagccggggacgcgccaagagaagcggatctggcgtgaagcagaccctgaatttcgacctgctgaagctggctggcgacgtggaatccaacccaggcccttctagaggccatatgaccgagtacaagcccacggtgcgcctcgccacccgcgacgacgtccccagggccgtacgcaccctcgccgccgcgttcgccgactaccccgccacgcgccacaccgtcgatccggaccgccacatcgagcgggtcaccgagctgcaagaactcttcctcacgcgcgtcgggctcgacatcggcaaggtgtgggtcgcggacgacggcgccgcggtggcggtctggaccacgccggagagcgtcgaagcgggggcggtgttcgccgagatcggcccgcgcatggccgagttgagcggttcccggctggccgcgcagcaacagatggaaggcctcctggcgccgcaccggcccaaggagcccgcgtggttcctggccaccgtcggcgtctcgcccgaccaccagggcaagggtctgggcagcgccgtcgtgctccccggagtggaggcggccgagcgcgccggggtgcccgccttcctggagacctccgcgccccgcaacctccccttctacgagcggctcggcttcaccgtcaccgccgacgtcgaggtgcccgaaggaccgcgcacctggtgcatgacccgcaagcccggtgcctga

SEQ ID NO: 17790 - DNA, 2604 bp, synthetic construct
  source 1..2604: mol_type = other DNA
atggccttaccagtgaccgccttgctcctgccgctggccttgctgctccacgccgccaggccgctcgaggaggacctgaagaacgtgttcccacctgaggtggccgtgttcgagcctagcgaggccgagatcagccacacccagaaagccaccctcgtgtgcctggctaccggcttctaccccgaccatgtggaactgtcttggtgggtcaacggcaaagaggtgcacagcggcgtgtctaccgacccccagccactgaaagaacagcccgccctgaacgacagccggtactgcctgagcagcagactgagagtgtccgccaccttctggcagaacccccggaaccacttcagatgccaggtgcagttctacggcctgagcgagaacgacgagtggacccaggacagagccaagcccgtgacccagatcgtgtctgccgaagcctggggcagagccgattgcgacgtgaagctggtggaaaagagcttcgagacagacaccaacctgaacttccagaacctgagcgtgatcggcttcagaatcctgctgctgaaagtggccggctttaacctgctgatgaccctgcggctgtggtccagcagggccaagcgatctggatctggagcaacaaacttctcactactcaaacaagcaggtgacgtggaggagaatcccgggcctactagcatggccttaccagtgaccgccttgctcctgccgctggccttgctgctccacgccgccaggccggacatccagatgacacagagccctagcagcctgtctgccagcgtgggagacagagtgaccatcacctgtagagccagccaggacatcagcaactacctgaactggtatcagcagaagcccggcaaggcccctaagctgctgatctactacaccagcagactgcacagcggcgtgcccagcagattttctggctctggcagcggcaccgacttcaccctgacaatatctagcctccagcctgaggacttcgccacctactattgccagcagggcaacaccctgccttacacatttggacagggcaccaaggtggaaatcaagagaggcggaggcggaagtggaggcggaggatctggcggcggaggctctgaagtgcagctggttgaatcaggtggcggcctggttcaacctggcggatctctgagactgagctgtgccgccagcggcttcaccttcagcgactactttatgagctgggtccgacaggcccctggcaaaggacttgaatgggtcgccaccatcagcaatggcggcacctacacttactaccccgacagcgtgaagggcagattcaccatctccagagacaacagcaagaacaccctgtacctccagatgaactccctgagagccgaggacaccgccgtgtactactgcgccagattcgacggctacatcttcgactattggggccagggcaccctggtcacagtctcttctacgcgtatccagaaccctgatcctgccgtgtaccagctgcgggatagcaagagcagcgacaagagcgtgtgtctgttcaccgacttcgacagccagaccaacgtgtcccagagcaaggactccgacgtgtacatcaccgataagaccgtgctggacatgcggagcatggacttcaagagcaactccgccgtggcctggtccaacaagtccgatttcgcctgcgccaacgccttcaacaacagcattatccccgaggacacattcttcccaagccccgagagcagctgcggctttaccagcgagagctaccagcagggcgtgctgagcgccaccatcctgtacgagatcctgctgggcaaggccaccctgtacgccgtgctggtgtctgccctggtgctgatggctatggtcaagcggaaggacagccggggacgcgccaagagaagcggatctggcgtgaagcagaccctgaatttcgacctgctgaagctggctggcgacgtggaatccaacccaggcccttctagaggccatatgaccgagtacaagcccacggtgcgcctcgccacccgcgacgacgtccccagggccgtacgcaccctcgccgccgcgttcgccgactaccccgccacgcgccacaccgtcgatccggaccgccacatcgagcgggtcaccgagctgcaagaactcttcctcacgcgcgtcgggctcgacatcggcaaggtgtgggtcgcggacgacggcgccgcggtggcggtctggaccacgccggagagcgtcgaagcgggggcggtgttcgccgagatcggcccgcgcatggccgagttgagcggttcccggctggccgcgcagcaacagatggaaggcctcctggcgccgcaccggcccaaggagcccgcgtggttcctggccaccgtcggcgtctcgcccgaccaccagggcaagggtctgggcagcgccgtcgtgctccccggagtggaggcggccgagcgcgccggggtgcccgccttcctggagacctccgcgccccgcaacctccccttctacgagcggctcggcttcaccgtcaccgccgacgtcgaggtgcccgaaggaccgcgcacctggtgcatgacccgcaagcccggtgcctga

SEQ ID NO: 17791 - DNA, 2616 bp, synthetic construct
  source 1..2616: mol_type = other DNA
atggccttaccagtgaccgccttgctcctgccgctggccttgctgctccacgccgccaggccgctcgaggaggacctgaagaacgtgttcccacctgaggtggccgtgttcgagcctagcgaggccgagatcagccacacccagaaagccaccctcgtgtgcctggctaccggcttctaccccgaccatgtggaactgtcttggtgggtcaacggcaaagaggtgcacagcggcgtgtctaccgacccccagccactgaaagaacagcccgccctgaacgacagccggtactgcctgagcagcagactgagagtgtccgccaccttctggcagaacccccggaaccacttcagatgccaggtgcagttctacggcctgagcgagaacgacgagtggacccaggacagagccaagcccgtgacccagatcgtgtctgccgaagcctggggcagagccgattgcgacgtgaagctggtggaaaagagcttcgagacagacaccaacctgaacttccagaacctgagcgtgatcggcttcagaatcctgctgctgaaagtggccggctttaacctgctgatgaccctgcggctgtggtccagcagggccaagcgatctggatctggagcaacaaacttctcactactcaaacaagcaggtgacgtggaggagaatcccgggcctactagcatggccttaccagtgaccgccttgctcctgccgctggccttgctgctccacgccgccaggccggacatccagatgacacagagccctagcagcctgtctgccagcgtgggagacagagtgaccatcacatgcaaggccagcgaccacatcaacaactggctggcctggtatcagcagaagcctggacaggcccctaagctgctgatctacggcgctaccacactggaaacaggcgtgcccagcagattttctggcagcggctctggcaccgactacaccctgacaatatccagcctccagcctgaggacttcgccacctactactgtcagcagagctggaacaccccttggacattcggccagggcaccaagctggaaatcaagagaggcggaggcggaagtggaggcggaggatctggcggcggaggctctcaagttcagcttcaacagcctggcgctgagctggtcaaacctggcgcttctgtgaagatgagctgcaaagccagcggctacgccttcagcagctactggatcaactggatgaagcagaaacccggccagggactcgaatggatcggccaaatctatcccggcgacggcgacaccaactacaacggcaagttcaagggcagagccacactgaccgccgatacctctagcagcacagcctacatgcagctgagcagcctgaccagcgaagatagcgccgtgtacttctgtgcccggtccatcacaacagtcgtgggctgcgctatggactattggggccagggaacaagcgtgaccgtgtctagtacgcgtatccagaaccctgatcctgccgtgtaccagctgcgggatagcaagagcagcgacaagagcgtgtgtctgttcaccgacttcgacagccagaccaacgtgtcccagagcaaggactccgacgtgtacatcaccgataagaccgtgctggacatgcggagcatggacttcaagagcaactccgccgtggcctggtccaacaagtccgatttcgcctgcgccaacgccttcaacaacagcattatccccgaggacacattcttcccaagccccgagagcagctgcggctttaccagcgagagctaccagcagggcgtgctgagcgccaccatcctgtacgagatcctgctgggcaaggccaccctgtacgccgtgctggtgtctgccctggtgctgatggctatggtcaagcggaaggacagccggggacgcgccaagagaagcggatctggcgtgaagcagaccctgaatttcgacctgctgaagctggctggcgacgtggaatccaacccaggcccttctagaggccatatgaccgagtacaagcccacggtgcgcctcgccacccgcgacgacgtccccagggccgtacgcaccctcgccgccgcgttcgccgactaccccgccacgcgccacaccgtcgatccggaccgccacatcgagcgggtcaccgagctgcaagaactcttcctcacgcgcgtcgggctcgacatcggcaaggtgtgggtcgcggacgacggcgccgcggtggcggtctggaccacgccggagagcgtcgaagcgggggcggtgttcgccgagatcggcccgcgcatggccgagttgagcggttcccggctggccgcgcagcaacagatggaaggcctcctggcgccgcaccggcccaaggagcccgcgtggttcctggccaccgtcggcgtctcgcccgaccaccagggcaagggtctgggcagcgccgtcgtgctccccggagtggaggcggccgagcgcgccggggtgcccgccttcctggagacctccgcgccccgcaacctccccttctacgagcggctcggcttcaccgtcaccgccgacgtcgaggtgcccgaaggaccgcgcacctggtgcatgacccgcaagcccggtgcctga

SEQ ID NO: 17792 - DNA, 2622 bp, synthetic construct
  source 1..2622: mol_type = other DNA
atggccttaccagtgaccgccttgctcctgccgctggccttgctgctccacgccgccaggccgctcgaggaggacctgaagaacgtgttcccacctgaggtggccgtgttcgagcctagcgaggccgagatcagccacacccagaaagccaccctcgtgtgcctggctaccggcttctaccccgaccatgtggaactgtcttggtgggtcaacggcaaagaggtgcacagcggcgtgtctaccgacccccagccactgaaagaacagcccgccctgaacgacagccggtactgcctgagcagcagactgagagtgtccgccaccttctggcagaacccccggaaccacttcagatgccaggtgcagttctacggcctgagcgagaacgacgagtggacccaggacagagccaagcccgtgacccagatcgtgtctgccgaagcctggggcagagccgattgcgacgtgaagctggtggaaaagagcttcgagacagacaccaacctgaacttccagaacctgagcgtgatcggcttcagaatcctgctgctgaaagtggccggctttaacctgctgatgaccctgcggctgtggtccagcagggccaagcgatctggatctggagcaacaaacttctcactactcaaacaagcaggtgacgtggaggagaatcccgggcctactagcatggccttaccagtgaccgccttgctcctgccgctggccttgctgctccacgccgccaggccgcagatcgtgctgtctcagtctcctgccatcctgagcgcttccccaggcgagaaagtgaccatgacctgtagagccagcagcagcgtgtcctacatgcactggtatcagcagaagcccggcagcagccctaagccttggatctacgccaccagcaatctggcctctggcgtgccagccagattttctggctctggcagcggcaccagctacagcttcacaatcagcagagtggaagccgaggacgccgccacctactattgtcagcagtggaccttcaatcctcctaccttcggcggaggcacccggctggaaatcaaaagaacagtggctgctggcggaggcggaagtggaggcggaggatctggcggcggaggctctcaggcttatctgcaacagagcggagccgaactcgtcagacctggcgcttctgtgaagatgagctgcaaggccagcggctacaccttcaccagctataatatgcactgggtcaagcagacccctcggcagggactcgaatggatcggcggaatctatcccggcaacggcgacacctcctacaaccagaagttcaagggcaaagccacactgaccgtgggcaagagcagcagcaccgcctatatgcagctcagcagcctgaccagcgaggacagcgccgtgtacttctgcgccagatacgactacaactacgctatggactactggggccagggcaccagcgtgacagttagctctgccagcacgcgtatccagaaccctgatcctgccgtgtaccagctgcgggatagcaagagcagcgacaagagcgtgtgtctgttcaccgacttcgacagccagaccaacgtgtcccagagcaaggactccgacgtgtacatcaccgataagaccgtgctggacatgcggagcatggacttcaagagcaactccgccgtggcctggtccaacaagtccgatttcgcctgcgccaacgccttcaacaacagcattatccccgaggacacattcttcccaagccccgagagcagctgcggctttaccagcgagagctaccagcagggcgtgctgagcgccaccatcctgtacgagatcctgctgggcaaggccaccctgtacgccgtgctggtgtctgccctggtgctgatggctatggtcaagcggaaggacagccggggacgcgccaagagaagcggatctggcgtgaagcagaccctgaatttcgacctgctgaagctggctggcgacgtggaatccaacccaggcccttctagaggccatatgaccgagtacaagcccacggtgcgcctcgccacccgcgacgacgtccccagggccgtacgcaccctcgccgccgcgttcgccgactaccccgccacgcgccacaccgtcgatccggaccgccacatcgagcgggtcaccgagctgcaagaactcttcctcacgcgcgtcgggctcgacatcggcaaggtgtgggtcgcggacgacggcgccgcggtggcggtctggaccacgccggagagcgtcgaagcgggggcggtgttcgccgagatcggcccgcgcatggccgagttgagcggttcccggctggccgcgcagcaacagatggaaggcctcctggcgccgcaccggcccaaggagcccgcgtggttcctggccaccgtcggcgtctcgcccgaccaccagggcaagggtctgggcagcgccgtcgtgctccccggagtggaggcggccgagcgcgccggggtgcccgccttcctggagacctccgcgccccgcaacctccccttctacgagcggctcggcttcaccgtcaccgccgacgtcgaggtgcccgaaggaccgcgcacctggtgcatgacccgcaagcccggtgcctga

SEQ ID NO: 17793 - DNA, 2616 bp, synthetic construct
  source 1..2616: mol_type = other DNA
atggccttaccagtgaccgccttgctcctgccgctggccttgctgctccacgccgccaggccgctcgaggaggacctgaagaacgtgttcccacctgaggtggccgtgttcgagcctagcgaggccgagatcagccacacccagaaagccaccctcgtgtgcctggctaccggcttctaccccgaccatgtggaactgtcttggtgggtcaacggcaaagaggtgcacagcggcgtgtctaccgacccccagccactgaaagaacagcccgccctgaacgacagccggtactgcctgagcagcagactgagagtgtccgccaccttctggcagaacccccggaaccacttcagatgccaggtgcagttctacggcctgagcgagaacgacgagtggacccaggacagagccaagcccgtgacccagatcgtgtctgccgaagcctggggcagagccgattgcgacgtgaagctggtggaaaagagcttcgagacagacaccaacctgaacttccagaacctgagcgtgatcggcttcagaatcctgctgctgaaagtggccggctttaacctgctgatgaccctgcggctgtggtccagcagggccaagcgatctggatctggagcaacaaacttctcactactcaaacaagcaggtgacgtggaggagaatcccgggcctactagcatggccttaccagtgaccgccttgctcctgccgctggccttgctgctccacgccgccaggccggagatcgtgctgacacagagccctgccaccctgtctctgagccctggcgaaagagccaccctgagctgtagagccagccagagcgtgtccagctacctggcctggtatcagcagaagcccggccaggctccccggctgctgatctacgatgccagcaatagagccaccggcatccccgccagattttccggctctggcagcggcaccgacttcaccctgaccatcagctccctggaacccgaggacttcgccgtgtactactgccagcagcggagcaactggcccatcacattcggccagggcacccggctggaaatcaaaggcggaggcggaagtggaggcggaggatctggcggcggaggctctgaggtgcagcttgttgagtctggcggaggactggtgcagcccgatagaagcctgagactgtcttgtgccgccagcggcttcaccttccacgattatgccatgcactgggtccgacaggcccctggcaaaggacttgaatgggtgtccaccatctcttggaacagcggcacaatcggctacgccgactctgtgaagggcagattcaccatcagccgggacaacgccaagaacagcctgtacctccagatgaactccctgagagccgaggacacagccctgtactactgcgccaaggacatccagtacggcaactactactacggcatggacgtgtggggccagggcacaacagtgacagtctcttctacgcgtatccagaaccctgatcctgccgtgtaccagctgcgggatagcaagagcagcgacaagagcgtgtgtctgttcaccgacttcgacagccagaccaacgtgtcccagagcaaggactccgacgtgtacatcaccgataagaccgtgctggacatgcggagcatggacttcaagagcaactccgccgtggcctggtccaacaagtccgatttcgcctgcgccaacgccttcaacaacagcattatccccgaggacacattcttcccaagccccgagagcagctgcggctttaccagcgagagctaccagcagggcgtgctgagcgccaccatcctgtacgagatcctgctgggcaaggccaccctgtacgccgtgctggtgtctgccctggtgctgatggctatggtcaagcggaaggacagccggggacgcgccaagagaagcggatctggcgtgaagcagaccctgaatttcgacctgctgaagctggctggcgacgtggaatccaacccaggcccttctagaggccatatgaccgagtacaagcccacggtgcgcctcgccacccgcgacgacgtccccagggccgtacgcaccctcgccgccgcgttcgccgactaccccgccacgcgccacaccgtcgatccggaccgccacatcgagcgggtcaccgagctgcaagaactcttcctcacgcgcgtcgggctcgacatcggcaaggtgtgggtcgcggacgacggcgccgcggtggcggtctggaccacgccggagagcgtcgaagcgggggcggtgttcgccgagatcggcccgcgcatggccgagttgagcggttcccggctggccgcgcagcaacagatggaaggcctcctggcgccgcaccggcccaaggagcccgcgtggttcctggccaccgtcggcgtctcgcccgaccaccagggcaagggtctgggcagcgccgtcgtgctccccggagtggaggcggccgagcgcgccggggtgcccgccttcctggagacctccgcgccccgcaacctccccttctacgagcggctcggcttcaccgtcaccgccgacgtcgaggtgcccgaaggaccgcgcacctggtgcatgacccgcaagcccggtgcctga

SEQ ID NO: 17794 - DNA, 2610 bp, synthetic construct
  source 1..2610: mol_type = other DNA
atggccttaccagtgaccgccttgctcctgccgctggccttgctgctccacgccgccaggccgctcgaggaggacctgaagaacgtgttcccacctgaggtggccgtgttcgagcctagcgaggccgagatcagccacacccagaaagccaccctcgtgtgcctggctaccggcttctaccccgaccatgtggaactgtcttggtgggtcaacggcaaagaggtgcacagcggcgtgtctaccgacccccagccactgaaagaacagcccgccctgaacgacagccggtactgcctgagcagcagactgagagtgtccgccaccttctggcagaacccccggaaccacttcagatgccaggtgcagttctacggcctgagcgagaacgacgagtggacccaggacagagccaagcccgtgacccagatcgtgtctgccgaagcctggggcagagccgattgcgacgtgaagctggtggaaaagagcttcgagacagacaccaacctgaacttccagaacctgagcgtgatcggcttcagaatcctgctgctgaaagtggccggctttaacctgctgatgaccctgcggctgtggtccagcagggccaagcgatctggatctggagcaacaaacttctcactactcaaacaagcaggtgacgtggaggagaatcccgggcctactagcatggccttaccagtgaccgccttgctcctgccgctggccttgctgctccacgccgccaggccggacatccagatgacccagagccccagcagcctgtctgccagcgtgggcgacagagtgaccatcacctgtagagccagccaggacgtgaacaccgccgtggcctggtatcagcagaagcctggcaaggcccccaagctgctgatctacagcgccagcttcctggaaagcggcgtgcccagcagattcagcggaagcagaagcggcaccgacttcaccctgaccatcagctccctccagcccgaggacttcgccacctactactgccagcagcactacaccacccctcccaccttcggccagaccaaggtggaaatcaagagaggcggaggcggaagtggaggcggaggatctggcggcggaggctctgaagtgcaactggtggaatctggcggcggactggtgcagcctggcggatctctgagactgagctgtgccgccagcggcttcaacatcaaggacacctacatccactgggtgcgccaggcccctggaaagggactggaatgggtggcccggatctaccccaccaacggctacaccagatacgccgacagcgtgaagggccggttcaccatcagcgccgacaccagcaagaataccgcctacctccagatgaacagcctgcgggccgaggataccgccgtgtactactgctcaagatggggaggcgacggcttctacgctatggacgtgtggggccagggcacccttgtgaccgtgtcatctacgcgtatccagaaccctgatcctgccgtgtaccagctgcgggatagcaagagcagcgacaagagcgtgtgtctgttcaccgacttcgacagccagaccaacgtgtcccagagcaaggactccgacgtgtacatcaccgataagaccgtgctggacatgcggagcatggacttcaagagcaactccgccgtggcctggtccaacaagtccgatttcgcctgcgccaacgccttcaacaacagcattatccccgaggacacattcttcccaagccccgagagcagctgcggctttaccagcgagagctaccagcagggcgtgctgagcgccaccatcctgtacgagatcctgctgggcaaggccaccctgtacgccgtgctggtgtctgccctggtgctgatggctatggtcaagcggaaggacagccggggacgcgccaagagaagcggatctggcgtgaagcagaccctgaatttcgacctgctgaagctggctggcgacgtggaatccaacccaggcccttctagaggccatatgaccgagtacaagcccacggtgcgcctcgccacccgcgacgacgtccccagggccgtacgcaccctcgccgccgcgttcgccgactaccccgccacgcgccacaccgtcgatccggaccgccacatcgagcgggtcaccgagctgcaagaactcttcctcacgcgcgtcgggctcgacatcggcaaggtgtgggtcgcggacgacggcgccgcggtggcggtctggaccacgccggagagcgtcgaagcgggggcggtgttcgccgagatcggcccgcgcatggccgagttgagcggttcccggctggccgcgcagcaacagatggaaggcctcctggcgccgcaccggcccaaggagcccgcgtggttcctggccaccgtcggcgtctcgcccgaccaccagggcaagggtctgggcagcgccgtcgtgctccccggagtggaggcggccgagcgcgccggggtgcccgccttcctggagacctccgcgccccgcaacctccccttctacgagcggctcggcttcaccgtcaccgccgacgtcgaggtgcccgaaggaccgcgcacctggtgcatgacccgcaagcccggtgcctga

SEQ ID NO: 17795 - DNA, 2247 bp, synthetic construct
  source 1..2247: mol_type = other DNA
atggccttaccagtgaccgccttgctcctgccgctggccttgctgctccacgccgccaggccgctcgaggaggacctgaagaacgtgttcccacctgaggtggccgtgttcgagcctagcgaggccgagatcagccacacccagaaagccaccctcgtgtgcctggctaccggcttctaccccgaccatgtggaactgtcttggtgggtcaacggcaaagaggtgcacagcggcgtgtctaccgacccccagccactgaaagaacagcccgccctgaacgacagccggtactgcctgagcagcagactgagagtgtccgccaccttctggcagaacccccggaaccacttcagatgccaggtgcagttctacggcctgagcgagaacgacgagtggacccaggacagagccaagcccgtgacccagatcgtgtctgccgaagcctggggcagagccgattgcgacgtgaagctggtggaaaagagcttcgagacagacaccaacctgaacttccagaacctgagcgtgatcggcttcagaatcctgctgctgaaagtggccggctttaacctgctgatgaccctgcggctgtggtccagcagggccaagcgatctggatctggagcaacaaacttctcactactcaaacaagcaggtgacgtggaggagaatcccgggcctactagcatggccctgcccgtgacagccctgctgctgcctctggctctgctgctgcacgccgccagacccgatgaattcgaggtgcaactggtggaaagcggcggaggcctggtgcaggctggcggatctctgagactgagctgtgccgccagcggcatcaccttcagcatcaacacaatgggctggtacagacaggcccctggcaagcagagggaactggtggccctgatctccagcatcggcgacacctactacgccgacagcgtgaagggccggttcaccatcagccgggacaacgccaagaacaccgtgtacctccagatgaacagcctgaagcccgaggacaccgccgtgtactactgcaagcggttcagaacagccgcccagggcaccgattattggggccagggaacacaagtgaccgtgtcctctacgcgtatccagaaccctgatcctgccgtgtaccagctgcgggatagcaagagcagcgacaagagcgtgtgtctgttcaccgacttcgacagccagaccaacgtgtcccagagcaaggactccgacgtgtacatcaccgataagaccgtgctggacatgcggagcatggacttcaagagcaactccgccgtggcctggtccaacaagtccgatttcgcctgcgccaacgccttcaacaacagcattatccccgaggacacattcttcccaagccccgagagcagctgcggctttaccagcgagagctaccagcagggcgtgctgagcgccaccatcctgtacgagatcctgctgggcaaggccaccctgtacgccgtgctggtgtctgccctggtgctgatggctatggtcaagcggaaggacagccggggacgcgccaagagaagcggatctggcgtgaagcagaccctgaatttcgacctgctgaagctggctggcgacgtggaatccaacccaggcccttctagaggccatatgaccgagtacaagcccacggtgcgcctcgccacccgcgacgacgtccccagggccgtacgcaccctcgccgccgcgttcgccgactaccccgccacgcgccacaccgtcgatccggaccgccacatcgagcgggtcaccgagctgcaagaactcttcctcacgcgcgtcgggctcgacatcggcaaggtgtgggtcgcggacgacggcgccgcggtggcggtctggaccacgccggagagcgtcgaagcgggggcggtgttcgccgagatcggcccgcgcatggccgagttgagcggttcccggctggccgcgcagcaacagatggaaggcctcctggcgccgcaccggcccaaggagcccgcgtggttcctggccaccgtcggcgtctcgcccgaccaccagggcaagggtctgggcagcgccgtcgtgctccccggagtggaggcggccgagcgcgccggggtgcccgccttcctggagacctccgcgccccgcaacctccccttctacgagcggctcggcttcaccgtcaccgccgacgtcgaggtgcccgaaggaccgcgcacctggtgcatgacccgcaagcccggtgcctga

SEQ ID NO: 17796 - DNA, 2247 bp, synthetic construct; identical to SEQ ID NO: 17795
  source 1..2247: mol_type = other DNA

SEQ ID NO: 17797 - DNA, 3042 bp, synthetic construct
  source 1..3042: mol_type = other DNA
atggccttaccagtgaccgccttgctcctgccgctggccttgctgctccacgccgccaggccgctcgaggaggacctgaagaacgtgttcccacctgaggtggccgtgttcgagcctagcgaggccgagatcagccacacccagaaagccaccctcgtgtgcctggctaccggcttctaccccgaccatgtggaactgtcttggtgggtcaacggcaaagaggtgcacagcggcgtgtctaccgacccccagccactgaaagaacagcccgccctgaacgacagccggtactgcctgagcagcagactgagagtgtccgccaccttctggcagaacccccggaaccacttcagatgccaggtgcagttctacggcctgagcgagaacgacgagtggacccaggacagagccaagcccgtgacccagatcgtgtctgccgaagcctggggcagagccgattgcgacgtgaagctggtggaaaagagcttcgagacagacaccaacctgaacttccagaacctgagcgtgatcggcttcagaatcctgctgctgaaagtggccggctttaacctgctgatgaccctgcggctgtggtccagcagggccaagcgatctggatctggagcaacaaacttctcactactcaaacaagcaggtgacgtggaggagaatcccgggcctactagcatggccttaccagtgaccgccttgctcctgccgctggccttgctgctccacgccgccaggccgcaggtccagctcgtcgagtccggcggcggcctcgtccaggccggcgactccgtcaccctctcctgcaccgcctccggccgcaccttctcctcctacgccctcgcctggttccgccagcgccccggcaaggagcgcgagttcgtcgccggcctccgctggggcggccccaccaactacgccgactccgtcaaggaccgcttcaccatctccggcgactccgccaagcacaccatgtacctccagatgaactccctcaagcccgaggacaccgccgtctactactgcggctacaaccccggcggctgggccgtcccctcccagtacgagtacgactcctggggccagggcacccaggtcaccgtctcctccggtaccggcggaggcggatctggcggcggaggtagcggtggcggaggatctgaattcgacatccagatgacacagagccctagcagcctgtctgccagcgtgggagacagagtgaccatcacatgcaaggccagcgaccacatcaacaactggctggcctggtatcagcagaagcctggacaggcccctaagctgctgatctacggcgctaccacactggaaacaggcgtgcccagcagattttctggcagcggctctggcaccgactacaccctgacaatatccagcctccagcctgaggacttcgccacctactactgtcagcagagctggaacaccccttggacattcggccagggcaccaagctggaaatcaagagaggcggaggcggaagtggaggcggaggatctggcggcggaggctctcaagttcagcttcaacagcctggcgctgagctggtcaaacctggcgcttctgtgaagatgagctgcaaagccagcggctacgccttcagcagctactggatcaactggatgaagcagaaacccggccagggactcgaatggatcggccaaatctatcccggcgacggcgacaccaactacaacggcaagttcaagggcagagccacactgaccgccgatacctctagcagcacagcctacatgcagctgagcagcctgaccagcgaagatagcgccgtgtacttctgtgcccggtccatcacaacagtcgtgggctgcgctatggactattggggccagggaacaagcgtgaccgtgtctagtacgcgtatccagaaccctgatcctgccgtgtaccagctgcgggatagcaagagcagcgacaagagcgtgtgtctgttcaccgacttcgacagccagaccaacgtgtcccagagcaaggactccgacgtgtacatcaccgataagaccgtgctggacatgcggagcatggacttcaagagcaactccgccgtggcctggtccaacaagtccgatttcgcctgcgccaacgccttcaacaacagcattatccccgaggacacattcttcccaagccccgagagcagctgcggctttaccagcgagagctaccagcagggcgtgctgagcgccaccatcctgtacgagatcctgctgggcaaggccaccctgtacgccgtgctggtgtctgccctggtgctgatggctatggtcaagcggaaggacagccggggacgcgccaagagaagcggatctggcgtgaagcagaccctgaatttcgacctgctgaagctggctggcgacgtggaatccaacccaggcccttctagaggccatatgaccgagtacaagcccacggtgcgcctcgccacccgcgacgacgtccccagggccgtacgcaccctcgccgccgcgttcgccgactaccccgccacgcgccacaccgtcgatccggaccgccacatcgagcgggtcaccgagctgcaagaactcttcctcacgcgcgtcgggctcgacatcggcaaggtgtgggtcgcggacgacggcgccgcggtggcggtctggaccacgccggagagcgtcgaagcgggggcggtgttcgccgagatcggcccgcgcatggccgagttgagcggttcccggctggccgcgcagcaacagatggaaggcctcctggcgccgcaccggcccaaggagcccgcgtggttcctggccaccgtcggcgtctcgcccgaccaccagggcaagggtctgggcagcgccgtcgtgctccccggagtggaggcggccgagcgcgccggggtgcccgccttcctggagacctccgcgccccgcaacctccccttctacgagcggctcggcttcaccgtcaccgccgacgtcgaggtgcccgaaggaccgcgcacctggtgcatgacccgcaagcccggtgcctga

SEQ ID NO: 17798 - DNA, 3429 bp, synthetic construct
  source 1..3429: mol_type = other DNA
atggccttaccagtgaccgccttgctcctgccgctggccttgctgctccacgccgccaggccgctcgaggaggacctgaagaacgtgttcccacctgaggtggccgtgttcgagcctagcgaggccgagatcagccacacccagaaagccaccctcgtgtgcctggctaccggcttctaccccgaccatgtggaactgtcttggtgggtcaacggcaaagaggtgcacagcggcgtgtctaccgacccccagccactgaaagaacagcccgccctgaacgacagccggtactgcctgagcagcagactgagagtgtccgccaccttctggcagaacccccggaaccacttcagatgccaggtgcagttctacggcctgagcgagaacgacgagtggacccaggacagagccaagcccgtgacccagatcgtgtctgccgaagcctggggcagagccgattgcgacgtgaagctggtggaaaagagcttcgagacagacaccaacctgaacttccagaacctgagcgtgatcggcttcagaatcctgctgctgaaagtggccggctttaacctgctgatgaccctgcggctgtggtccagcagggccaagcgatctggatctggagcaacaaacttctcactactcaaacaagcaggtgacgtggaggagaatcccgggcctactagcatggccttaccagtgaccgccttgctcctgccgctggccttgctgctccacgccgccaggccggaggttcagctgcttgagtctggcggaggactggttcaacctggcggaagcctgagactgtcttgtgccgccagcggcttcacctttagcagctacgccatgagctgggtccgacaggctcctggcaaaggactggaatgggtgtccagcatcagcggcagcggcgactacatctactacgccgatagcgtgaagggcagattcaccatcagccgggacatcagcaagaacaccctgtacctccagatgaacagcctgagagccgaggacaccgccgtgtactactgtgccaaagaaggcaccggcgctaacagcagcctggccgattatagaggccagggcacactggtcaccgtgtctagtggcggaggaagcggcggaggatctcaggtccagctcgtcgagtccggcggcggcctcgtccaggccggcgactccgtcaccctctcctgcaccgcctccggccgcaccttctcctcctacgccctcgcctggttccgccagcgccccggcaaggagcgcgagttcgtcgccggcctccgctggggcggccccaccaactacgccgactccgtcaaggaccgcttcaccatctccggcgactccgccaagcacaccatgtacctccagatgaactccctcaagcccgaggacaccgccgtctactactgcggctacaaccccggcggctgggccgtcccctcccagtacgagtacgactcctggggccagggcacccaggtcaccgtctcctccggtaccggcggaggcggatctggcggcggaggtagcggtggcggaggatctgaattcgacatccagatgacacagagccctagcagcctgtctgccagcgtgggagacagagtgaccatcacatgcaaggccagcgaccacatcaacaactggctggcctggtatcagcagaagcctggacaggcccctaagctgctgatctacggcgctaccacactggaaacaggcgtgcccagcagattttctggcagcggctctggcaccgactacaccctgacaatatccagcctccagcctgaggacttcgccacctactactgtcagcagagctggaacaccccttggacattcggccagggcaccaagctggaaatcaagagaggcggaggcggaagtggaggcggaggatctggcggcggaggctctcaagttcagcttcaacagcctggcgctgagctggtcaaacctggcgcttctgtgaagatgagctgcaaagccagcggctacgccttcagcagctactggatcaactggatgaagcagaaacccggccagggactcgaatggatcggccaaatctatcccggcgacggcgacaccaactacaacggcaagttcaagggcagagccacactgaccgccgatacctctagcagcacagcctacatgcagctgagcagcctgaccagcgaagatagcgccgtgtacttctgtgcccggtccatcacaacagtcgtgggctgcgctatggactattggggccagggaacaagcgtgaccgtgtctagtacgcgtatccagaaccctgatcctgccgtgtaccagctgcgggatagcaagagcagcgacaagagcgtgtgtctgttcaccgacttcgacagccagaccaacgtgtcccagagcaaggactccgacgtgtacatcaccgataagaccgtgctggacatgcggagcatggacttcaagagcaactccgccgtggcctggtccaacaagtccgatttcgcctgcgccaacgccttcaacaacagcattatccccgaggacacattcttcccaagccccgagagcagctgcggctttaccagcgagagctaccagcagggcgtgctgagcgccaccatcctgtacgagatcctgctgggcaaggccaccctgtacgccgtgctggtgtctgccctggtgctgatggctatggtcaagcggaaggacagccggggacgcgccaagagaagcggatctggcgtgaagcagaccctgaatttcgacctgctgaagctggctggcgacgtggaatccaacccaggcccttctagaggccatatgaccgagtacaagcccacggtgcgcctcgccacccgcgacgacgtccccagggccgtacgcaccctcgccgccgcgttcgccgactaccccgccacgcgccacaccgtcgatccggaccgccacatcgagcgggtcaccgagctgcaagaactcttcctcacgcgcgtcgggctcgacatcggcaaggtgtgggtcgcggacgacggcgccgcggtggcggtctggaccacgccggagagcgtcgaagcgggggcggtgttcgccgagatcggcccgcgcatggccgagttgagcggttcccggctggccgcgcagcaacagatggaaggcctcctggcgccgcaccggcccaaggagcccgcgtggttcctggccaccgtcggcgtctcgcccgaccaccagggcaagggtctgggcagcgccgtcgtgctccccggagtggaggcggccgagcgcgccggggtgcccgccttcctggagacctccgcgccccgcaacctccccttctacgagcggctcggcttcaccgtcaccgccgacgtcgaggtgcccgaaggaccgcgcacctggtgcatgacccgcaagcccggtgcctga

SEQ ID NO: 17799 - DNA, 3423 bp, synthetic construct
  source 1..3423: mol_type = other DNA
atggccttaccagtgaccgccttgctcctgccgctggccttgctgctccacgccgccaggccgctcgaggaggacctgaagaacgtgttcccacctgaggtggccgtgttcgagcctagcgaggccgagatcagccacacccagaaagccaccctcgtgtgcctggctaccggcttctaccccgaccatgtggaactgtcttggtgggtcaacggcaaagaggtgcacagcggcgtgtctaccgacccccagccactgaaagaacagcccgccctgaacgacagccggtactgcctgagcagcagactgagagtgtccgccaccttctggcagaacccccggaaccacttcagatgccaggtgcagttctacggcctgagcgagaacgacgagtggacccaggacagagccaagcccgtgacccagatcgtgtctgccgaagcctggggcagagccgattgcgacgtgaagctggtggaaaagagcttcgagacagacaccaacctgaacttccagaacctgagcgtgatcggcttcagaatcctgctgctgaaagtggccggctttaacctgctgatgaccctgcggctgtggtccagcagggccaagcgatctggatctggagcaacaaacttctcactactcaaacaagcaggtgacgtggaggagaatcccgggcctactagcatggccttaccagtgaccgccttgctcctgccgctggccttgctgctccacgccgccaggccgggcgtgacacagagccccacacacctgattaagaccagaggccagcaggccacactgagatgcagccctatcagcggccacaccagcgtgtactggtatcagcaggctctcggactgggcctccagttcctgctttggtacgacgagggcgaagagagaaaccggggcaacttccctcctcggttttccggcagacagttccccaactacagcagcgagctgaacgtgaacgccctggaactggaagatagcgccctgtacctgtgtgcctcttctcttggtggacctcgcggactggctggactgagaggggatgagcagtttttcggccctggcaccagactgaccgtgctggaaggcggaggaagcggcggaggatctcaggtccagctcgtcgagtccggcggcggcctcgtccaggccggcgactccgtcaccctctcctgcaccgcctccggccgcaccttctcctcctacgccctcgcctggttccgccagcgccccggcaaggagcgcgagttcgtcgccggcctccgctggggcggccccaccaactacgccgactccgtcaaggaccgcttcaccatctccggcgactccgccaagcacaccatgtacctccagatgaactccctcaagcccgaggacaccgccgtctactactgcggctacaaccccggcggctgggccgtcccctcccagtacgagtacgactcctggggccagggcacccaggtcaccgtctcctccggtaccggcggaggcggatctggcggcggaggtagcggtggcggaggatctgaattcgacatccagatgacacagagccctagcagcctgtctgccagcgtgggagacagagtgaccatcacatgcaaggccagcgaccacatcaacaactggctggcctggtatcagcagaagcctggacaggcccctaagctgctgatctacggcgctaccacactggaaacaggcgtgcccagcagattttctggcagcggctctggcaccgactacaccctgacaatatccagcctccagcctgaggacttcgccacctactactgtcagcagagctggaacaccccttggacattcggccagggcaccaagctggaaatcaagagaggcggaggcggaagtggaggcggaggatctggcggcggaggctctcaagttcagcttcaacagcctggcgctgagctggtcaaacctggcgcttctgtgaagatgagctgcaaagccagcggctacgccttcagcagctactggatcaactggatgaagcagaaacccggccagggactcgaatggatcggccaaatctatcccggcgacggcgacaccaactacaacggcaagttcaagggcagagccacactgaccgccgatacctctagcagcacagcctacatgcagctgagcagcctgaccagcgaagatagcgccgtgtacttctgtgcccggtccatcacaacagtcgtgggctgcgctatggactattggggccagggaacaagcgtgaccgtgtctagtacgcgtatccagaaccctgatcctgccgtgtaccagctgcgggatagcaagagcagcgacaagagcgtgtgtctgttcaccgacttcgacagccagaccaacgtgtcccagagcaaggactccgacgtgtacatcaccgataagaccgtgctggacatgcggagcatggacttcaagagcaactccgccgtggcctggtccaacaagtccgatttcgcctgcgccaacgccttcaacaacagcattatccccgaggacacattcttcccaagccccgagagcagctgcggctttaccagcgagagctaccagcagggcgtgctgagcgccaccatcctgtacgagatcctgctgggcaaggccaccctgtacgccgtgctggtgtctgccctggtgctgatggctatggtcaagcggaaggacagccggggacgcgccaagagaagcggatctggcgtgaagcagaccctgaatttcgacctgctgaagctggctggcgacgtggaatccaacccaggcccttctagaggccatatgaccgagtacaagcccacggtgcgcctcgccacccgcgacgacgtccccagggccgtacgcaccctcgccgccgcgttcgccgactaccccgccacgcgccacaccgtcgatccggaccgccacatcgagcgggtcaccgagctgcaagaactcttcctcacgcgcgtcgggctcgacatcggcaaggtgtgggtcgcggacgacggcgccgcggtggcggtctggaccacgccggagagcgtcgaagcgggggcggtgttcgccgagatcggcccgcgcatggccgagttgagcggttcccggctggccgcgcagcaacagatggaaggcctcctggcgccgcaccggcccaaggagcccgcgtggttcctggccaccgtcggcgtctcgcccgaccaccagggcaagggtctgggcagcgccgtcgtgctccccggagtggaggcggccgagcgcgccggggtgcccgccttcctggagacctccgcgccccgcaacctccccttctacgagcggctcggcttcaccgtcaccgccgacgtcgaggtgcccgaaggaccgcgcacctggtgcatgacccgcaagcccggtgcctga

SEQ ID NO: 17800 - DNA, 3405 bp, synthetic construct
  source 1..3405: mol_type = other DNA
atggccttaccagtgaccgccttgctcctgccgctggccttgctgctccacgccgccaggccgctcgaggaggacctgaagaacgtgttcccacctgaggtggccgtgttcgagcctagcgaggccgagatcagccacacccagaaagccaccctcgtgtgcctggctaccggcttctaccccgaccatgtggaactgtcttggtgggtcaacggcaaagaggtgcacagcggcgtgtctaccgacccccagccactgaaagaacagcccgccctgaacgacagccggtactgcctgagcagcagactgagagtgtccgccaccttctggcagaacccccggaaccacttcagatgccaggtgcagttctacggcctgagcgagaacgacgagtggacccaggacagagccaagcccgtgacccagatcgtgtctgccgaagcctggggcagagccgattgcgacgtgaagctggtggaaaagagcttcgagacagacaccaacctgaacttccagaacctgagcgtgatcggcttcagaatcctgctgctgaaagtggccggctttaacctgctgatgaccctgcggctgtggtccagcagggccaagcgatctggatctggagcaacaaacttctcactactcaaacaagcaggtgacgtggaggagaatcccgggcctactagcatggccttaccagtgaccgccttgctcctgccgctggccttgctgctccacgccgccaggccgggcgtgacacagagccccacacacctgattaagaccagaggccagcaggccacactgagatgcagccctatcagcggccacaccagcgtgtactggtatcagcaggctctcggactgggcctccagttcctgctttggtacgacgagggcgaagagagaaaccggggcaacttccctcctcggttttccggcagacagttccccaactacagcagcgagctgaacgtgaacgccctggaactggaagatagcgccctgtacctgtgtgcctcttctcttggtggacctcgcggactggctggactgagaggggatgagcagtttttcggccctggcaccagactgaccgtgctggaaggcggaggaagcggcggaggatctggcgtgacacagagccccacacacctgattaagaccagaggccagcaggccacactgagatgcagccctatcagcggccacaccagcgtgtactggtatcagcaggctctcggactgggcctccagttcctgctttggtacgacgagggcgaagagagaaaccggggcaacttccctcctcggttttccggcagacagttccccaactacagcagcgagctgaacgtgaacgccctggaactggaagatagcgccctgtacctgtgtgccagctctctcggcggagatgaactgggagccgatggcaacgagcagttctttggccctggcaccagactgaccgtgctggaaggtaccggcggaggcggatctggcggcggaggtagcggtggcggaggatctgaattcgacatccagatgacacagagccctagcagcctgtctgccagcgtgggagacagagtgaccatcacatgcaaggccagcgaccacatcaacaactggctggcctggtatcagcagaagcctggacaggcccctaagctgctgatctacggcgctaccacactggaaacaggcgtgcccagcagattttctggcagcggctctggcaccgactacaccctgacaatatccagcctccagcctgaggacttcgccacctactactgtcagcagagctggaacaccccttggacattcggccagggcaccaagctggaaatcaagagaggcggaggcggaagtggaggcggaggatctggcggcggaggctctcaagttcagcttcaacagcctggcgctgagctggtcaaacctggcgcttctgtgaagatgagctgcaaagccagcggctacgccttcagcagctactggatcaactggatgaagcagaaacccggccagggactcgaatggatcggccaaatctatcccggcgacggcgacaccaactacaacggcaagttcaagggcagagccacactgaccgccgatacctctagcagcacagcctacatgcagctgagcagcctgaccagcgaagatagcgccgtgtacttctgtgcccggtccatcacaacagtcgtgggctgcgctatggactattggggccagggaacaagcgtgaccgtgtctagtacgcgtatccagaaccctgatcctgccgtgtaccagctgcgggatagcaagagcagcgacaagagcgtgtgtctgttcaccgacttcgacagccagaccaacgtgtcccagagcaaggactccgacgtgtacatcaccgataagaccgtgctggacatgcggagcatggacttcaagagcaactccgccgtggcctggtccaacaagtccgatttcgcctgcgccaacgccttcaacaacagcattatccccgaggacacattcttcccaagccccgagagcagctgcggctttaccagcgagagctaccagcagggcgtgctgagcgccaccatcctgtacgagatcctgctgggcaaggccaccctgtacgccgtgctggtgtctgccctggtgctgatggctatggtcaagcggaaggacagccggggacgcgccaagagaagcggatctggcgtgaagcagaccctgaatttcgacctgctgaagctggctggcgacgtggaatccaacccaggcccttctagaggccatatgaccgagtacaagcccacggtgcgcctcgccacccgcgacgacgtccccagggccgtacgcaccctcgccgccgcgttcgccgactaccccgccacgcgccacaccgtcgatccggaccgccacatcgagcgggtcaccgagctgcaagaactcttcctcacgcgcgtcgggctcgacatcggcaaggtgtgggtcgcggacgacggcgccgcggtggcggtctggaccacgccggagagcgtcgaagcgggggcggtgttcgccgagatcggcccgcgcatggccgagttgagcggttcccggctggccgcgcagcaacagatggaaggcctcctggcgccgcaccggcccaaggagcccgcgtggttcctggccaccgtcggcgtctcgcccgaccaccagggcaagggtctgggcagcgccgtcgtgctccccggagtggaggcggccgagcgcgccggggtgcccgccttcctggagacctccgcgccccgcaacctccccttctacgagcggctcggcttcaccgtcaccgccgacgtcgaggtgcccgaaggaccgcgcacctggtgcatgacccgcaagcccggtgcctga

SEQ ID NO: 17801 - DNA, 2265 bp, synthetic construct
  source 1..2265: mol_type = other DNA
atggccttaccagtgaccgccttgctcctgccgctggccttgctgctccacgccgccaggccgctcgaggaggacctgaagaacgtgttcccacctgaggtggccgtgttcgagcctagcgaggccgagatcagccacacccagaaagccaccctcgtgtgcctggctaccggcttctaccccgaccatgtggaactgtcttggtgggtcaacggcaaagaggtgcacagcggcgtgtctaccgacccccagccactgaaagaacagcccgccctgaacgacagccggtactgcctgagcagcagactgagagtgtccgccaccttctggcagaacccccggaaccacttcagatgccaggtgcagttctacggcctgagcgagaacgacgagtggacccaggacagagccaagcccgtgacccagatcgtgtctgccgaagcctggggcagagccgattgcgacgtgaagctggtggaaaagagcttcgagacagacaccaacctgaacttccagaacctgagcgtgatcggcttcagaatcctgctgctgaaagtggccggctttaacctgctgatgaccctgcggctgtggtccagcagggccaagcgatctggatctggagcaacaaacttctcactactcaaacaagcaggtgacgtggaggagaatcccgggcctactagcatggccctgcccgtgacagccctgctgctgcctctggctctgctgctgcacgccgccagacccgatgaattcggctctgacctgggcatcaagctgctgttcgccgctgccaagggccaggacgacgaagtgcggattctgctggctgctggggccgacgtgaacgccaaggatttcgagggctacacccccctgcacgtggccgcctatgatggacacctggaaatcgtggaagtgctgctgaaggctggcgctgatgtgaatgccaaagacagccagggccggacccctctgcatgaagccgcctacagcggccatctggaaattgtggaagtgctgctgaaagccggggcagacgtgaacgctcaggacgacgctggcgagacaccagccgatctggctgcagcttggggccacgaagatatcgccgaggtgctgcagaagacgcgtatccagaaccctgatcctgccgtgtaccagctgcgggatagcaagagcagcgacaagagcgtgtgtctgttcaccgacttcgacagccagaccaacgtgtcccagagcaaggactccgacgtgtacatcaccgataagaccgtgctggacatgcggagcatggacttcaagagcaactccgccgtggcctggtccaacaagtccgatttcgcctgcgccaacgccttcaacaacagcattatccccgaggacacattcttcccaagccccgagagcagctgcggctttaccagcgagagctaccagcagggcgtgctgagcgccaccatcctgtacgagatcctgctgggcaaggccaccctgtacgccgtgctggtgtctgccctggtgctgatggctatggtcaagcggaaggacagccggggacgcgccaagagaagcggatctggcgtgaagcagaccctgaatttcgacctgctgaagctggctggcgacgtggaatccaacccaggcccttctagaggccatatgaccgagtacaagcccacggtgcgcctcgccacccgcgacgacgtccccagggccgtacgcaccctcgccgccgcgttcgccgactaccccgccacgcgccacaccgtcgatccggaccgccacatcgagcgggtcaccgagctgcaagaactcttcctcacgcgcgtcgggctcgacatcggcaaggtgtgggtcgcggacgacggcgccgcggtggcggtctggaccacgccggagagcgtcgaagcgggggcggtgttcgccgagatcggcccgcgcatggccgagttgagcggttcccggctggccgcgcagcaacagatggaaggcctcctggcgccgcaccggcccaaggagcccgcgtggttcctggccaccgtcggcgtctcgcccgaccaccagggcaagggtctgggcagcgccgtcgtgctccccggagtggaggcggccgagcgcgccggggtgcccgccttcctggagacctccgcgccccgcaacctccccttctacgagcggctcggcttcaccgtcaccgccgacgtcgaggtgcccgaaggaccgcgcacctggtgcatgacccgcaagcccggtgcctga

SEQ ID NO: 17802 - DNA, 2052 bp, synthetic construct
  source 1..2052: mol_type = other DNA
atggccttaccagtgaccgccttgctcctgccgctggccttgctgctccacgccgccaggccgctcgaggaggacctgaagaacgtgttcccacctgaggtggccgtgttcgagcctagcgaggccgagatcagccacacccagaaagccaccctcgtgtgcctggctaccggcttctaccccgaccatgtggaactgtcttggtgggtcaacggcaaagaggtgcacagcggcgtgtctaccgacccccagccactgaaagaacagcccgccctgaacgacagccggtactgcctgagcagcagactgagagtgtccgccaccttctggcagaacccccggaaccacttcagatgccaggtgcagttctacggcctgagcgagaacgacgagtggacccaggacagagccaagcccgtgacccagatcgtgtctgccgaagcctggggcagagccgattgcgacgtgaagctggtggaaaagagcttcgagacagacaccaacctgaacttccagaacctgagcgtgatcggcttcagaatcctgctgctgaaagtggccggctttaacctgctgatgaccctgcggctgtggtccagcagggccaagcgatctggatctggagcaacaaacttctcactactcaaacaagcaggtgacgtggaggagaatcccgggcctactagcatggactggatttggcgcatccttttccttgtcggcgctgctaccggcgcccattccttcgaaggcagcggattcgaatacgccaaagagatgcggaacgcctactgggagatcgccctgctgcccaatctgaccaaccagcagaagagagcccccatcagaaagctgtacgacgacccctcccagagcagcgagctgctgtctgaggctaaaaaactgaacgatagccagacgcgtatccagaaccctgatcctgccgtgtaccagctgcgggatagcaagagcagcgacaagagcgtgtgtctgttcaccgacttcgacagccagaccaacgtgtcccagagcaaggactccgacgtgtacatcaccgataagaccgtgctggacatgcggagcatggacttcaagagcaactccgccgtggcctggtccaacaagtccgatttcgcctgcgccaacgccttcaacaacagcattatccccgaggacacattcttcccaagccccgagagcagctgcggctttaccagcgagagctaccagcagggcgtgctgagcgccaccatcctgtacgagatcctgctgggcaaggccaccctgtacgccgtgctggtgtctgccctggtgctgatggctatggtcaagcggaaggacagccggggacgcgccaagagaagcggatctggcgtgaagcagaccctgaatttcgacctgctgaagctggctggcgacgtggaatccaacccaggcccttctagaggccatatgaccgagtacaagcccacggtgcgcctcgccacccgcgacgacgtccccagggccgtacgcaccctcgccgccgcgttcgccgactaccccgccacgcgccacaccgtcgatccggaccgccacatcgagcgggtcaccgagctgcaagaactcttcctcacgcgcgtcgggctcgacatcggcaaggtgtgggtcgcggacgacggcgccgcggtggcggtctggaccacgccggagagcgtcgaagcgggggcggtgttcgccgagatcggcccgcgcatggccgagttgagcggttcccggctggccgcgcagcaacagatggaaggcctcctggcgccgcaccggcccaaggagcccgcgtggttcctggccaccgtcggcgtctcgcccgaccaccagggcaagggtctgggcagcgccgtcgtgctccccggagtggaggcggccgagcgcgccggggtgcccgccttcctggagacctccgcgccccgcaacctccccttctacgagcggctcggcttcaccgtcaccgccgacgtcgaggtgcccgaaggaccgcgcacctggtgcatgacccgcaagcccggtgcctga

SEQ ID NO: 17803 - DNA, 2718 bp, synthetic construct
  source 1..2718: mol_type = other DNA
atggccttaccagtgaccgccttgctcctgccgctggccttgctgctccacgccgccaggccgctcgaggaggacctgaagaacgtgttcccacctgaggtggccgtgttcgagcctagcgaggccgagatcagccacacccagaaagccaccctcgtgtgcctggctaccggcttctaccccgaccatgtggaactgtcttggtgggtcaacggcaaagaggtgcacagcggcgtgtctaccgacccccagccactgaaagaacagcccgccctgaacgacagccggtactgcctgagcagcagactgagagtgtccgccaccttctggcagaacccccggaaccacttcagatgccaggtgcagttctacggcctgagcgagaacgacgagtggacccaggacagagccaagcccgtgacccagatcgtgtctgccgaagcctggggcagagccgattgcgacgtgaagctggtggaaaagagcttcgagacagacaccaacctgaacttccagaacctgagcgtgatcggcttcagaatcctgctgctgaaagtggccggctttaacctgctgatgaccctgcggctgtggtccagcagggccaagcgatctggatctggagcaacaaacttctcactactcaaacaagcaggtgacgtggaggagaatcccgggcctactagcatggccctgcccgtgacagccctgctgctgcctctggctctgctgctgcacgccgccagacccgatgaattcgaggtgcaactggtggaaagcggcggaggcctggtgcaggctggcggatctctgagactgagctgtgccgccagcggcatcaccttcagcatcaacacaatgggctggtacagacaggcccctggcaagcagagggaactggtggccctgatctccagcatcggcgacacctactacgccgacagcgtgaagggccggttcaccatcagccgggacaacgccaagaacaccgtgtacctccagatgaacagcctgaagcccgaggacaccgccgtgtactactgcaagcggttcagaacagccgcccagggcaccgattattggggccagggaacacaagtgaccgtgtcctctctcgagggaggaggcggctccgggggaggcggaagtggaggcggaggatctgggtctggaggaagcggatctggaggctcagggtcagggggctcaggcagtggaggctctttcgaagtgcaactggtggaatctgggggcggactggtgcagccaggcggaagtctgaggctgtcttgtgccgcctccggcagcatcttcggcttcaacgacatggcctggtatcggcaggctcccggaaaacagcgcgagctggtggctctgattagcagagtgggcgtgaccagcagcgccgactctgtgaagggcagattcacaatctccagagtgaacgccaaggatacagtgtacctccagatgaactctctgaaacctgaggatacagcagtgtactattgctacatggaccagcggctggacggcagcacactggcctactggggacagggaactcaagtgacagtgtctagcacgcgtatccagaaccctgatcctgccgtgtaccagctgcgggatagcaagagcagcgacaagagcgtgtgtctgttcaccgacttcgacagccagaccaacgtgtcccagagcaaggactccgacgtgtacatcaccgataagaccgtgctggacatgcggagcatggacttcaagagcaactccgccgtggcctggtccaacaagtccgatttcgcctgcgccaacgccttcaacaacagcattatccccgaggacacattcttcccaagccccgagagcagctgcggctttaccagcgagagctaccagcagggcgtgctgagcgccaccatcctgtacgagatcctgctgggcaaggccaccctgtacgccgtgctggtgtctgccctggtgctgatggctatggtcaagcggaaggacagccggggacgcgccaagagaagcggatctggcgtgaagcagaccctgaatttcgacctgctgaagctggctggcgacgtggaatccaacccaggcccttctagaggccatatgaccgagtacaagcccacggtgcgcctcgccacccgcgacgacgtccccagggccgtacgcaccctcgccgccgcgttcgccgactaccccgccacgcgccacaccgtcgatccggaccgccacatcgagcgggtcaccgagctgcaagaactcttcctcacgcgcgtcgggctcgacatcggcaaggtgtgggtcgcggacgacggcgccgcggtggcggtctggaccacgccggagagcgtcgaagcgggggcggtgttcgccgagatcggcccgcgcatggccgagttgagcggttcccggctggccgcgcagcaacagatggaaggcctcctggcgccgcaccggcccaaggagcccgcgtggttcctggccaccgtcggcgtctcgcccgaccaccagggcaagggtctgggcagcgccgtcgtgctccccggagtggaggcggccgagcgcgccggggtgcccgccttcctggagacctccgcgccccgcaacctccccttctacgagcggctcggcttcaccgtcaccgccgacgtcgaggtgcccgaaggaccgcgcacctggtgcatgacccgcaagcccggtgcctga

SEQ ID NO: 17804 - DNA, 2460 bp, synthetic construct
  source 1..2460: mol_type = other DNA
atggccttaccagtgaccgccttgctcctgccgctggccttgctgctccacgccgccaggccgctcgaggaggacctgaagaacgtgttcccacctgaggtggccgtgttcgagcctagcgaggccgagatcagccacacccagaaagccaccctcgtgtgcctggctaccggcttctaccccgaccatgtggaactgtcttggtgggtcaacggcaaagaggtgcacagcggcgtgtctaccgacccccagccactgaaagaacagcccgccctgaacgacagccggtactgcctgagcagcagactgagagtgtccgccaccttctggcagaacccccggaaccacttcagatgccaggtgcagttctacggcctgagcgagaacgacgagtggacccaggacagagccaagcccgtgacccagatcgtgtctgccgaagcctggggcagagccgattgcgacgtgaagctggtggaaaagagcttcgagacagacaccaacctgaacttccagaacctgagcgtgatcggcttcagaatcctgctgctgaaagtggccggctttaacctgctgatgaccctgcggctgtggtccagcagggccaagcgatctggatctggagcaacaaacttctcactactcaaacaagcaggtgacgtggaggagaatcccgggcctactagcatggcccttccagtcactgccttgctgttgcctctggcgctcctgctccacgccgctagaccgggcatgagaaccgaggacctgcctaaggccgtggtgttcctggaaccccagtggtacagagtgctggaaaaggacagcgtgaccctgaagtgccagggcgcctacagccccgaggacaatagcacccagtggttccacaacgagagcctgatctccagccaggccagcagctacttcatcgacgccgccaccgtggacgacagcggcgagtatagatgccagaccaacctgagcaccctgagcgaccccgtgcagctggaagtgcacatcggatggctgctgctgcaggcccccagatgggtgttcaaagaagaggaccccatccacctgagatgccactcttggaagaacaccgccctgcacaaagtgacctacctgcagaacggcaagggcagaaagtacttccaccacaacagcgacttctacatccccaaggccaccctgaaggactccggctcctacttctgcagaggcctcgtgggcagcaagaacgtgtccagcgagacagtgaacatcaccatcacccagggcctggccgtgtctaccatcagcagctttttcccacccggctaccagacgcgtatccagaaccctgatcctgccgtgtaccagctgcgggatagcaagagcagcgacaagagcgtgtgtctgttcaccgacttcgacagccagaccaacgtgtcccagagcaaggactccgacgtgtacatcaccgataagaccgtgctggacatgcggagcatggacttcaagagcaactccgccgtggcctggtccaacaagtccgatttcgcctgcgccaacgccttcaacaacagcattatccccgaggacacattcttcccaagccccgagagcagctgcggctttaccagcgagagctaccagcagggcgtgctgagcgccaccatcctgtacgagatcctgctgggcaaggccaccctgtacgccgtgctggtgtctgccctggtgctgatggctatggtcaagcggaaggacagccggggacgcgccaagagaagcggatctggcgtgaagcagaccctgaatttcgacctgctgaagctggctggcgacgtggaatccaacccaggcccttctagaggccatatgaccgagtacaagcccacggtgcgcctcgccacccgcgacgacgtccccagggccgtacgcaccctcgccgccgcgttcgccgactaccccgccacgcgccacaccgtcgatccggaccgccacatcgagcgggtcaccgagctgcaagaactcttcctcacgcgcgtcgggctcgacatcggcaaggtgtgggtcgcggacgacggcgccgcggtggcggtctggaccacgccggagagcgtcgaagcgggggcggtgttcgccgagatcggcccgcgcatggccgagttgagcggttcccggctggccgcgcagcaacagatggaaggcctcctggcgccgcaccggcccaaggagcccgcgtggttcctggccaccgtcggcgtctcgcccgaccaccagggcaagggtctgggcagcgccgtcgtgctccccggagtggaggcggccgagcgcgccggggtgcccgccttcctggagacctccgcgccccgcaacctccccttctacgagcggctcggcttcaccgtcaccgccgacgtcgaggtgcccgaaggaccgcgcacctggtgcatgacccgcaagcccggtgcctga

SEQ ID NO: 17805 - DNA, 1341 bp, synthetic construct
  source 1..1341: mol_type = other DNA
atggccttaccagtgaccgccttgctcctgccgctggccttgctgctccacgccgccaggccgctcgaggaggacctgaagaacgtgttcccacctgaggtggccgtgttcgagcctagcgaggccgagatcagccacacccagaaagccaccctcgtgtgcctggctaccggcttctaccccgaccatgtggaactgtcttggtgggtcaacggcaaagaggtgcacagcggcgtgtctaccgacccccagccactgaaagaacagcccgccctgaacgacagccggtactgcctgagcagcagactgagagtgtccgccaccttctggcagaacccccggaaccacttcagatgccaggtgcagttctacggcctgagcgagaacgacgagtggacccaggacagagccaagcccgtgacccagatcgtgtctgccgaagcctggggcagagccgattgcgacgtgaagctggtggaaaagagcttcgagacagacaccaacctgaacttccagaacctgagcgtgatcggcttcagaatcctgctgctgaaagtggccggctttaacctgctgatgaccctgcggctgtggtccagcagggccaagcgatctggatctggagcaacaaacttctcactactcaaacaagcaggtgacgtggaggagaatcccgggcctactagcgccaccatggccttaccagtgaccgccttgctcctgccgctggccttgctgctccacgccgccaggccgatggaccccgacctggaaatcagagccgccttcctgcggcagagaaacacagccctgagaacagaggtggccgagctggaacaagaggtgcagcggctggaaaacgaggtgtcccagtacgagacaagatacggccctctcggaggcggaaaaacgcgtatccagaaccctgatcctgccgtgtaccagctgcgggatagcaagagcagcgacaagagcgtgtgtctgttcaccgacttcgacagccagaccaacgtgtcccagagcaaggactccgacgtgtacatcaccgataagaccgtgctggacatgcggagcatggacttcaagagcaactccgccgtggcctggtccaacaagtccgatttcgcctgcgccaacgccttcaacaacagcattatccccgaggacacattcttcccaagccccgagagcagctgcggctttaccagcgagagctaccagcagggcgtgctgagcgccaccatcctgtacgagatcctgctgggcaaggccaccctgtacgccgtgctggtgtctgccctggtgctgatggctatggtcaagcggaaggacagccgggga

SEQ ID NO: 17806 - DNA, 1341 bp, synthetic construct
  source 1..1341: mol_type = other DNA
atggccttaccagtgaccgccttgctcctgccgctggccttgctgctccacgccgccaggccgctcgaggaggacctgaagaacgtgttcccacctgaggtggccgtgttcgagcctagcgaggccgagatcagccacacccagaaagccaccctcgtgtgcctggctaccggcttctaccccgaccatgtggaactgtcttggtgggtcaacggcaaagaggtgcacagcggcgtgtctaccgacccccagccactgaaagaacagcccgccctgaacgacagccggtactgcctgagcagcagactgagagtgtccgccaccttctggcagaacccccggaaccacttcagatgccaggtgcagttctacggcctgagcgagaacgacgagtggacccaggacagagccaagcccgtgacccagatcgtgtctgccgaagcctggggcagagccgattgcgacgtgaagctggtggaaaagagcttcgagacagacaccaacctgaacttccagaacctgagcgtgatcggcttcagaatcctgctgctgaaagtggccggctttaacctgctgatgaccctgcggctgtggtccagcagggccaagcgatctggatctggagcaacaaacttctcactactcaaacaagcaggtgacgtggaggagaatcccgggcctactagcgccaccatggccttaccagtgaccgccttgctcctgccgctggccttgctgctccacgccgccaggccgatggaccctgatctcgaaattgaggccgcctttctggaacgcgagaacactgccctggaaaccagggtcgcagagctgagacagagagtgcagagactgcggaacagagtgtctcagtaccgcaccagatatggcccactcggcggaggtaaaacgcgtatccagaaccctgatcctgccgtgtaccagctgcgggatagcaagagcagcgacaagagcgtgtgtctgttcaccgacttcgacagccagaccaacgtgtcccagagcaaggactccgacgtgtacatcaccgataagaccgtgctggacatgcggagcatggacttcaagagcaactccgccgtggcctggtccaacaagtccgatttcgcctgcgccaacgccttcaacaacagcattatccccgaggacacattcttcccaagccccgagagcagctgcggctttaccagcgagagctaccagcagggcgtgctgagcgccaccatcctgtacgagatcctgctgggcaaggccaccctgtacgccgtgctggtgtctgccctggtgctgatggctatggtcaagcggaaggacagccgggga

SEQ ID NO: 17807 - DNA, 1272 bp, synthetic construct
  source 1..1272: mol_type = other DNA
atggccttaccagtgaccgccttgctcctgccgctggccttgctgctccacgccgccaggccgctcgaggaggacctgaagaacgtgttcccacctgaggtggccgtgttcgagcctagcgaggccgagatcagccacacccagaaagccaccctcgtgtgcctggctaccggcttctaccccgaccatgtggaactgtcttggtgggtcaacggcaaagaggtgcacagcggcgtgtctaccgacccccagccactgaaagaacagcccgccctgaacgacagccggtactgcctgagcagcagactgagagtgtccgccaccttctggcagaacccccggaaccacttcagatgccaggtgcagttctacggcctgagcgagaacgacgagtggacccaggacagagccaagcccgtgacccagatcgtgtctgccgaagcctggggcagagccgattgcgacgtgaagctggtggaaaagagcttcgagacagacaccaacctgaacttccagaacctgagcgtgatcggcttcagaatcctgctgctgaaagtggccggctttaacctgctgatgaccctgcggctgtggtccagcagggccaagcgatctggatctggagcaacaaacttctcactactcaaacaagcaggtgacgtggaggagaatcccgggcctactagcgccaccatggccttaccagtgaccgccttgctcctgccgctggccttgctgctccacgccgccaggccggaagttgctgccctcgagaaggaggtagcagctttggaaaaagaagtcgcagcccttgagaaagaagttgcggctctggagaagacgcgtatccagaaccctgatcctgccgtgtaccagctgcgggatagcaagagcagcgacaagagcgtgtgtctgttcaccgacttcgacagccagaccaacgtgtcccagagcaaggactccgacgtgtacatcaccgataagaccgtgctggacatgcggagcatggacttcaagagcaactccgccgtggcctggtccaacaagtccgatttcgcctgcgccaacgccttcaacaacagcattatccccgaggacacattcttcccaagccccgagagcagctgcggctttaccagcgagagctaccagcagggcgtgctgagcgccaccatcctgtacgagatcctgctgggcaaggccaccctgtacgccgtgctggtgtctgccctggtgctgatggctatggtcaagcggaaggacagccgggga

SEQ ID NO: 17808 - DNA, 2046 bp, synthetic construct
  source 1..2046: mol_type = other DNA
atggccttaccagtgaccgccttgctcctgccgctggccttgctgctccacgccgccaggccgctcgaggaggacctgaagaacgtgttcccacctgaggtggccgtgttcgagcctagcgaggccgagatcagccacacccagaaagccaccctcgtgtgcctggctaccggcttctaccccgaccatgtggaactgtcttggtgggtcaacggcaaagaggtgcacagcggcgtgtctaccgacccccagccactgaaagaacagcccgccctgaacgacagccggtactgcctgagcagcagactgagagtgtccgccaccttctggcagaacccccggaaccacttcagatgccaggtgcagttctacggcctgagcgagaacgacgagtggacccaggacagagccaagcccgtgacccagatcgtgtctgccgaagcctggggcagagccgattgcgacgtgaagctggtggaaaagagcttcgagacagacaccaacctgaacttccagaacctgagcgtgatcggcttcagaatcctgctgctgaaagtggccggctttaacctgctgatgaccctgcggctgtggtccagcagggccaagcgatctggatctggagcaacaaacttctcactactcaaacaagcaggtgacgtggaggagaatcccgggcctactagcgccaccatggccttaccagtgaccgccttgctcctgccgctggccttgctgctccacgccgccaggccgctgttcaatcaagaggtgcagatccctctgaccgagagctactgtggcccctgtcctaagaactggatctgctacaagaacaactgctaccagttcttcgacgagagcaagaattggtacgagagccaggccagctgcatgagccagaatgccagcctgctgaaggtgtacagcaaagaggaccaggacctgctgaaactggtcaagagcgcccactggatgggccttgtgcacatccccaccaatggctcttggcagtgggaggacggcagcattctgagccctaacctgctgaccatcatcgagatgcagaagggcgactgcgccctgtacgccagcagctttaagggctacatcgagaattgcagcaccccgaacacctacatctgtatgcagagaaccgtttctggcggaggcggctctggaggaggcggaagtggcggcggaggcgacctctttaatcaagaagtccagattccactcaccgaatcctactgcggaccttgtccaaaaaattggatttgttataagaacaactgttatcaattctttgatgagtctaaaaattggtatgagtcccaggcttcctgcatgtctcagaacgcttctctgctgaaagtctactctaaagaagatcaggatctcctgaagctcgtcaagtctgcccattggatggggctcgtccacattcctaccaacggaagctggcaatgggaagatggctccatcctgtctccaaatctgctcacgattattgaaatgcagaaaggggattgtgctctctacgccagctccttcaagggatatattgagaactgtagcacgcccaatacttatatctgtatgcaacggaccgtgacgcgtatccagaaccctgatcctgccgtgtaccagctgcgggatagcaagagcagcgacaagagcgtgtgtctgttcaccgacttcgacagccagaccaacgtgtcccagagcaaggactccgacgtgtacatcaccgataagaccgtgctggacatgcggagcatggacttcaagagcaactccgccgtggcctggtccaacaagtccgatttcgcctgcgccaacgccttcaacaacagcattatccccgaggacacattcttcccaagccccgagagcagctgcggctttaccagcgagagctaccagcagggcgtgctgagcgccaccatcctgtacgagatcctgctgggcaaggccaccctgtacgccgtgctggtgtctgccctggtgctgatggctatggtcaagcggaaggacagccgggga

SEQ ID NO: 17809 - DNA, 2046 bp, synthetic construct
  source 1..2046: mol_type = other DNA
atggccttaccagtgaccgccttgctcctgccgctggccttgctgctccacgccgccaggccgctcgaggaggacctgaagaacgtgttcccacctgaggtggccgtgttcgagcctagcgaggccgagatcagccacacccagaaagccaccctcgtgtgcctggctaccggcttctaccccgaccatgtggaactgtcttggtgggtcaacggcaaagaggtgcacagcggcgtgtctaccgacccccagccactgaaagaacagcccgccctgaacgacagccggtactgcctgagcagcagactgagagtgtccgccaccttctggcagaacccccggaaccacttcagatgccaggtgcagttctacggcctgagcgagaacgacgagtggacccaggacagagccaagcccgtgacccagatcgtgtctgccgaagcctggggcagagccgattgcgacgtgaagctggtggaaaagagcttcgagacagacaccaacctgaacttccagaacctgagcgtgatcggcttcagaatcctgctgctgaaagtggccggctttaacctgctgatgaccctgcggctgtggtccagcagggccaagcgatctggatctggagcaacaaacttctcactactcaaacaagcaggtgacgtggaggagaatcccgggcctactagcgccaccatggccttaccagtgaccgccttgctcctgccgctggccttgctgctccacgccgccaggccgctgttcaatcaagaggtgcagatccctctgaccgagagctactgtggcccctgtcctaagaactggatctgctacaagaacaactgctaccagttcttcgacgagagcaagaattggtacgagagccaggccagctgcatgagccagaatgccagcctgctgaaggtgtacagcaaagaggaccaggacctgctgaaactggtcaagagcgcccactggatgggccttgtgcacatccccaccaatggctcttggcagtgggaggacggcagcattctgagccctaacctgctgaccatcatcgagatgcagaagggcgactgcgccctgtacgccagcagctttaagggcttcatcgagaattgcagcaccccgaacacctacatctgtatgcagagaaccgttggcggaggcggaagtggaggcggaggatctggcggcggaggctctgacctctttaatcaagaagtccagattccactcaccgaatcctactgcggaccttgtccaaaaaattggatttgttataagaacaactgttatcaattctttgatgagtctaaaaattggtatgagtcccaggcttcctgcatgtctcagaacgcttctctgctgaaagtctactctaaagaagatcaggatctcctgaagctcgtcaagtctgcccattggatggggctcgtccacattcctaccaacggaagctggcaatgggaagatggctccatcctgtctccaaatctgctcacgattattgaaatgcagaaaggggattgtgctctctacgccagctccttcaagggatttattgagaactgtagcacgcccaatacttatatctgtatgcaacggaccgtgacgcgtatccagaaccctgatcctgccgtgtaccagctgcgggatagcaagagcagcgacaagagcgtgtgtctgttcaccgacttcgacagccagaccaacgtgtcccagagcaaggactccgacgtgtacatcaccgataagaccgtgctggacatgcggagcatggacttcaagagcaactccgccgtggcctggtccaacaagtccgatttcgcctgcgccaacgccttcaacaacagcattatccccgaggacacattcttcccaagccccgagagcagctgcggctttaccagcgagagctaccagcagggcgtgctgagcgccaccatcctgtacgagatcctgctgggcaaggccaccctgtacgccgtgctggtgtctgccctggtgctgatggctatggtcaagcggaaggacagccgggga

SEQ ID NO: 17810 - DNA, 2124 bp, synthetic construct
  source 1..2124: mol_type = other DNA
atggccttaccagtgaccgccttgctcctgccgctggccttgctgctccacgccgccaggccgctcgaggaggacctgaagaacgtgttcccacctgaggtggccgtgttcgagcctagcgaggccgagatcagccacacccagaaagccaccctcgtgtgcctggctaccggcttctaccccgaccatgtggaactgtcttggtgggtcaacggcaaagaggtgcacagcggcgtgtctaccgacccccagccactgaaagaacagcccgccctgaacgacagccggtactgcctgagcagcagactgagagtgtccgccaccttctggcagaacccccggaaccacttcagatgccaggtgcagttctacggcctgagcgagaacgacgagtggacccaggacagagccaagcccgtgacccagatcgtgtctgccgaagcctggggcagagccgattgcgacgtgaagctggtggaaaagagcttcgagacagacaccaacctgaacttccagaacctgagcgtgatcggcttcagaatcctgctgctgaaagtggccggctttaacctgctgatgaccctgcggctgtggtccagcagggccaagcgatctggatctggagcaacaaacttctcactactcaaacaagcaggtgacgtggaggagaatcccgggcctactagcatggccttaccagtgaccgccttgctcctgccgctggccttgctgctccacgccgccaggccgatggaccccgacctggaaatcagagccgccttcctgcggcagagaaacacagccctgagaacagaggtggccgagctggaacaagaggtgcagcggctggaaaacgaggtgtcccagtacgagacaagatacggccctctcggaggcggaaaaggtaccggcggaggcggatctggcggcggaggtagcggtggcggaggatctgaattcgacatccagatgacacagagccctagcagcctgtctgccagcgtgggagacagagtgaccatcacatgcaaggccagcgaccacatcaacaactggctggcctggtatcagcagaagcctggacaggcccctaagctgctgatctacggcgctaccacactggaaacaggcgtgcccagcagattttctggcagcggctctggcaccgactacaccctgacaatatccagcctccagcctgaggacttcgccacctactactgtcagcagagctggaacaccccttggacattcggccagggcaccaagctggaaatcaagagaggcggaggcggaagtggaggcggaggatctggcggcggaggctctcaagttcagcttcaacagcctggcgctgagctggtcaaacctggcgcttctgtgaagatgagctgcaaagccagcggctacgccttcagcagctactggatcaactggatgaagcagaaacccggccagggactcgaatggatcggccaaatctatcccggcgacggcgacaccaactacaacggcaagttcaagggcagagccacactgaccgccgatacctctagcagcacagcctacatgcagctgagcagcctgaccagcgaagatagcgccgtgtacttctgtgcccggtccatcacaacagtcgtgggctgcgctatggactattggggccagggaacaagcgtgaccgtgtctagtacgcgtatccagaaccctgatcctgccgtgtaccagctgcgggatagcaagagcagcgacaagagcgtgtgtctgttcaccgacttcgacagccagaccaacgtgtcccagagcaaggactccgacgtgtacatcaccgataagaccgtgctggacatgcggagcatggacttcaagagcaactccgccgtggcctggtccaacaagtccgatttcgcctgcgccaacgccttcaacaacagcattatccccgaggacacattcttcccaagccccgagagcagctgcggctttaccagcgagagctaccagcagggcgtgctgagcgccaccatcctgtacgagatcctgctgggcaaggccaccctgtacgccgtgctggtgtctgccctggtgctgatggctatggtcaagcggaaggacagccgggga

SEQ ID NO: 17811 - DNA, 2829 bp, synthetic construct
  source 1..2829: mol_type = other DNA
atggccttaccagtgaccgccttgctcctgccgctggccttgctgctccacgccgccaggccgctcgaggaggacctgaagaacgtgttcccacctgaggtggccgtgttcgagcctagcgaggccgagatcagccacacccagaaagccaccctcgtgtgcctggctaccggcttctaccccgaccatgtggaactgtcttggtgggtcaacggcaaagaggtgcacagcggcgtgtctaccgacccccagccactgaaagaacagcccgccctgaacgacagccggtactgcctgagcagcagactgagagtgtccgccaccttctggcagaacccccggaaccacttcagatgccaggtgcagttctacggcctgagcgagaacgacgagtggacccaggacagagccaagcccgtgacccagatcgtgtctgccgaagcctggggcagagccgattgcgacgtgaagctggtggaaaagagcttcgagacagacaccaacctgaacttccagaacctgagcgtgatcggcttcagaatcctgctgctgaaagtggccggctttaacctgctgatgaccctgcggctgtggtccagcagggccaagcgatctggatctggagcaacaaacttctcactactcaaacaagcaggtgacgtggaggagaatcccgggcctactagcatggccttaccagtgaccgccttgctcctgccgctggccttgctgctccacgccgccaggccgctgttcaatcaagaggtgcagatccctctgaccgagagctactgtggcccctgtcctaagaactggatctgctacaagaacaactgctaccagttcttcgacgagagcaagaattggtacgagagccaggccagctgcatgagccagaatgccagcctgctgaaggtgtacagcaaagaggaccaggacctgctgaaactggtcaagagcgcccactggatgggccttgtgcacatccccaccaatggctcttggcagtgggaggacggcagcattctgagccctaacctgctgaccatcatcgagatgcagaagggcgactgcgccctgtacgccagcagctttaagggcttcatcgagaattgcagcaccccgaacacctacatctgtatgcagagaaccgttggcggaggcggaagtggaggcggaggatctggcggcggaggctctgacctctttaatcaagaagtccagattccactcaccgaatcctactgcggaccttgtccaaaaaattggatttgttataagaacaactgttatcaattctttgatgagtctaaaaattggtatgagtcccaggcttcctgcatgtctcagaacgcttctctgctgaaagtctactctaaagaagatcaggatctcctgaagctcgtcaagtctgcccattggatggggctcgtccacattcctaccaacggaagctggcaatgggaagatggctccatcctgtctccaaatctgctcacgattattgaaatgcagaaaggggattgtgctctctacgccagctccttcaagggatttattgagaactgtagcacgcccaatacttatatctgtatgcaacggaccgtgggtaccggcggaggcggatctggcggcggaggtagcggtggcggaggatctgaattcgacatccagatgacacagagccctagcagcctgtctgccagcgtgggagacagagtgaccatcacatgcaaggccagcgaccacatcaacaactggctggcctggtatcagcagaagcctggacaggcccctaagctgctgatctacggcgctaccacactggaaacaggcgtgcccagcagattttctggcagcggctctggcaccgactacaccctgacaatatccagcctccagcctgaggacttcgccacctactactgtcagcagagctggaacaccccttggacattcggccagggcaccaagctggaaatcaagagaggcggaggcggaagtggaggcggaggatctggcggcggaggctctcaagttcagcttcaacagcctggcgctgagctggtcaaacctggcgcttctgtgaagatgagctgcaaagccagcggctacgccttcagcagctactggatcaactggatgaagcagaaacccggccagggactcgaatggatcggccaaatctatcccggcgacggcgacaccaactacaacggcaagttcaagggcagagccacactgaccgccgatacctctagcagcacagcctacatgcagctgagcagcctgaccagcgaagatagcgccgtgtacttctgtgcccggtccatcacaacagtcgtgggctgcgctatggactattggggccagggaacaagcgtgaccgtgtctagtacgcgtatccagaaccctgatcctgccgtgtaccagctgcgggatagcaagagcagcgacaagagcgtgtgtctgttcaccgacttcgacagccagaccaacgtgtcccagagcaaggactccgacgtgtacatcaccgataagaccgtgctggacatgcggagcatggacttcaagagcaactccgccgtggcctggtccaacaagtccgatttcgcctgcgccaacgccttcaacaacagcattatccccgaggacacattcttcccaagccccgagagcagctgcggctttaccagcgagagctaccagcagggcgtgctgagcgccaccatcctgtacgagatcctgctgggcaaggccaccctgtacgccgtgctggtgtctgccctggtgctgatggctatggtcaagcggaaggacagccgggga

SEQ ID NO: 17812 - DNA, 1944 bp, synthetic construct
  source 1..1944: mol_type = other DNA
atggccttaccagtgaccgccttgctcctgccgctggccttgctgctccacgccgccaggccgctcgaggaggacctgaagaacgtgttcccacctgaggtggccgtgttcgagcctagcgaggccgagatcagccacacccagaaagccaccctcgtgtgcctggctaccggcttctaccccgaccatgtggaactgtcttggtgggtcaacggcaaagaggtgcacagcggcgtgtctaccgacccccagccactgaaagaacagcccgccctgaacgacagccggtactgcctgagcagcagactgagagtgtccgccaccttctggcagaacccccggaaccacttcagatgccaggtgcagttctacggcctgagcgagaacgacgagtggacccaggacagagccaagcccgtgacccagatcgtgtctgccgaagcctggggcagagccgattgcgacgtgaagctggtggaaaagagcttcgagacagacaccaacctgaacttccagaacctgagcgtgatcggcttcagaatcctgctgctgaaagtggccggctttaacctgctgatgaccctgcggctgtggtccagcagggccaagcgatctggatctggagcaacaaacttctcactactcaaacaagcaggtgacgtggaggagaatcccgggcctactagcatggccttaccagtgaccgccttgctcctgccgctggccttgctgctccacgccgccaggccgcagtctgtgctgacacagcctcctagtgtgtctggcgctcctggacagagagtgaccatctcttgtaccggcagcagcagcaatatcggagccggctatgacgtgcactggtatcagcagctccctggcacagcccctaaactgctgatcttcggcaacagcaacagacccagcggcgtgcccgatagattcagcggctttaagagcggcacaagcgccagcctggctatcactggactgcaagccgaggacgaggccgactacttctgccagagctacgatagcagcctgagcggcagcggagtgtttggcacaggcaccaaagtgacagtgcttggcggcggaggcggaagtggaggcggaggatctggcggcggaggctctcaaatgcaactggttcaaagcggcggtggcctggtgcaacctggaagaagtctgagactgagctgtgccgccagcggcttcaccttcgatgattacgccatgcactgggtccgacaggcccctggaaaaggactggaatgggtgtccggcatctcctggaatagcggctctatcggctacgccgacagcgtgaagggcagattcaccatcagccgggacaacgccaagaacagcctgtacctccagatgaactccctgagagccgaggatacagccctgtactactgcgccaaggacatccacagcggcagctactacggcctgctgtactacgctatggacgtgtggggccagggcacaaccgtgacagtttcttctacgcgtatccagaaccctgatcctgccgtgtaccagctgcgggatagcaagagcagcgacaagagcgtgtgtctgttcaccgacttcgacagccagaccaacgtgtcccagagcaaggactccgacgtgtacatcaccgataagaccgtgctggacatgcggagcatggacttcaagagcaactccgccgtggcctggtccaacaagtccgatttcgcctgcgccaacgccttcaacaacagcattatccccgaggacacattcttcccaagccccgagagcagctgcggctttaccagcgagagctaccagcagggcgtgctgagcgccaccatcctgtacgagatcctgctgggcaaggccaccctgtacgccgtgctggtgtctgccctggtgctgatggctatggtcaagcggaaggacagccgggga

SEQ ID NO: 17813 - DNA, 1455 bp, synthetic construct
  source 1..1455: mol_type = other DNA
atggccttaccagtgaccgccttgctcctgccgctggccttgctgctccacgccgccaggccgctcgaggaggacctgaagaacgtgttcccacctgaggtggccgtgttcgagcctagcgaggccgagatcagccacacccagaaagccaccctcgtgtgcctggctaccggcttctaccccgaccatgtggaactgtcttggtgggtcaacggcaaagaggtgcacagcggcgtgtctaccgacccccagccactgaaagaacagcccgccctgaacgacagccggtactgcctgagcagcagactgagagtgtccgccaccttctggcagaacccccggaaccacttcagatgccaggtgcagttctacggcctgagcgagaacgacgagtggacccaggacagagccaagcccgtgacccagatcgtgtctgccgaagcctggggcagagccgattgcgacgtgaagctggtggaaaagagcttcgagacagacaccaacctgaacttccagaacctgagcgtgatcggcttcagaatcctgctgctgaaagtggccggctttaacctgctgatgaccctgcggctgtggtccagcagggccaagcgatctggatctggagcaacaaacttctcactactcaaacaagcaggtgacgtggaggagaatcccgggcctactagcatggccttaccagtgaccgccttgctcctgccgctggccttgctgctccacgccgccaggccgatgtgtatgccctgcttcaccaccgaccatcagatggcccggaagtgcgacgattgctgtggcggaaaaggcagaggcaagtgctacggccctcagtgcttgtgtagactcgagggcggaggcggaagtggaggcggaggatctggcggcggaggctctttcgaagtgtgtatgccttgttttaccacggatcaacaaatggctcgcaagtgttctgactgctgcggaggcaaaggccggggaaagtgttatggcccacagtgtctgtgccggacgcgtatccagaaccctgatcctgccgtgtaccagctgcgggatagcaagagcagcgacaagagcgtgtgtctgttcaccgacttcgacagccagaccaacgtgtcccagagcaaggactccgacgtgtacatcaccgataagaccgtgctggacatgcggagcatggacttcaagagcaactccgccgtggcctggtccaacaagtccgatttcgcctgcgccaacgccttcaacaacagcattatccccgaggacacattcttcccaagccccgagagcagctgcggctttaccagcgagagctaccagcagggcgtgctgagcgccaccatcctgtacgagatcctgctgggcaaggccaccctgtacgccgtgctggtgtctgccctggtgctgatggctatggtcaagcggaaggacagccgggga

SEQ ID NO: 17814 - DNA, 2244 bp, synthetic construct
  source 1..2244: mol_type = other DNA
atggccttaccagtgaccgccttgctcctgccgctggccttgctgctccacgccgccaggccgctcgaggaggacctgaagaacgtgttcccacctgaggtggccgtgttcgagcctagcgaggccgagatcagccacacccagaaagccaccctcgtgtgcctggctaccggcttctaccccgaccatgtggaactgtcttggtgggtcaacggcaaagaggtgcacagcggcgtgtctaccgacccccagccactgaaagaacagcccgccctgaacgacagccggtactgcctgagcagcagactgagagtgtccgccaccttctggcagaacccccggaaccacttcagatgccaggtgcagttctacggcctgagcgagaacgacgagtggacccaggacagagccaagcccgtgacccagatcgtgtctgccgaagcctggggcagagccgattgcgacgtgaagctggtggaaaagagcttcgagacagacaccaacctgaacttccagaacctgagcgtgatcggcttcagaatcctgctgctgaaagtggccggctttaacctgctgatgaccctgcggctgtggtccagcagggccaagcgatctggatctggagcaacaaacttctcactactcaaacaagcaggtgacgtggaggagaatcccgggcctactagcatggccttaccagtgaccgccttgctcctgccgctggccttgctgctccacgccgccaggccgatgtgtatgccctgcttcaccaccgaccatcagatggcccggaagtgcgacgattgctgtggcggaaaaggcagaggcaagtgctacggccctcagtgcttgtgtagactcgagggcggaggcggaagtggaggcggaggatctggcggcggaggctctttcgaagtgtgtatgccttgttttaccacggatcaacaaatggctcgcaagtgttctgactgctgcggaggcaaaggccggggaaagtgttatggcccacagtgtctgtgccggggtaccggcggaggcggatctggcggcggaggtagcggtggcggaggatctgaattcgacatccagatgacacagagccctagcagcctgtctgccagcgtgggagacagagtgaccatcacatgcaaggccagcgaccacatcaacaactggctggcctggtatcagcagaagcctggacaggcccctaagctgctgatctacggcgctaccacactggaaacaggcgtgcccagcagattttctggcagcggctctggcaccgactacaccctgacaatatccagcctccagcctgaggacttcgccacctactactgtcagcagagctggaacaccccttggacattcggccagggcaccaagctggaaatcaagagaggcggaggcggaagtggaggcggaggatctggcggcggaggctctcaagttcagcttcaacagcctggcgctgagctggtcaaacctggcgcttctgtgaagatgagctgcaaagccagcggctacgccttcagcagctactggatcaactggatgaagcagaaacccggccagggactcgaatggatcggccaaatctatcccggcgacggcgacaccaactacaacggcaagttcaagggcagagccacactgaccgccgatacctctagcagcacagcctacatgcagctgagcagcctgaccagcgaagatagcgccgtgtacttctgtgcccggtccatcacaacagtcgtgggctgcgctatggactattggggccagggaacaagcgtgaccgtgtctagtacgcgtatccagaaccctgatcctgccgtgtaccagctgcgggatagcaagagcagcgacaagagcgtgtgtctgttcaccgacttcgacagccagaccaacgtgtcccagagcaaggactccgacgtgtacatcaccgataagaccgtgctggacatgcggagcatggacttcaagagcaactccgccgtggcctggtccaacaagtccgatttcgcctgcgccaacgccttcaacaacagcattatccccgaggacacattcttcccaagccccgagagcagctgcggctttaccagcgagagctaccagcagggcgtgctgagcgccaccatcctgtacgagatcctgctgggcaaggccaccctgtacgccgtgctggtgtctgccctggtgctgatggctatggtcaagcggaaggacagccgggga

SEQ ID NO: 17815 - DNA, 2469 bp, synthetic construct
  source 1..2469: mol_type = other DNA
atggccttaccagtgaccgccttgctcctgccgctggccttgctgctccacgccgccaggccgctcgaggaggacctgaagaacgtgttcccacctgaggtggccgtgttcgagcctagcgaggccgagatcagccacacccagaaagccaccctcgtgtgcctggctaccggcttctaccccgaccatgtggaactgtcttggtgggtcaacggcaaagaggtgcacagcggcgtgtctaccgacccccagccactgaaagaacagcccgccctgaacgacagccggtactgcctgagcagcagactgagagtgtccgccaccttctggcagaacccccggaaccacttcagatgccaggtgcagttctacggcctgagcgagaacgacgagtggacccaggacagagccaagcccgtgacccagatcgtgtctgccgaagcctggggcagagccgattgcgacgtgaagctggtggaaaagagcttcgagacagacaccaacctgaacttccagaacctgagcgtgatcggcttcagaatcctgctgctgaaagtggccggctttaacctgctgatgaccctgcggctgtggtccagcagggccaagcgatctggatctggagcaacaaacttctcactactcaaacaagcaggtgacgtggaggagaatcccgggcctactagcatggccttaccagtgaccgccttgctcctgccgctggccttgctgctccacgccgccaggccgagccccgtagctcctgcctgtgaccccagactcctaaataaactgctgcgtgactcccacctccttcacagccgactgagtcagtgtcccgacgtggaccctttgtctatccctgttctgctgcctgctgtggactttagcctgggagaatggaaaacccagacggaacagagcaaggcacaggacattctaggggcagtgtcccttctactggagggagtgatggcagcacgaggacagttggaaccctcctgcctctcatccctcctgggacagctttctgggcaggttcgcctcctcttgggggccctgcagggcctcctaggaacccagcttcctctacagggcaggaccacagctcacaaggaccccaatgccctcttcttgagcttgcaacaactgcttcggggaaaggtgcgcttcctgcttctggtagaaggtcccaccctctgtgtcagacggaccctgccaaccacagctgtcccaagcagtacttctggtaccggcggaggcggatctggcggcggaggtagcggtggcggaggatctgaattcgacatccagatgacacagagccctagcagcctgtctgccagcgtgggagacagagtgaccatcacatgcaaggccagcgaccacatcaacaactggctggcctggtatcagcagaagcctggacaggcccctaagctgctgatctacggcgctaccacactggaaacaggcgtgcccagcagattttctggcagcggctctggcaccgactacaccctgacaatatccagcctccagcctgaggacttcgccacctactactgtcagcagagctggaacaccccttggacattcggccagggcaccaagctggaaatcaagagaggcggaggcggaagtggaggcggaggatctggcggcggaggctctcaagttcagcttcaacagcctggcgctgagctggtcaaacctggcgcttctgtgaagatgagctgcaaagccagcggctacgccttcagcagctactggatcaactggatgaagcagaaacccggccagggactcgaatggatcggccaaatctatcccggcgacggcgacaccaactacaacggcaagttcaagggcagagccacactgaccgccgatacctctagcagcacagcctacatgcagctgagcagcctgaccagcgaagatagcgccgtgtacttctgtgcccggtccatcacaacagtcgtgggctgcgctatggactattggggccagggaacaagcgtgaccgtgtctagtacgcgtatccagaaccctgatcctgccgtgtaccagctgcgggatagcaagagcagcgacaagagcgtgtgtctgttcaccgacttcgacagccagaccaacgtgtcccagagcaaggactccgacgtgtacatcaccgataagaccgtgctggacatgcggagcatggacttcaagagcaactccgccgtggcctggtccaacaagtccgatttcgcctgcgccaacgccttcaacaacagcattatccccgaggacacattcttcccaagccccgagagcagctgcggctttaccagcgagagctaccagcagggcgtgctgagcgccaccatcctgtacgagatcctgctgggcaaggccaccctgtacgccgtgctggtgtctgccctggtgctgatggctatggtcaagcggaaggacagccgggga

SEQ ID NO: 17816 - DNA, 2190 bp, synthetic construct
  source 1..2190: mol_type = other DNA
atggccttaccagtgaccgccttgctcctgccgctggccttgctgctccacgccgccaggccgctcgaggaggacctgaagaacgtgttcccacctgaggtggccgtgttcgagcctagcgaggccgagatcagccacacccagaaagccaccctcgtgtgcctggctaccggcttctaccccgaccatgtggaactgtcttggtgggtcaacggcaaagaggtgcacagcggcgtgtctaccgacccccagccactgaaagaacagcccgccctgaacgacagccggtactgcctgagcagcagactgagagtgtccgccaccttctggcagaacccccggaaccacttcagatgccaggtgcagttctacggcctgagcgagaacgacgagtggacccaggacagagccaagcccgtgacccagatcgtgtctgccgaagcctggggcagagccgattgcgacgtgaagctggtggaaaagagcttcgagacagacaccaacctgaacttccagaacctgagcgtgatcggcttcagaatcctgctgctgaaagtggccggctttaacctgctgatgaccctgcggctgtggtccagcagggccaagcgatctggatctggagcaacaaacttctcactactcaaacaagcaggtgacgtggaggagaatcccgggcctactagcatggccttaccagtgaccgccttgctcctgccgctggccttgctgctccacgccgccaggccgatgggcagctgggaagagttcgagctgagactgaacgccatcgaggaacggctgtatgccctcggaggatctgaagccgagctggcctacttcgagtacgtgatcgccgacttcgagggcaacctgcagcggtacaaaggcaagggcaaccctgaagtggaagccctgtacttcgaggccgacgccatcttcgaggaactggtggcctacagacacaacggtaccggcggaggcggatctggcggcggaggtagcggtggcggaggatctgaattcgacatccagatgacacagagccctagcagcctgtctgccagcgtgggagacagagtgaccatcacatgcaaggccagcgaccacatcaacaactggctggcctggtatcagcagaagcctggacaggcccctaagctgctgatctacggcgctaccacactggaaacaggcgtgcccagcagattttctggcagcggctctggcaccgactacaccctgacaatatccagcctccagcctgaggacttcgccacctactactgtcagcagagctggaacaccccttggacattcggccagggcaccaagctggaaatcaagagaggcggaggcggaagtggaggcggaggatctggcggcggaggctctcaagttcagcttcaacagcctggcgctgagctggtcaaacctggcgcttctgtgaagatgagctgcaaagccagcggctacgccttcagcagctactggatcaactggatgaagcagaaacccggccagggactcgaatggatcggccaaatctatcccggcgacggcgacaccaactacaacggcaagttcaagggcagagccacactgaccgccgatacctctagcagcacagcctacatgcagctgagcagcctgaccagcgaagatagcgccgtgtacttctgtgcccggtccatcacaacagtcgtgggctgcgctatggactattggggccagggaacaagcgtgaccgtgtctagtacgcgtatccagaaccctgatcctgccgtgtaccagctgcgggatagcaagagcagcgacaagagcgtgtgtctgttcaccgacttcgacagccagaccaacgtgtcccagagcaaggactccgacgtgtacatcaccgataagaccgtgctggacatgcggagcatggacttcaagagcaactccgccgtggcctggtccaacaagtccgatttcgcctgcgccaacgccttcaacaacagcattatccccgaggacacattcttcccaagccccgagagcagctgcggctttaccagcgagagctaccagcagggcgtgctgagcgccaccatcctgtacgagatcctgctgggcaaggccaccctgtacgccgtgctggtgtctgccctggtgctgatggctatggtcaagcggaaggacagccgggga

SEQ ID NO: 17817 - DNA, 2610 bp, synthetic construct
  source 1..2610: mol_type = other DNA
atggccttaccagtgaccgccttgctcctgccgctggccttgctgctccacgccgccaggccgctcgagatccagaaccctgatcctgccgtgtaccagctgcgggatagcaagagcagcgacaagagcgtgtgtctgttcaccgacttcgacagccagaccaacgtgtcccagagcaaggactccgacgtgtacatcaccgataagaccgtgctggacatgcggagcatggacttcaagagcaactccgccgtggcctggtccaacaagtccgatttcgcctgcgccaacgccttcaacaacagcattatccccgaggacacattcttcccaagccccgagagcagctgcggctttaccagcgagagctaccagcagggcgtgctgagcgccaccatcctgtacgagatcctgctgggcaaggccaccctgtacgccgtgctggtgtctgccctggtgctgatggctatggtcaagcggaaggacagccggggaagggccaagcgatctggatctggagcaacaaacttctcactactcaaacaagcaggtgacgtggaggagaatcccgggcctactagcatggccttaccagtgaccgccttgctcctgccgctggccttgctgctccacgccgccaggccggacatccagatgacacagactacatcctccctgtctgcctctctgggagacagagtcaccatcagttgcagggcaagtcaggacattagtaaatatttaaattggtatcagcagaaaccagatggaactgttaaactcctgatctaccatacatcaagattacactcaggagtcccatcaaggttcagtggcagtgggtctggaacagattattctctcaccattagcaacctggagcaagaagatattgccacttacttttgccaacagggtaatacgcttccgtacacgttcggaggggggaccaagctggagatcacaggtggcggtggctcgggcggtggtgggtcgggtggcggcggatctgaggtgaaactgcaggagtcaggacctggcctggtggcgccctcacagagcctgtccgtcacatgcactgtctcaggggtctcattacccgactatggtgtaagctggattcgccagcctccacgaaagggtctggagtggctgggagtaatatggggtagtgaaaccacatactataattcagctctcaaatccagactgaccatcatcaaggacaactccaagagccaagttttcttaaaaatgaacagtctgcaaactgatgacacagccatttactactgtgccaaacattattactacggtggtagctatgctatggactactggggtcaaggaacctcagtcaccgtctcctcaacgcgtgaggacctgaagaacgtgttcccacctgaggtggccgtgttcgagcctagcgaggccgagatcagccacacccagaaagccaccctcgtgtgcctggctaccggcttctaccccgaccatgtggaactgtcttggtgggtcaacggcaaagaggtgcacagcggcgtgtctaccgacccccagccactgaaagaacagcccgccctgaacgacagccggtactgcctgagcagcagactgagagtgtccgccaccttctggcagaacccccggaaccacttcagatgccaggtgcagttctacggcctgagcgagaacgacgagtggacccaggacagagccaagcccgtgacccagatcgtgtctgccgaagcctggggcagagccgattgcgacgtgaagctggtggaaaagagcttcgagacagacaccaacctgaacttccagaacctgagcgtgatcggcttcagaatcctgctgctgaaagtggccggctttaacctgctgatgaccctgcggctgtggtccagccgcgccaagagaagcggatctggcgtgaagcagaccctgaatttcgacctgctgaagctggctggcgacgtggaatccaacccaggcccttctagaggccatatgaccgagtacaagcccacggtgcgcctcgccacccgcgacgacgtccccagggccgtacgcaccctcgccgccgcgttcgccgactaccccgccacgcgccacaccgtcgatccggaccgccacatcgagcgggtcaccgagctgcaagaactcttcctcacgcgcgtcgggctcgacatcggcaaggtgtgggtcgcggacgacggcgccgcggtggcggtctggaccacgccggagagcgtcgaagcgggggcggtgttcgccgagatcggcccgcgcatggccgagttgagcggttcccggctggccgcgcagcaacagatggaaggcctcctggcgccgcaccggcccaaggagcccgcgtggttcctggccaccgtcggcgtctcgcccgaccaccagggcaagggtctgggcagcgccgtcgtgctccccggagtggaggcggccgagcgcgccggggtgcccgccttcctggagacctccgcgccccgcaacctccccttctacgagcggctcggcttcaccgtcaccgccgacgtcgaggtgcccgaaggaccgcgcacctggtgcatgacccgcaagcccggtgcctga

SEQ ID NO: 17818 - DNA, 2613 bp, synthetic construct
  source 1..2613: mol_type = other DNA
atggccttaccagtgaccgccttgctcctgccgctggccttgctgctccacgccgccaggccgctcgagatccagaaccctgatcctgccgtgtaccagctgcgggatagcaagagcagcgacaagagcgtgtgtctgttcaccgacttcgacagccagaccaacgtgtcccagagcaaggactccgacgtgtacatcaccgataagaccgtgctggacatgcggagcatggacttcaagagcaactccgccgtggcctggtccaacaagtccgatttcgcctgcgccaacgccttcaacaacagcattatccccgaggacacattcttcccaagccccgagagcagctgcggctttaccagcgagagctaccagcagggcgtgctgagcgccaccatcctgtacgagatcctgctgggcaaggccaccctgtacgccgtgctggtgtctgccctggtgctgatggctatggtcaagcggaaggacagccggggaagggccaagcgatctggatctggagcaacaaacttctcactactcaaacaagcaggtgacgtggaggagaatcccgggcctactagcaccatggccttaccagtgaccgccttgctcctgccgctggccttgctgctccacgccgccaggccggagatcgtgatgacccagagccctgccaccctgtctctgagccctggcgaaagagccaccctgagctgtagagccagccaggacatcagcaagtacctgaactggtatcagcagaagcccggccaggcccccagactgctgatctaccacaccagcagactgcacagcggcatccccgccagattttctggctctggcagcggcaccgactacaccctgacaatcagcagcctccagcccgaggacttcgccgtgtacttctgtcagcaaggcaacaccctgccctacaccttcggccagggcaccaagctggaaatcaagggcggaggcggaagtggaggcggaggatctggcggcggaggctctcaggtgcaactccaggaatctggccctggcctcgtgaagcccagcgagacactgagcctgacctgtaccgtgtccggcgtgtccctgcctgactatggcgtgtcctggatcagacagccccctggcaagggcctggaatggatcggagtgatttggggcagcgaaaccacctactacaacagctccctgaagtccagagtgaccatctccaaggacaactccaagaaccaggtgtccctgaagctgagcagcgtgacagccgccgacaccgccgtgtattactgcgccaagcactactactacggcggcagctacgctatggactactggggccagggaaccctcgtgaccgtgtctagtacgcgtgaggacctgaagaacgtgttcccacctgaggtggccgtgttcgagcctagcgaggccgagatcagccacacccagaaagccaccctcgtgtgcctggctaccggcttctaccccgaccatgtggaactgtcttggtgggtcaacggcaaagaggtgcacagcggcgtgtctaccgacccccagccactgaaagaacagcccgccctgaacgacagccggtactgcctgagcagcagactgagagtgtccgccaccttctggcagaacccccggaaccacttcagatgccaggtgcagttctacggcctgagcgagaacgacgagtggacccaggacagagccaagcccgtgacccagatcgtgtctgccgaagcctggggcagagccgattgcgacgtgaagctggtggaaaagagcttcgagacagacaccaacctgaacttccagaacctgagcgtgatcggcttcagaatcctgctgctgaaagtggccggctttaacctgctgatgaccctgcggctgtggtccagccgcgccaagagaagcggatctggcgtgaagcagaccctgaatttcgacctgctgaagctggctggcgacgtggaatccaacccaggcccttctagaggccatatgaccgagtacaagcccacggtgcgcctcgccacccgcgacgacgtccccagggccgtacgcaccctcgccgccgcgttcgccgactaccccgccacgcgccacaccgtcgatccggaccgccacatcgagcgggtcaccgagctgcaagaactcttcctcacgcgcgtcgggctcgacatcggcaaggtgtgggtcgcggacgacggcgccgcggtggcggtctggaccacgccggagagcgtcgaagcgggggcggtgttcgccgagatcggcccgcgcatggccgagttgagcggttcccggctggccgcgcagcaacagatggaaggcctcctggcgccgcaccggcccaaggagcccgcgtggttcctggccaccgtcggcgtctcgcccgaccaccagggcaagggtctgggcagcgccgtcgtgctccccggagtggaggcggccgagcgcgccggggtgcccgccttcctggagacctccgcgccccgcaacctccccttctacgagcggctcggcttcaccgtcaccgccgacgtcgaggtgcccgaaggaccgcgcacctggtgcatgacccgcaagcccggtgcctga

SEQ ID NO: 17819 - DNA, 2616 bp, synthetic construct
  source 1..2616: mol_type = other DNA
atggccttaccagtgaccgccttgctcctgccgctggccttgctgctccacgccgccaggccgctcgagatccagaaccctgatcctgccgtgtaccagctgcgggatagcaagagcagcgacaagagcgtgtgtctgttcaccgacttcgacagccagaccaacgtgtcccagagcaaggactccgacgtgtacatcaccgataagaccgtgctggacatgcggagcatggacttcaagagcaactccgccgtggcctggtccaacaagtccgatttcgcctgcgccaacgccttcaacaacagcattatccccgaggacacattcttcccaagccccgagagcagctgcggctttaccagcgagagctaccagcagggcgtgctgagcgccaccatcctgtacgagatcctgctgggcaaggccaccctgtacgccgtgctggtgtctgccctggtgctgatggctatggtcaagcggaaggacagccggggaagggccaagcgatctggatctggagcaacaaacttctcactactcaaacaagcaggtgacgtggaggagaatcccgggcctactagcaccatggccttaccagtgaccgccttgctcctgccgctggccttgctgctccacgccgccaggccggacgagatcgtgctgacacagagccccgccaccctgtcactgtctccaggcgaaagagccaccctgagctgtagcgccagcagcagcgtgtcctacatgcactggtatcagcagaagcccggccaggcccccagactgctgatctacgataccagcaagctggcctccggcatccccgccagattttctggcagcggctccggcaccgacttcaccctgacaatcagcagcctggaacccgaggacgtggccgtgtactactgttttcaaggcagcgtgtaccccttcaccttcggccagggcaccaagctggaaatcaagagaggtggcggtggctcgggcggtggtgggtcgggtggcggcggatctcaggtgcagctccaggaatctggccctggcctcgtgaagcctagccagaccctgagcctgacctgtaccgtgtctggcggcagcatcagcacaagcggcatgggcgtgggctggatcagacagcaccctggcaagggcctggaatggatcggccacatttggtgggacgacgacaagcggtacaaccccgccctgaagtccagagtgaccatcagcgtggacaccagcaagaaccagttcagcctgaagctgagcagcgtgacagccgccgataccgccgtgtattattgcgcccggatggaactgtggtcctactacttcgactactggggccagggaaccctcgtgaccgtgtctagtacgcgtgaggacctgaagaacgtgttcccacctgaggtggccgtgttcgagcctagcgaggccgagatcagccacacccagaaagccaccctcgtgtgcctggctaccggcttctaccccgaccatgtggaactgtcttggtgggtcaacggcaaagaggtgcacagcggcgtgtctaccgacccccagccactgaaagaacagcccgccctgaacgacagccggtactgcctgagcagcagactgagagtgtccgccaccttctggcagaacccccggaaccacttcagatgccaggtgcagttctacggcctgagcgagaacgacgagtggacccaggacagagccaagcccgtgacccagatcgtgtctgccgaagcctggggcagagccgattgcgacgtgaagctggtggaaaagagcttcgagacagacaccaacctgaacttccagaacctgagcgtgatcggcttcagaatcctgctgctgaaagtggccggctttaacctgctgatgaccctgcggctgtggtccagccgcgccaagagaagcggatctggcgtgaagcagaccctgaatttcgacctgctgaagctggctggcgacgtggaatccaacccaggcccttctagaggccatatgaccgagtacaagcccacggtgcgcctcgccacccgcgacgacgtccccagggccgtacgcaccctcgccgccgcgttcgccgactaccccgccacgcgccacaccgtcgatccggaccgccacatcgagcgggtcaccgagctgcaagaactcttcctcacgcgcgtcgggctcgacatcggcaaggtgtgggtcgcggacgacggcgccgcggtggcggtctggaccacgccggagagcgtcgaagcgggggcggtgttcgccgagatcggcccgcgcatggccgagttgagcggttcccggctggccgcgcagcaacagatggaaggcctcctggcgccgcaccggcccaaggagcccgcgtggttcctggccaccgtcggcgtctcgcccgaccaccagggcaagggtctgggcagcgccgtcgtgctccccggagtggaggcggccgagcgcgccggggtgcccgccttcctggagacctccgcgccccgcaacctccccttctacgagcggctcggcttcaccgtcaccgccgacgtcgaggtgcccgaaggaccgcgcacctggtgcatgacccgcaagcccggtgcctga

SEQ ID NO: 17820 - DNA, 2604 bp, synthetic construct
  source 1..2604: mol_type = other DNA
atggccttaccagtgaccgccttgctcctgccgctggccttgctgctccacgccgccaggccgctcgagatccagaaccctgatcctgccgtgtaccagctgcgggatagcaagagcagcgacaagagcgtgtgtctgttcaccgacttcgacagccagaccaacgtgtcccagagcaaggactccgacgtgtacatcaccgataagaccgtgctggacatgcggagcatggacttcaagagcaactccgccgtggcctggtccaacaagtccgatttcgcctgcgccaacgccttcaacaacagcattatccccgaggacacattcttcccaagccccgagagcagctgcggctttaccagcgagagctaccagcagggcgtgctgagcgccaccatcctgtacgagatcctgctgggcaaggccaccctgtacgccgtgctggtgtctgccctggtgctgatggctatggtcaagcggaaggacagccggggaagggccaagcgatctggatctggagcaacaaacttctcactactcaaacaagcaggtgacgtggaggagaatcccgggcctactagcatggccttaccagtgaccgccttgctcctgccgctggccttgctgctccacgccgccaggccggacatccagatgacacagagccctagcagcctgtctgccagcgtgggagacagagtgaccatcacctgtagagccagccaggacatcagcaactacctgaactggtatcagcagaagcccggcaaggcccctaagctgctgatctactacaccagcagactgcacagcggcgtgcccagcagattttctggctctggcagcggcaccgacttcaccctgacaatatctagcctccagcctgaggacttcgccacctactattgccagcagggcaacaccctgccttacacatttggacagggcaccaaggtggaaatcaagagaggcggaggcggaagtggaggcggaggatctggcggcggaggctctgaagtgcagctggttgaatcaggtggcggcctggttcaacctggcggatctctgagactgagctgtgccgccagcggcttcaccttcagcgactactttatgagctgggtccgacaggcccctggcaaaggacttgaatgggtcgccaccatcagcaatggcggcacctacacttactaccccgacagcgtgaagggcagattcaccatctccagagacaacagcaagaacaccctgtacctccagatgaactccctgagagccgaggacaccgccgtgtactactgcgccagattcgacggctacatcttcgactattggggccagggcaccctggtcacagtctcttctacgcgtgaggacctgaagaacgtgttcccacctgaggtggccgtgttcgagcctagcgaggccgagatcagccacacccagaaagccaccctcgtgtgcctggctaccggcttctaccccgaccatgtggaactgtcttggtgggtcaacggcaaagaggtgcacagcggcgtgtctaccgacccccagccactgaaagaacagcccgccctgaacgacagccggtactgcctgagcagcagactgagagtgtccgccaccttctggcagaacccccggaaccacttcagatgccaggtgcagttctacggcctgagcgagaacgacgagtggacccaggacagagccaagcccgtgacccagatcgtgtctgccgaagcctggggcagagccgattgcgacgtgaagctggtggaaaagagcttcgagacagacaccaacctgaacttccagaacctgagcgtgatcggcttcagaatcctgctgctgaaagtggccggctttaacctgctgatgaccctgcggctgtggtccagccgcgccaagagaagcggatctggcgtgaagcagaccctgaatttcgacctgctgaagctggctggcgacgtggaatccaacccaggcccttctagaggccatatgaccgagtacaagcccacggtgcgcctcgccacccgcgacgacgtccccagggccgtacgcaccctcgccgccgcgttcgccgactaccccgccacgcgccacaccgtcgatccggaccgccacatcgagcgggtcaccgagctgcaagaactcttcctcacgcgcgtcgggctcgacatcggcaaggtgtgggtcgcggacgacggcgccgcggtggcggtctggaccacgccggagagcgtcgaagcgggggcggtgttcgccgagatcggcccgcgcatggccgagttgagcggttcccggctggccgcgcagcaacagatggaaggcctcctggcgccgcaccggcccaaggagcccgcgtggttcctggccaccgtcggcgtctcgcccgaccaccagggcaagggtctgggcagcgccgtcgtgctccccggagtggaggcggccgagcgcgccggggtgcccgccttcctggagacctccgcgccccgcaacctccccttctacgagcggctcggcttcaccgtcaccgccgacgtcgaggtgcccgaaggaccgcgcacctggtgcatgacccgcaagcccggtgcctga

SEQ ID NO: 17821 - DNA, 2616 bp, synthetic construct
  source 1..2616: mol_type = other DNA
atggccttaccagtgaccgccttgctcctgccgctggccttgctgctccacgccgccaggccgctcgagatccagaaccctgatcctgccgtgtaccagctgcgggatagcaagagcagcgacaagagcgtgtgtctgttcaccgacttcgacagccagaccaacgtgtcccagagcaaggactccgacgtgtacatcaccgataagaccgtgctggacatgcggagcatggacttcaagagcaactccgccgtggcctggtccaacaagtccgatttcgcctgcgccaacgccttcaacaacagcattatccccgaggacacattcttcccaagccccgagagcagctgcggctttaccagcgagagctaccagcagggcgtgctgagcgccaccatcctgtacgagatcctgctgggcaaggccaccctgtacgccgtgctggtgtctgccctggtgctgatggctatggtcaagcggaaggacagccggggaagggccaagcgatctggatctggagcaacaaacttctcactactcaaacaagcaggtgacgtggaggagaatcccgggcctactagcatggccttaccagtgaccgccttgctcctgccgctggccttgctgctccacgccgccaggccggacatccagatgacacagagccctagcagcctgtctgccagcgtgggagacagagtgaccatcacatgcaaggccagcgaccacatcaacaactggctggcctggtatcagcagaagcctggacaggcccctaagctgctgatctacggcgctaccacactggaaacaggcgtgcccagcagattttctggcagcggctctggcaccgactacaccctgacaatatccagcctccagcctgaggacttcgccacctactactgtcagcagagctggaacaccccttggacattcggccagggcaccaagctggaaatcaagagaggcggaggcggaagtggaggcggaggatctggcggcggaggctctcaagttcagcttcaacagcctggcgctgagctggtcaaacctggcgcttctgtgaagatgagctgcaaagccagcggctacgccttcagcagctactggatcaactggatgaagcagaaacccggccagggactcgaatggatcggccaaatctatcccggcgacggcgacaccaactacaacggcaagttcaagggcagagccacactgaccgccgatacctctagcagcacagcctacatgcagctgagcagcctgaccagcgaagatagcgccgtgtacttctgtgcccggtccatcacaacagtcgtgggctgcgctatggactattggggccagggaacaagcgtgaccgtgtctagtacgcgtgaggacctgaagaacgtgttcccacctgaggtggccgtgttcgagcctagcgaggccgagatcagccacacccagaaagccaccctcgtgtgcctggctaccggcttctaccccgaccatgtggaactgtcttggtgggtcaacggcaaagaggtgcacagcggcgtgtctaccgacccccagccactgaaagaacagcccgccctgaacgacagccggtactgcctgagcagcagactgagagtgtccgccaccttctggcagaacccccggaaccacttcagatgccaggtgcagttctacggcctgagcgagaacgacgagtggacccaggacagagccaagcccgtgacccagatcgtgtctgccgaagcctggggcagagccgattgcgacgtgaagctggtggaaaagagcttcgagacagacaccaacctgaacttccagaacctgagcgtgatcggcttcagaatcctgctgctgaaagtggccggctttaacctgctgatgaccctgcggctgtggtccagccgcgccaagagaagcggatctggcgtgaagcagaccctgaatttcgacctgctgaagctggctggcgacgtggaatccaacccaggcccttctagaggccatatgaccgagtacaagcccacggtgcgcctcgccacccgcgacgacgtccccagggccgtacgcaccctcgccgccgcgttcgccgactaccccgccacgcgccacaccgtcgatccggaccgccacatcgagcgggtcaccgagctgcaagaactcttcctcacgcgcgtcgggctcgacatcggcaaggtgtgggtcgcggacgacggcgccgcggtggcggtctggaccacgccggagagcgtcgaagcgggggcggtgttcgccgagatcggcccgcgcatggccgagttgagcggttcccggctggccgcgcagcaacagatggaaggcctcctggcgccgcaccggcccaaggagcccgcgtggttcctggccaccgtcggcgtctcgcccgaccaccagggcaagggtctgggcagcgccgtcgtgctccccggagtggaggcggccgagcgcgccggggtgcccgccttcctggagacctccgcgccccgcaacctccccttctacgagcggctcggcttcaccgtcaccgccgacgtcgaggtgcccgaaggaccgcgcacctggtgcatgacccgcaagcccggtgcctga

SEQ ID NO: 17822 - DNA, 2622 bp, synthetic construct
  source 1..2622: mol_type = other DNA
atggccttaccagtgaccgccttgctcctgccgctggccttgctgctccacgccgccaggccgctcgagatccagaaccctgatcctgccgtgtaccagctgcgggatagcaagagcagcgacaagagcgtgtgtctgttcaccgacttcgacagccagaccaacgtgtcccagagcaaggactccgacgtgtacatcaccgataagaccgtgctggacatgcggagcatggacttcaagagcaactccgccgtggcctggtccaacaagtccgatttcgcctgcgccaacgccttcaacaacagcattatccccgaggacacattcttcccaagccccgagagcagctgcggctttaccagcgagagctaccagcagggcgtgctgagcgccaccatcctgtacgagatcctgctgggcaaggccaccctgtacgccgtgctggtgtctgccctggtgctgatggctatggtcaagcggaaggacagccggggaagggccaagcgatctggatctggagcaacaaacttctcactactcaaacaagcaggtgacgtggaggagaatcccgggcctactagcatggccttaccagtgaccgccttgctcctgccgctggccttgctgctccacgccgccaggccgcagatcgtgctgtctcagtctcctgccatcctgagcgcttccccaggcgagaaagtgaccatgacctgtagagccagcagcagcgtgtcctacatgcactggtatcagcagaagcccggcagcagccctaagccttggatctacgccaccagcaatctggcctctggcgtgccagccagattttctggctctggcagcggcaccagctacagcttcacaatcagcagagtggaagccgaggacgccgccacctactattgtcagcagtggaccttcaatcctcctaccttcggcggaggcacccggctggaaatcaaaagaacagtggctgctggcggaggcggaagtggaggcggaggatctggcggcggaggctctcaggcttatctgcaacagagcggagccgaactcgtcagacctggcgcttctgtgaagatgagctgcaaggccagcggctacaccttcaccagctataatatgcactgggtcaagcagacccctcggcagggactcgaatggatcggcggaatctatcccggcaacggcgacacctcctacaaccagaagttcaagggcaaagccacactgaccgtgggcaagagcagcagcaccgcctatatgcagctcagcagcctgaccagcgaggacagcgccgtgtacttctgcgccagatacgactacaactacgctatggactactggggccagggcaccagcgtgacagttagctctgccagcacgcgtgaggacctgaagaacgtgttcccacctgaggtggccgtgttcgagcctagcgaggccgagatcagccacacccagaaagccaccctcgtgtgcctggctaccggcttctaccccgaccatgtggaactgtcttggtgggtcaacggcaaagaggtgcacagcggcgtgtctaccgacccccagccactgaaagaacagcccgccctgaacgacagccggtactgcctgagcagcagactgagagtgtccgccaccttctggcagaacccccggaaccacttcagatgccaggtgcagttctacggcctgagcgagaacgacgagtggacccaggacagagccaagcccgtgacccagatcgtgtctgccgaagcctggggcagagccgattgcgacgtgaagctggtggaaaagagcttcgagacagacaccaacctgaacttccagaacctgagcgtgatcggcttcagaatcctgctgctgaaagtggccggctttaacctgctgatgaccctgcggctgtggtccagccgcgccaagagaagcggatctggcgtgaagcagaccctgaatttcgacctgctgaagctggctggcgacgtggaatccaacccaggcccttctagaggccatatgaccgagtacaagcccacggtgcgcctcgccacccgcgacgacgtccccagggccgtacgcaccctcgccgccgcgttcgccgactaccccgccacgcgccacaccgtcgatccggaccgccacatcgagcgggtcaccgagctgcaagaactcttcctcacgcgcgtcgggctcgacatcggcaaggtgtgggtcgcggacgacggcgccgcggtggcggtctggaccacgccggagagcgtcgaagcgggggcggtgttcgccgagatcggcccgcgcatggccgagttgagcggttcccggctggccgcgcagcaacagatggaaggcctcctggcgccgcaccggcccaaggagcccgcgtggttcctggccaccgtcggcgtctcgcccgaccaccagggcaagggtctgggcagcgccgtcgtgctccccggagtggaggcggccgagcgcgccggggtgcccgccttcctggagacctccgcgccccgcaacctccccttctacgagcggctcggcttcaccgtcaccgccgacgtcgaggtgcccgaaggaccgcgcacctggtgcatgacccgcaagcccggtgcctga

SEQ ID NO: 17823 - DNA, 2616 bp, synthetic construct
  source 1..2616: mol_type = other DNA
atggccttaccagtgaccgccttgctcctgccgctggccttgctgctccacgccgccaggccgctcgagatccagaaccctgatcctgccgtgtaccagctgcgggatagcaagagcagcgacaagagcgtgtgtctgttcaccgacttcgacagccagaccaacgtgtcccagagcaaggactccgacgtgtacatcaccgataagaccgtgctggacatgcggagcatggacttcaagagcaactccgccgtggcctggtccaacaagtccgatttcgcctgcgccaacgccttcaacaacagcattatccccgaggacacattcttcccaagccccgagagcagctgcggctttaccagcgagagctaccagcagggcgtgctgagcgccaccatcctgtacgagatcctgctgggcaaggccaccctgtacgccgtgctggtgtctgccctggtgctgatggctatggtcaagcggaaggacagccggggaagggccaagcgatctggatctggagcaacaaacttctcactactcaaacaagcaggtgacgtggaggagaatcccgggcctactagcatggccttaccagtgaccgccttgctcctgccgctggccttgctgctccacgccgccaggccggagatcgtgctgacacagagccctgccaccctgtctctgagccctggcgaaagagccaccctgagctgtagagccagccagagcgtgtccagctacctggcctggtatcagcagaagcccggccaggctccccggctgctgatctacgatgccagcaatagagccaccggcatccccgccagattttccggctctggcagcggcaccgacttcaccctgaccatcagctccctggaacccgaggacttcgccgtgtactactgccagcagcggagcaactggcccatcacattcggccagggcacccggctggaaatcaaaggcggaggcggaagtggaggcggaggatctggcggcggaggctctgaggtgcagcttgttgagtctggcggaggactggtgcagcccgatagaagcctgagactgtcttgtgccgccagcggcttcaccttccacgattatgccatgcactgggtccgacaggcccctggcaaaggacttgaatgggtgtccaccatctcttggaacagcggcacaatcggctacgccgactctgtgaagggcagattcaccatcagccgggacaacgccaagaacagcctgtacctccagatgaactccctgagagccgaggacacagccctgtactactgcgccaaggacatccagtacggcaactactactacggcatggacgtgtggggccagggcacaacagtgacagtctcttctacgcgtgaggacctgaagaacgtgttcccacctgaggtggccgtgttcgagcctagcgaggccgagatcagccacacccagaaagccaccctcgtgtgcctggctaccggcttctaccccgaccatgtggaactgtcttggtgggtcaacggcaaagaggtgcacagcggcgtgtctaccgacccccagccactgaaagaacagcccgccctgaacgacagccggtactgcctgagcagcagactgagagtgtccgccaccttctggcagaacccccggaaccacttcagatgccaggtgcagttctacggcctgagcgagaacgacgagtggacccaggacagagccaagcccgtgacccagatcgtgtctgccgaagcctggggcagagccgattgcgacgtgaagctggtggaaaagagcttcgagacagacaccaacctgaacttccagaacctgagcgtgatcggcttcagaatcctgctgctgaaagtggccggctttaacctgctgatgaccctgcggctgtggtccagccgcgccaagagaagcggatctggcgtgaagcagaccctgaatttcgacctgctgaagctggctggcgacgtggaatccaacccaggcccttctagaggccatatgaccgagtacaagcccacggtgcgcctcgccacccgcgacgacgtccccagggccgtacgcaccctcgccgccgcgttcgccgactaccccgccacgcgccacaccgtcgatccggaccgccacatcgagcgggtcaccgagctgcaagaactcttcctcacgcgcgtcgggctcgacatcggcaaggtgtgggtcgcggacgacggcgccgcggtggcggtctggaccacgccggagagcgtcgaagcgggggcggtgttcgccgagatcggcccgcgcatggccgagttgagcggttcccggctggccgcgcagcaacagatggaaggcctcctggcgccgcaccggcccaaggagcccgcgtggttcctggccaccgtcggcgtctcgcccgaccaccagggcaagggtctgggcagcgccgtcgtgctccccggagtggaggcggccgagcgcgccggggtgcccgccttcctggagacctccgcgccccgcaacctccccttctacgagcggctcggcttcaccgtcaccgccgacgtcgaggtgcccgaaggaccgcgcacctggtgcatgacccgcaagcccggtgcctga

SEQ ID NO: 17824 - DNA, 2610 bp, synthetic construct
  source 1..2610: mol_type = other DNA
atggccttaccagtgaccgccttgctcctgccgctggccttgctgctccacgccgccaggccgctcgagatccagaaccctgatcctgccgtgtaccagctgcgggatagcaagagcagcgacaagagcgtgtgtctgttcaccgacttcgacagccagaccaacgtgtcccagagcaaggactccgacgtgtacatcaccgataagaccgtgctggacatgcggagcatggacttcaagagcaactccgccgtggcctggtccaacaagtccgatttcgcctgcgccaacgccttcaacaacagcattatccccgaggacacattcttcccaagccccgagagcagctgcggctttaccagcgagagctaccagcagggcgtgctgagcgccaccatcctgtacgagatcctgctgggcaaggccaccctgtacgccgtgctggtgtctgccctggtgctgatggctatggtcaagcggaaggacagccggggaagggccaagcgatctggatctggagcaacaaacttctcactactcaaacaagcaggtgacgtggaggagaatcccgggcctactagcatggccttaccagtgaccgccttgctcctgccgctggccttgctgctccacgccgccaggccggacatccagatgacccagagccccagcagcctgtctgccagcgtgggcgacagagtgaccatcacctgtagagccagccaggacgtgaacaccgccgtggcctggtatcagcagaagcctggcaaggcccccaagctgctgatctacagcgccagcttcctggaaagcggcgtgcccagcagattcagcggaagcagaagcggcaccgacttcaccctgaccatcagctccctccagcccgaggacttcgccacctactactgccagcagcactacaccacccctcccaccttcggccagaccaaggtggaaatcaagagaggcggaggcggaagtggaggcggaggatctggcggcggaggctctgaagtgcaactggtggaatctggcggcggactggtgcagcctggcggatctctgagactgagctgtgccgccagcggcttcaacatcaaggacacctacatccactgggtgcgccaggcccctggaaagggactggaatgggtggcccggatctaccccaccaacggctacaccagatacgccgacagcgtgaagggccggttcaccatcagcgccgacaccagcaagaataccgcctacctccagatgaacagcctgcgggccgaggataccgccgtgtactactgctcaagatggggaggcgacggcttctacgctatggacgtgtggggccagggcacccttgtgaccgtgtcatctacgcgtgaggacctgaagaacgtgttcccacctgaggtggccgtgttcgagcctagcgaggccgagatcagccacacccagaaagccaccctcgtgtgcctggctaccggcttctaccccgaccatgtggaactgtcttggtgggtcaacggcaaagaggtgcacagcggcgtgtctaccgacccccagccactgaaagaacagcccgccctgaacgacagccggtactgcctgagcagcagactgagagtgtccgccaccttctggcagaacccccggaaccacttcagatgccaggtgcagttctacggcctgagcgagaacgacgagtggacccaggacagagccaagcccgtgacccagatcgtgtctgccgaagcctggggcagagccgattgcgacgtgaagctggtggaaaagagcttcgagacagacaccaacctgaacttccagaacctgagcgtgatcggcttcagaatcctgctgctgaaagtggccggctttaacctgctgatgaccctgcggctgtggtccagccgcgccaagagaagcggatctggcgtgaagcagaccctgaatttcgacctgctgaagctggctggcgacgtggaatccaacccaggcccttctagaggccatatgaccgagtacaagcccacggtgcgcctcgccacccgcgacgacgtccccagggccgtacgcaccctcgccgccgcgttcgccgactaccccgccacgcgccacaccgtcgatccggaccgccacatcgagcgggtcaccgagctgcaagaactcttcctcacgcgcgtcgggctcgacatcggcaaggtgtgggtcgcggacgacggcgccgcggtggcggtctggaccacgccggagagcgtcgaagcgggggcggtgttcgccgagatcggcccgcgcatggccgagttgagcggttcccggctggccgcgcagcaacagatggaaggcctcctggcgccgcaccggcccaaggagcccgcgtggttcctggccaccgtcggcgtctcgcccgaccaccagggcaagggtctgggcagcgccgtcgtgctccccggagtggaggcggccgagcgcgccggggtgcccgccttcctggagacctccgcgccccgcaacctccccttctacgagcggctcggcttcaccgtcaccgccgacgtcgaggtgcccgaaggaccgcgcacctggtgcatgacccgcaagcccggtgcctga

SEQ ID NO: 17825 - DNA, 2247 bp, synthetic construct
  source 1..2247: mol_type = other DNA
atggccttaccagtgaccgccttgctcctgccgctggccttgctgctccacgccgccaggccgctcgagatccagaaccctgatcctgccgtgtaccagctgcgggatagcaagagcagcgacaagagcgtgtgtctgttcaccgacttcgacagccagaccaacgtgtcccagagcaaggactccgacgtgtacatcaccgataagaccgtgctggacatgcggagcatggacttcaagagcaactccgccgtggcctggtccaacaagtccgatttcgcctgcgccaacgccttcaacaacagcattatccccgaggacacattcttcccaagccccgagagcagctgcggctttaccagcgagagctaccagcagggcgtgctgagcgccaccatcctgtacgagatcctgctgggcaaggccaccctgtacgccgtgctggtgtctgccctggtgctgatggctatggtcaagcggaaggacagccggggaagggccaagcgatctggatctggagcaacaaacttctcactactcaaacaagcaggtgacgtggaggagaatcccgggcctactagcatggccctgcccgtgacagccctgctgctgcctctggctctgctgctgcacgccgccagacccgatgaattcgaggtgcaactggtggaaagcggcggaggcctggtgcaggctggcggatctctgagactgagctgtgccgccagcggcatcaccttcagcatcaacacaatgggctggtacagacaggcccctggcaagcagagggaactggtggccctgatctccagcatcggcgacacctactacgccgacagcgtgaagggccggttcaccatcagccgggacaacgccaagaacaccgtgtacctccagatgaacagcctgaagcccgaggacaccgccgtgtactactgcaagcggttcagaacagccgcccagggcaccgattattggggccagggaacacaagtgaccgtgtcctctacgcgtgaggacctgaagaacgtgttcccacctgaggtggccgtgttcgagcctagcgaggccgagatcagccacacccagaaagccaccctcgtgtgcctggctaccggcttctaccccgaccatgtggaactgtcttggtgggtcaacggcaaagaggtgcacagcggcgtgtctaccgacccccagccactgaaagaacagcccgccctgaacgacagccggtactgcctgagcagcagactgagagtgtccgccaccttctggcagaacccccggaaccacttcagatgccaggtgcagttctacggcctgagcgagaacgacgagtggacccaggacagagccaagcccgtgacccagatcgtgtctgccgaagcctggggcagagccgattgcgacgtgaagctggtggaaaagagcttcgagacagacaccaacctgaacttccagaacctgagcgtgatcggcttcagaatcctgctgctgaaagtggccggctttaacctgctgatgaccctgcggctgtggtccagccgcgccaagagaagcggatctggcgtgaagcagaccctgaatttcgacctgctgaagctggctggcgacgtggaatccaacccaggcccttctagaggccatatgaccgagtacaagcccacggtgcgcctcgccacccgcgacgacgtccccagggccgtacgcaccctcgccgccgcgttcgccgactaccccgccacgcgccacaccgtcgatccggaccgccacatcgagcgggtcaccgagctgcaagaactcttcctcacgcgcgtcgggctcgacatcggcaaggtgtgggtcgcggacgacggcgccgcggtggcggtctggaccacgccggagagcgtcgaagcgggggcggtgttcgccgagatcggcccgcgcatggccgagttgagcggttcccggctggccgcgcagcaacagatggaaggcctcctggcgccgcaccggcccaaggagcccgcgtggttcctggccaccgtcggcgtctcgcccgaccaccagggcaagggtctgggcagcgccgtcgtgctccccggagtggaggcggccgagcgcgccggggtgcccgccttcctggagacctccgcgccccgcaacctccccttctacgagcggctcggcttcaccgtcaccgccgacgtcgaggtgcccgaaggaccgcgcacctggtgcatgacccgcaagcccggtgcctga

SEQ ID NO: 17826 - DNA, 2247 bp, synthetic construct; identical to SEQ ID NO: 17825
  source 1..2247: mol_type = other DNA

SEQ ID NO: 17827 - DNA, 3042 bp, synthetic construct
  source 1..3042: mol_type = other DNA
atggccttaccagtgaccgccttgctcctgccgctggccttgctgctccacgccgccaggccgctcgagatccagaaccctgatcctgccgtgtaccagctgcgggatagcaagagcagcgacaagagcgtgtgtctgttcaccgacttcgacagccagaccaacgtgtcccagagcaaggactccgacgtgtacatcaccgataagaccgtgctggacatgcggagcatggacttcaagagcaactccgccgtggcctggtccaacaagtccgatttcgcctgcgccaacgccttcaacaacagcattatccccgaggacacattcttcccaagccccgagagcagctgcggctttaccagcgagagctaccagcagggcgtgctgagcgccaccatcctgtacgagatcctgctgggcaaggccaccctgtacgccgtgctggtgtctgccctggtgctgatggctatggtcaagcggaaggacagccggggaagggccaagcgatctggatctggagcaacaaacttctcactactcaaacaagcaggtgacgtggaggagaatcccgggcctactagcatggccttaccagtgaccgccttgctcctgccgctggccttgctgctccacgccgccaggccgcaggtccagctcgtcgagtccggcggcggcctcgtccaggccggcgactccgtcaccctctcctgcaccgcctccggccgcaccttctcctcctacgccctcgcctggttccgccagcgccccggcaaggagcgcgagttcgtcgccggcctccgctggggcggccccaccaactacgccgactccgtcaaggaccgcttcaccatctccggcgactccgccaagcacaccatgtacctccagatgaactccctcaagcccgaggacaccgccgtctactactgcggctacaaccccggcggctgggccgtcccctcccagtacgagtacgactcctggggccagggcacccaggtcaccgtctcctccggtaccggcggaggcggatctggcggcggaggtagcggtggcggaggatctgaattcgacatccagatgacacagagccctagcagcctgtctgccagcgtgggagacagagtgaccatcacatgcaaggccagcgaccacatcaacaactggctggcctggtatcagcagaagcctggacaggcccctaagctgctgatctacggcgctaccacactggaaacaggcgtgcccagcagattttctggcagcggctctggcaccgactacaccctgacaatatccagcctccagcctgaggacttcgccacctactactgtcagcagagctggaacaccccttggacattcggccagggcaccaagctggaaatcaagagaggcggaggcggaagtggaggcggaggatctggcggcggaggctctcaagttcagcttcaacagcctggcgctgagctggtcaaacctggcgcttctgtgaagatgagctgcaaagccagcggctacgccttcagcagctactggatcaactggatgaagcagaaacccggccagggactcgaatggatcggccaaatctatcccggcgacggcgacaccaactacaacggcaagttcaagggcagagccacactgaccgccgatacctctagcagcacagcctacatgcagctgagcagcctgaccagcgaagatagcgccgtgtacttctgtgcccggtccatcacaacagtcgtgggctgcgctatggactattggggccagggaacaagcgtgaccgtgtctagtacgcgtgaggacctgaagaacgtgttcccacctgaggtggccgtgttcgagcctagcgaggccgagatcagccacacccagaaagccaccctcgtgtgcctggctaccggcttctaccccgaccatgtggaactgtcttggtgggtcaacggcaaagaggtgcacagcggcgtgtctaccgacccccagccactgaaagaacagcccgccctgaacgacagccggtactgcctgagcagcagactgagagtgtccgccaccttctggcagaacccccggaaccacttcagatgccaggtgcagttctacggcctgagcgagaacgacgagtggacccaggacagagccaagcccgtgacccagatcgtgtctgccgaagcctggggcagagccgattgcgacgtgaagctggtggaaaagagcttcgagacagacaccaacctgaacttccagaacctgagcgtgatcggcttcagaatcctgctgctgaaagtggccggctttaacctgctgatgaccctgcggctgtggtccagccgcgccaagagaagcggatctggcgtgaagcagaccctgaatttcgacctgctgaagctggctggcgacgtggaatccaacccaggcccttctagaggccatatgaccgagtacaagcccacggtgcgcctcgccacccgcgacgacgtccccagggccgtacgcaccctcgccgccgcgttcgccgactaccccgccacgcgccacaccgtcgatccggaccgccacatcgagcgggtcaccgagctgcaagaactcttcctcacgcgcgtcgggctcgacatcggcaaggtgtgggtcgcggacgacggcgccgcggtggcggtctggaccacgccggagagcgtcgaagcgggggcggtgttcgccgagatcggcccgcgcatggccgagttgagcggttcccggctggccgcgcagcaacagatggaaggcctcctggcgccgcaccggcccaaggagcccgcgtggttcctggccaccgtcggcgtctcgcccgaccaccagggcaagggtctgggcagcgccgtcgtgctccccggagtggaggcggccgagcgcgccggggtgcccgccttcctggagacctccgcgccccgcaacctccccttctacgagcggctcggcttcaccgtcaccgccgacgtcgaggtgcccgaaggaccgcgcacctggtgcatgacccgcaagcccggtgcctga

SEQ ID NO: 17828 - DNA, 3429 bp, synthetic construct
  source 1..3429: mol_type = other DNA
atggccttaccagtgaccgccttgctcctgccgctggccttgctgctccacgccgccaggccgctcgagatccagaaccctgatcctgccgtgtaccagctgcgggatagcaagagcagcgacaagagcgtgtgtctgttcaccgacttcgacagccagaccaacgtgtcccagagcaaggactccgacgtgtacatcaccgataagaccgtgctggacatgcggagcatggacttcaagagcaactccgccgtggcctggtccaacaagtccgatttcgcctgcgccaacgccttcaacaacagcattatccccgaggacacattcttcccaagccccgagagcagctgcggctttaccagcgagagctaccagcagggcgtgctgagcgccaccatcctgtacgagatcctgctgggcaaggccaccctgtacgccgtgctggtgtctgccctggtgctgatggctatggtcaagcggaaggacagccggggaagggccaagcgatctggatctggagcaacaaacttctcactactcaaacaagcaggtgacgtggaggagaatcccgggcctactagcatggccttaccagtgaccgccttgctcctgccgctggccttgctgctccacgccgccaggccggaggttcagctgcttgagtctggcggaggactggttcaacctggcggaagcctgagactgtcttgtgccgccagcggcttcacctttagcagctacgccatgagctgggtccgacaggctcctggcaaaggactggaatgggtgtccagcatcagcggcagcggcgactacatctactacgccgatagcgtgaagggcagattcaccatcagccgggacatcagcaagaacaccctgtacctccagatgaacagcctgagagccgaggacaccgccgtgtactactgtgccaaagaaggcaccggcgctaacagcagcctggccgattatagaggccagggcacactggtcaccgtgtctagtggcggaggaagcggcggaggatctcaggtccagctcgtcgagtccggcggcggcctcgtccaggccggcgactccgtcaccctctcctgcaccgcctccggccgcaccttctcctcctacgccctcgcctggttccgccagcgccccggcaaggagcgcgagttcgtcgccggcctccgctggggcggccccaccaactacgccgactccgtcaaggaccgcttcaccatctccggcgactccgccaagcacaccatgtacctccagatgaactccctcaagcccgaggacaccgccgtctactactgcggctacaaccccggcggctgggccgtcccctcccagtacgagtacgactcctggggccagggcacccaggtcaccgtctcctccggtaccggcggaggcggatctggcggcggaggtagcggtggcggaggatctgaattcgacatccagatgacacagagccctagcagcctgtctgccagcgtgggagacagagtgaccatcacatgcaaggccagcgaccacatcaacaactggctggcctggtatcagcagaagcctggacaggcccctaagctgctgatctacggcgctaccacactggaaacaggcgtgcccagcagattttctggcagcggctctggcaccgactacaccctgacaatatccagcctccagcctgaggacttcgccacctactactgtcagcagagctggaacaccccttggacattcggccagggcaccaagctggaaatcaagagaggcggaggcggaagtggaggcggaggatctggcggcggaggctctcaagttcagcttcaacagcctggcgctgagctggtcaaacctggcgcttctgtgaagatgagctgcaaagccagcggctacgccttcagcagctactggatcaactggatgaagcagaaacccggccagggactcgaatggatcggccaaatctatcccggcgacggcgacaccaactacaacggcaagttcaagggcagagccacactgaccgccgatacctctagcagcacagcctacatgcagctgagcagcctgaccagcgaagatagcgccgtgtacttctgtgcccggtccatcacaacagtcgtgggctgcgctatggactattggggccagggaacaagcgtgaccgtgtctagtacgcgtgaggacctgaagaacgtgttcccacctgaggtggccgtgttcgagcctagcgaggccgagatcagccacacccagaaagccaccctcgtgtgcctggctaccggcttctaccccgaccatgtggaactgtcttggtgggtcaacggcaaagaggtgcacagcggcgtgtctaccgacccccagccactgaaagaacagcccgccctgaacgacagccggtactgcctgagcagcagactgagagtgtccgccaccttctggcagaacccccggaaccacttcagatgccaggtgcagttctacggcctgagcgagaacgacgagtggacccaggacagagccaagcccgtgacccagatcgtgtctgccgaagcctggggcagagccgattgcgacgtgaagctggtggaaaagagcttcgagacagacaccaacctgaacttccagaacctgagcgtgatcggcttcagaatcctgctgctgaaagtggccggctttaacctgctgatgaccctgcggctgtggtccagccgcgccaagagaagcggatctggcgtgaagcagaccctgaatttcgacctgctgaagctggctggcgacgtggaatccaacccaggcccttctagaggccatatgaccgagtacaagcccacggtgcgcctcgccacccgcgacgacgtccccagggccgtacgcaccctcgccgccgcgttcgccgactaccccgccacgcgccacaccgtcgatccggaccgccacatcgagcgggtcaccgagctgcaagaactcttcctcacgcgcgtcgggctcgacatcggcaaggtgtgggtcgcggacgacggcgccgcggtggcggtctggaccacgccggagagcgtcgaagcgggggcggtgttcgccgagatcggcccgcgcatggccgagttgagcggttcccggctggccgcgcagcaacagatggaaggcctcctggcgccgcaccggcccaaggagcccgcgtggttcctggccaccgtcggcgtctcgcccgaccaccagggcaagggtctgggcagcgccgtcgtgctccccggagtggaggcggccgagcgcgccggggtgcccgccttcctggagacctccgcgccccgcaacctccccttctacgagcggctcggcttcaccgtcaccgccgacgtcgaggtgcccgaaggaccgcgcacctggtgcatgacccgcaagcccggtgcctga

SEQ ID NO: 17829 - DNA, 3423 bp, synthetic construct
  source 1..3423: mol_type = other DNA
atggccttaccagtgaccgccttgctcctgccgctggccttgctgctccacgccgccaggccgctcgagatccagaaccctgatcctgccgtgtaccagctgcgggatagcaagagcagcgacaagagcgtgtgtctgttcaccgacttcgacagccagaccaacgtgtcccagagcaaggactccgacgtgtacatcaccgataagaccgtgctggacatgcggagcatggacttcaagagcaactccgccgtggcctggtccaacaagtccgatttcgcctgcgccaacgccttcaacaacagcattatccccgaggacacattcttcccaagccccgagagcagctgcggctttaccagcgagagctaccagcagggcgtgctgagcgccaccatcctgtacgagatcctgctgggcaaggccaccctgtacgccgtgctggtgtctgccctggtgctgatggctatggtcaagcggaaggacagccggggaagggccaagcgatctggatctggagcaacaaacttctcactactcaaacaagcaggtgacgtggaggagaatcccgggcctactagcatggccttaccagtgaccgccttgctcctgccgctggccttgctgctccacgccgccaggccgggcgtgacacagagccccacacacctgattaagaccagaggccagcaggccacactgagatgcagccctatcagcggccacaccagcgtgtactggtatcagcaggctctcggactgggcctccagttcctgctttggtacgacgagggcgaagagagaaaccggggcaacttccctcctcggttttccggcagacagttccccaactacagcagcgagctgaacgtgaacgccctggaactggaagatagcgccctgtacctgtgtgcctcttctcttggtggacctcgcggactggctggactgagaggggatgagcagtttttcggccctggcaccagactgaccgtgctggaaggcggaggaagcggcggaggatctcaggtccagctcgtcgagtccggcggcggcctcgtccaggccggcgactccgtcaccctctcctgcaccgcctccggccgcaccttctcctcctacgccctcgcctggttccgccagcgccccggcaaggagcgcgagttcgtcgccggcctccgctggggcggccccaccaactacgccgactccgtcaaggaccgcttcaccatctccggcgactccgccaagcacaccatgtacctccagatgaactccctcaagcccgaggacaccgccgtctactactgcggctacaaccccggcggctgggccgtcccctcccagtacgagtacgactcctggggccagggcacccaggtcaccgtctcctccggtaccggcggaggcggatctggcggcggaggtagcggtggcggaggatctgaattcgacatccagatgacacagagccctagcagcctgtctgccagcgtgggagacagagtgaccatcacatgcaaggccagcgaccacatcaacaactggctggcctggtatcagcagaagcctggacaggcccctaagctgctgatctacggcgctaccacactggaaacaggcgtgcccagcagattttctggcagcggctctggcaccgactacaccctgacaatatccagcctccagcctgaggacttcgccacctactactgtcagcagagctggaacaccccttggacattcggccagggcaccaagctggaaatcaagagaggcggaggcggaagtggaggcggaggatctggcggcggaggctctcaagttcagcttcaacagcctggcgctgagctggtcaaacctggcgcttctgtgaagatgagctgcaaagccagcggctacgccttcagcagctactggatcaactggatgaagcagaaacccggccagggactcgaatggatcggccaaatctatcccggcgacggcgacaccaactacaacggcaagttcaagggcagagccacactgaccgccgatacctctagcagcacagcctacatgcagctgagcagcctgaccagcgaagatagcgccgtgtacttctgtgcccggtccatcacaacagtcgtgggctgcgctatggactattggggccagggaacaagcgtgaccgtgtctagtacgcgtgaggacctgaagaacgtgttcccacctgaggtggccgtgttcgagcctagcgaggccgagatcagccacacccagaaagccaccctcgtgtgcctggctaccggcttctaccccgaccatgtggaactgtcttggtgggtcaacggcaaagaggtgcacagcggcgtgtctaccgacccccagccactgaaagaacagcccgccctgaacgacagccggtactgcctgagcagcagactgagagtgtccgccaccttctggcagaacccccggaaccacttcagatgccaggtgcagttctacggcctgagcgagaacgacgagtggacccaggacagagccaagcccgtgacccagatcgtgtctgccgaagcctggggcagagccgattgcgacgtgaagctggtggaaaagagcttcgagacagacaccaacctgaacttccagaacctgagcgtgatcggcttcagaatcctgctgctgaaagtggccggctttaacctgctgatgaccctgcggctgtggtccagccgcgccaagagaagcggatctggcgtgaagcagaccctgaatttcgacctgctgaagctggctggcgacgtggaatccaacccaggcccttctagaggccatatgaccgagtacaagcccacggtgcgcctcgccacccgcgacgacgtccccagggccgtacgcaccctcgccgccgcgttcgccgactaccccgccacgcgccacaccgtcgatccggaccgccacatcgagcgggtcaccgagctgcaagaactcttcctcacgcgcgtcgggctcgacatcggcaaggtgtgggtcgcggacgacggcgccgcggtggcggtctggaccacgccggagagcgtcgaagcgggggcggtgttcgccgagatcggcccgcgcatggccgagttgagcggttcccggctggccgcgcagcaacagatggaaggcctcctggcgccgcaccggcccaaggagcccgcgtggttcctggccaccgtcggcgtctcgcccgaccaccagggcaagggtctgggcagcgccgtcgtgctccccggagtggaggcggccgagcgcgccggggtgcccgccttcctggagacctccgcgccccgcaacctccccttctacgagcggctcggcttcaccgtcaccgccgacgtcgaggtgcccgaaggaccgcgcacctggtgcatgacccgcaagcccggtgcctga

SEQ ID NO: 17830 - DNA, 2703 bp, synthetic construct
  source 1..2703: mol_type = other DNA
atggccttaccagtgaccgccttgctcctgccgctggccttgctgctccacgccgccaggccgctcgagatccagaaccctgatcctgccgtgtaccagctgcgggatagcaagagcagcgacaagagcgtgtgtctgttcaccgacttcgacagccagaccaacgtgtcccagagcaaggactccgacgtgtacatcaccgataagaccgtgctggacatgcggagcatggacttcaagagcaactccgccgtggcctggtccaacaagtccgatttcgcctgcgccaacgccttcaacaacagcattatccccgaggacacattcttcccaagccccgagagcagctgcggctttaccagcgagagctaccagcagggcgtgctgagcgccaccatcctgtacgagatcctgctgggcaaggccaccctgtacgccgtgctggtgtctgccctggtgctgatggctatggtcaagcggaaggacagccggggaagggccaagcgatctggatctggagcaacaaacttctcactactcaaacaagcaggtgacgtggaggagaatcccgggcctactagcatggccttaccagtgaccgccttgctcctgccgctggccttgctgctccacgccgccaggccgggcgtgacacagagccccacacacctgattaagaccagaggccagcaggccacactgagatgcagccctatcagcggccacaccagcgtgtactggtatcagcaggctctcggactgggcctccagttcctgctttggtacgacgagggcgaagagagaaaccggggcaacttccctcctcggttttccggcagacagttccccaactacagcagcgagctgaacgtgaacgccctggaactggaagatagcgccctgtacctgtgtgcctcttctcttggtggacctcgcggactggctggactgagaggggatgagcagtttttcggccctggcaccagactgaccgtgctggaaggcggaggaagcggcggaggatctggcgtgacacagagccccacacacctgattaagaccagaggccagcaggccacactgagatgcagccctatcagcggccacaccagcgtgtactggtatcagcaggctctcggactgggcctccagttcctgctttggtacgacgagggcgaagagagaaaccggggcaacttccctcctcggttttccggcagacagttccccaactacagcagcgagctgaacgtgaacgccctggaactggaagatagcgccctgtacctgtgtgccagctctctcggcggagatgaactgggagccgatggcaacgagcagttctttggccctggcaccagactgaccgtgctggaaggtaccggcggaggcggatctggcggcggaggtagcggtggcggaggatctgaattcgacatccagatgacacagagccctagcagcctgtctgccagcgtgggagacagagtgaccatcacatgcaaggccagcgaccacatcaacaactggctggcctggtatcagcagaagcctggacaggcccctaagctgctgatctacggcgctaccacactggaaacaggcgtgcccagcagattttctggcagcggctctggcaccgactacaccctgacaatatccagcctccagcctgaggacttcgccacctactactgtcagcagagctggaacaccccttggacattcggccagggcaccaagctggaaatcaagagaggcggaggcggaagtggaggcggaggatctggcggcggaggctctcaagttcagcttcaacagcctggcgctgagctggtcaaacctggcgcttctgtgaagatgagctgcaaagccagcggctacgccttcagcagctactggatcaactggatgaagcagaaacccggccagggactcgaatggatcggccaaatctatcccggcgacggcgacaccaactacaacggcaagttcaagggcagagccacactgaccgccgatacctctagcagcacagcctacatgcagctgagcagcctgaccagcgaagatagcgccgtgtacttctgtgcccggtccatcacaacagtcgtgggctgcgctatggactattggggccagggaacaagcgtgaccgtgtctagtacgcgtgaggacctgaagaacgtgttcccacctgaggtggccgtgttcgagcctagcgaggccgagatcagccacacccagaaagccaccctcgtgtgcctggctaccggcttctaccccgaccatgtggaactgtcttggtgggtcaacggcaaagaggtgcacagcggcgtgtctaccgacccccagccactgaaagaacagcccgccctgaacgacagccggtactgcctgagcagcagactgagagtgtccgccaccttctggcagaacccccggaaccacttcagatgccaggtgcagttctacggcctgagcgagaacgacgagtggacccaggacagagccaagcccgtgacccagatcgtgtctgccgaagcctggggcagagccgattgcgacgtgaagctggtggaaaagagcttcgagacagacaccaacctgaacttccagaacctgagcgtgatcggcttcagaatcctgctgctgaaagtggccggctttaacctgctgatgaccctgcggctgtggtccagc

SEQ ID NO: 17831 - DNA, 2265 bp, synthetic construct
  source 1..2265: mol_type = other DNA
atggccttaccagtgaccgccttgctcctgccgctggccttgctgctccacgccgccaggccgctcgagatccagaaccctgatcctgccgtgtaccagctgcgggatagcaagagcagcgacaagagcgtgtgtctgttcaccgacttcgacagccagaccaacgtgtcccagagcaaggactccgacgtgtacatcaccgataagaccgtgctggacatgcggagcatggacttcaagagcaactccgccgtggcctggtccaacaagtccgatttcgcctgcgccaacgccttcaacaacagcattatccccgaggacacattcttcccaagccccgagagcagctgcggctttaccagcgagagctaccagcagggcgtgctgagcgccaccatcctgtacgagatcctgctgggcaaggccaccctgtacgccgtgctggtgtctgccctggtgctgatggctatggtcaagcggaaggacagccggggaagggccaagcgatctggatctggagcaacaaacttctcactactcaaacaagcaggtgacgtggaggagaatcccgggcctactagcatggccctgcccgtgacagccctgctgctgcctctggctctgctgctgcacgccgccagacccgatgaattcggctctgacctgggcatcaagctgctgttcgccgctgccaagggccaggacgacgaagtgcggattctgctggctgctggggccgacgtgaacgccaaggatttcgagggctacacccccctgcacgtggccgcctatgatggacacctggaaatcgtggaagtgctgctgaaggctggcgctgatgtgaatgccaaagacagccagggccggacccctctgcatgaagccgcctacagcggccatctggaaattgtggaagtgctgctgaaagccggggcagacgtgaacgctcaggacgacgctggcgagacaccagccgatctggctgcagcttggggccacgaagatatcgccgaggtgctgcagaagacgcgtgaggacctgaagaacgtgttcccacctgaggtggccgtgttcgagcctagcgaggccgagatcagccacacccagaaagccaccctcgtgtgcctggctaccggcttctaccccgaccatgtggaactgtcttggtgggtcaacggcaaagaggtgcacagcggcgtgtctaccgacccccagccactgaaagaacagcccgccctgaacgacagccggtactgcctgagcagcagactgagagtgtccgccaccttctggcagaacccccggaaccacttcagatgccaggtgcagttctacggcctgagcgagaacgacgagtggacccaggacagagccaagcccgtgacccagatcgtgtctgccgaagcctggggcagagccgattgcgacgtgaagctggtggaaaagagcttcgagacagacaccaacctgaacttccagaacctgagcgtgatcggcttcagaatcctgctgctgaaagtggccggctttaacctgctgatgaccctgcggctgtggtccagccgcgccaagagaagcggatctggcgtgaagcagaccctgaatttcgacctgctgaagctggctggcgacgtggaatccaacccaggcccttctagaggccatatgaccgagtacaagcccacggtgcgcctcgccacccgcgacgacgtccccagggccgtacgcaccctcgccgccgcgttcgccgactaccccgccacgcgccacaccgtcgatccggaccgccacatcgagcgggtcaccgagctgcaagaactcttcctcacgcgcgtcgggctcgacatcggcaaggtgtgggtcgcggacgacggcgccgcggtggcggtctggaccacgccggagagcgtcgaagcgggggcggtgttcgccgagatcggcccgcgcatggccgagttgagcggttcccggctggccgcgcagcaacagatggaaggcctcctggcgccgcaccggcccaaggagcccgcgtggttcctggccaccgtcggcgtctcgcccgaccaccagggcaagggtctgggcagcgccgtcgtgctccccggagtggaggcggccgagcgcgccggggtgcccgccttcctggagacctccgcgccccgcaacctccccttctacgagcggctcggcttcaccgtcaccgccgacgtcgaggtgcccgaaggaccgcgcacctggtgcatgacccgcaagcccggtgcctga

SEQ ID NO: 17832 - DNA, 2052 bp, synthetic construct
  source 1..2052: mol_type = other DNA
atggccttaccagtgaccgccttgctcctgccgctggccttgctgctccacgccgccaggccgctcgagatccagaaccctgatcctgccgtgtaccagctgcgggatagcaagagcagcgacaagagcgtgtgtctgttcaccgacttcgacagccagaccaacgtgtcccagagcaaggactccgacgtgtacatcaccgataagaccgtgctggacatgcggagcatggacttcaagagcaactccgccgtggcctggtccaacaagtccgatttcgcctgcgccaacgccttcaacaacagcattatccccgaggacacattcttcccaagccccgagagcagctgcggctttaccagcgagagctaccagcagggcgtgctgagcgccaccatcctgtacgagatcctgctgggcaaggccaccctgtacgccgtgctggtgtctgccctggtgctgatggctatggtcaagcggaaggacagccggggaagggccaagcgatctggatctggagcaacaaacttctcactactcaaacaagcaggtgacgtggaggagaatcccgggcctactagcatggactggatttggcgcatccttttccttgtcggcgctgctaccggcgcccattccttcgaaggcagcggattcgaatacgccaaagagatgcggaacgcctactgggagatcgccctgctgcccaatctgaccaaccagcagaagagagcccccatcagaaagctgtacgacgacccctcccagagcagcgagctgctgtctgaggctaaaaaactgaacgatagccagacgcgtgaggacctgaagaacgtgttcccacctgaggtggccgtgttcgagcctagcgaggccgagatcagccacacccagaaagccaccctcgtgtgcctggctaccggcttctaccccgaccatgtggaactgtcttggtgggtcaacggcaaagaggtgcacagcggcgtgtctaccgacccccagccactgaaagaacagcccgccctgaacgacagccggtactgcctgagcagcagactgagagtgtccgccaccttctggcagaacccccggaaccacttcagatgccaggtgcagttctacggcctgagcgagaacgacgagtggacccaggacagagccaagcccgtgacccagatcgtgtctgccgaagcctggggcagagccgattgcgacgtgaagctggtggaaaagagcttcgagacagacaccaacctgaacttccagaacctgagcgtgatcggcttcagaatcctgctgctgaaagtggccggctttaacctgctgatgaccctgcggctgtggtccagccgcgccaagagaagcggatctggcgtgaagcagaccctgaatttcgacctgctgaagctggctggcgacgtggaatccaacccaggcccttctagaggccatatgaccgagtacaagcccacggtgcgcctcgccacccgcgacgacgtccccagggccgtacgcaccctcgccgccgcgttcgccgactaccccgccacgcgccacaccgtcgatccggaccgccacatcgagcgggtcaccgagctgcaagaactcttcctcacgcgcgtcgggctcgacatcggcaaggtgtgggtcgcggacgacggcgccgcggtggcggtctggaccacgccggagagcgtcgaagcgggggcggtgttcgccgagatcggcccgcgcatggccgagttgagcggttcccggctggccgcgcagcaacagatggaaggcctcctggcgccgcaccggcccaaggagcccgcgtggttcctggccaccgtcggcgtctcgcccgaccaccagggcaagggtctgggcagcgccgtcgtgctccccggagtggaggcggccgagcgcgccggggtgcccgccttcctggagacctccgcgccccgcaacctccccttctacgagcggctcggcttcaccgtcaccgccgacgtcgaggtgcccgaaggaccgcgcacctggtgcatgacccgcaagcccggtgcctga

SEQ ID NO: 17833 - DNA, 2718 bp, synthetic construct
  source 1..2718: mol_type = other DNA
atggccttaccagtgaccgccttgctcctgccgctggccttgctgctccacgccgccaggccgctcgagatccagaaccctgatcctgccgtgtaccagctgcgggatagcaagagcagcgacaagagcgtgtgtctgttcaccgacttcgacagccagaccaacgtgtcccagagcaaggactccgacgtgtacatcaccgataagaccgtgctggacatgcggagcatggacttcaagagcaactccgccgtggcctggtccaacaagtccgatttcgcctgcgccaacgccttcaacaacagcattatccccgaggacacattcttcccaagccccgagagcagctgcggctttaccagcgagagctaccagcagggcgtgctgagcgccaccatcctgtacgagatcctgctgggcaaggccaccctgtacgccgtgctggtgtctgccctggtgctgatggctatggtcaagcggaaggacagccggggaagggccaagcgatctggatctggagcaacaaacttctcactactcaaacaagcaggtgacgtggaggagaatcccgggcctactagcatggccctgcccgtgacagccctgctgctgcctctggctctgctgctgcacgccgccagacccgatgaattcgaggtgcaactggtggaaagcggcggaggcctggtgcaggctggcggatctctgagactgagctgtgccgccagcggcatcaccttcagcatcaacacaatgggctggtacagacaggcccctggcaagcagagggaactggtggccctgatctccagcatcggcgacacctactacgccgacagcgtgaagggccggttcaccatcagccgggacaacgccaagaacaccgtgtacctccagatgaacagcctgaagcccgaggacaccgccgtgtactactgcaagcggttcagaacagccgcccagggcaccgattattggggccagggaacacaagtgaccgtgtcctctctcgagggaggaggcggctccgggggaggcggaagtggaggcggaggatctgggtctggaggaagcggatctggaggctcagggtcagggggctcaggcagtggaggctctttcgaagtgcaactggtggaatctgggggcggactggtgcagccaggcggaagtctgaggctgtcttgtgccgcctccggcagcatcttcggcttcaacgacatggcctggtatcggcaggctcccggaaaacagcgcgagctggtggctctgattagcagagtgggcgtgaccagcagcgccgactctgtgaagggcagattcacaatctccagagtgaacgccaaggatacagtgtacctccagatgaactctctgaaacctgaggatacagcagtgtactattgctacatggaccagcggctggacggcagcacactggcctactggggacagggaactcaagtgacagtgtctagcacgcgtgaggacctgaagaacgtgttcccacctgaggtggccgtgttcgagcctagcgaggccgagatcagccacacccagaaagccaccctcgtgtgcctggctaccggcttctaccccgaccatgtggaactgtcttggtgggtcaacggcaaagaggtgcacagcggcgtgtctaccgacccccagccactgaaagaacagcccgccctgaacgacagccggtactgcctgagcagcagactgagagtgtccgccaccttctggcagaacccccggaaccacttcagatgccaggtgcagttctacggcctgagcgagaacgacgagtggacccaggacagagccaagcccgtgacccagatcgtgtctgccgaagcctggggcagagccgattgcgacgtgaagctggtggaaaagagcttcgagacagacaccaacctgaacttccagaacctgagcgtgatcggcttcagaatcctgctgctgaaagtggccggctttaacctgctgatgaccctgcggctgtggtccagccgcgccaagagaagcggatctggcgtgaagcagaccctgaatttcgacctgctgaagctggctggcgacgtggaatccaacccaggcccttctagaggccatatgaccgagtacaagcccacggtgcgcctcgccacccgcgacgacgtccccagggccgtacgcaccctcgccgccgcgttcgccgactaccccgccacgcgccacaccgtcgatccggaccgccacatcgagcgggtcaccgagctgcaagaactcttcctcacgcgcgtcgggctcgacatcggcaaggtgtgggtcgcggacgacggcgccgcggtggcggtctggaccacgccggagagcgtcgaagcgggggcggtgttcgccgagatcggcccgcgcatggccgagttgagcggttcccggctggccgcgcagcaacagatggaaggcctcctggcgccgcaccggcccaaggagcccgcgtggttcctggccaccgtcggcgtctcgcccgaccaccagggcaagggtctgggcagcgccgtcgtgctccccggagtggaggcggccgagcgcgccggggtgcccgccttcctggagacctccgcgccccgcaacctccccttctacgagcggctcggcttcaccgtcaccgccgacgtcgaggtgcccgaaggaccgcgcacctggtgcatgacccgcaagcccggtgcctga

SEQ ID NO: 17834 - DNA, 2460 bp, synthetic construct
  source 1..2460: mol_type = other DNA
atggccttaccagtgaccgccttgctcctgccgctggccttgctgctccacgccgccaggccgctcgagatccagaaccctgatcctgccgtgtaccagctgcgggatagcaagagcagcgacaagagcgtgtgtctgttcaccgacttcgacagccagaccaacgtgtcccagagcaaggactccgacgtgtacatcaccgataagaccgtgctggacatgcggagcatggacttcaagagcaactccgccgtggcctggtccaacaagtccgatttcgcctgcgccaacgccttcaacaacagcattatccccgaggacacattcttcccaagccccgagagcagctgcggctttaccagcgagagctaccagcagggcgtgctgagcgccaccatcctgtacgagatcctgctgggcaaggccaccctgtacgccgtgctggtgtctgccctggtgctgatggctatggtcaagcggaaggacagccggggaagggccaagcgatctggatctggagcaacaaacttctcactactcaaacaagcaggtgacgtggaggagaatcccgggcctactagcatggcccttccagtcactgccttgctgttgcctctggcgctcctgctccacgccgctagaccgggcatgagaaccgaggacctgcctaaggccgtggtgttcctggaaccccagtggtacagagtgctggaaaaggacagcgtgaccctgaagtgccagggcgcctacagccccgaggacaatagcacccagtggttccacaacgagagcctgatctccagccaggccagcagctacttcatcgacgccgccaccgtggacgacagcggcgagtatagatgccagaccaacctgagcaccctgagcgaccccgtgcagctggaagtgcacatcggatggctgctgctgcaggcccccagatgggtgttcaaagaagaggaccccatccacctgagatgccactcttggaagaacaccgccctgcacaaagtgacctacctgcagaacggcaagggcagaaagtacttccaccacaacagcgacttctacatccccaaggccaccctgaaggactccggctcctacttctgcagaggcctcgtgggcagcaagaacgtgtccagcgagacagtgaacatcaccatcacccagggcctggccgtgtctaccatcagcagctttttcccacccggctaccagacgcgtgaggacctgaagaacgtgttcccacctgaggtggccgtgttcgagcctagcgaggccgagatcagccacacccagaaagccaccctcgtgtgcctggctaccggcttctaccccgaccatgtggaactgtcttggtgggtcaacggcaaagaggtgcacagcggcgtgtctaccgacccccagccactgaaagaacagcccgccctgaacgacagccggtactgcctgagcagcagactgagagtgtccgccaccttctggcagaacccccggaaccacttcagatgccaggtgcagttctacggcctgagcgagaacgacgagtggacccaggacagagccaagcccgtgacccagatcgtgtctgccgaagcctggggcagagccgattgcgacgtgaagctggtggaaaagagcttcgagacagacaccaacctgaacttccagaacctgagcgtgatcggcttcagaatcctgctgctgaaagtggccggctttaacctgctgatgaccctgcggctgtggtccagccgcgccaagagaagcggatctggcgtgaagcagaccctgaatttcgacctgctgaagctggctggcgacgtggaatccaacccaggcccttctagaggccatatgaccgagtacaagcccacggtgcgcctcgccacccgcgacgacgtccccagggccgtacgcaccctcgccgccgcgttcgccgactaccccgccacgcgccacaccgtcgatccggaccgccacatcgagcgggtcaccgagctgcaagaactcttcctcacgcgcgtcgggctcgacatcggcaaggtgtgggtcgcggacgacggcgccgcggtggcggtctggaccacgccggagagcgtcgaagcgggggcggtgttcgccgagatcggcccgcgcatggccgagttgagcggttcccggctggccgcgcagcaacagatggaaggcctcctggcgccgcaccggcccaaggagcccgcgtggttcctggccaccgtcggcgtctcgcccgaccaccagggcaagggtctgggcagcgccgtcgtgctccccggagtggaggcggccgagcgcgccggggtgcccgccttcctggagacctccgcgccccgcaacctccccttctacgagcggctcggcttcaccgtcaccgccgacgtcgaggtgcccgaaggaccgcgcacctggtgcatgacccgcaagcccggtgcctga

SEQ ID NO: 17835 - DNA, 1341 bp, synthetic construct
  source 1..1341: mol_type = other DNA
atggccttaccagtgaccgccttgctcctgccgctggccttgctgctccacgccgccaggccgctcgagatccagaaccctgatcctgccgtgtaccagctgcgggatagcaagagcagcgacaagagcgtgtgtctgttcaccgacttcgacagccagaccaacgtgtcccagagcaaggactccgacgtgtacatcaccgataagaccgtgctggacatgcggagcatggacttcaagagcaactccgccgtggcctggtccaacaagtccgatttcgcctgcgccaacgccttcaacaacagcattatccccgaggacacattcttcccaagccccgagagcagctgcggctttaccagcgagagctaccagcagggcgtgctgagcgccaccatcctgtacgagatcctgctgggcaaggccaccctgtacgccgtgctggtgtctgccctggtgctgatggctatggtcaagcggaaggacagccggggaagggccaagcgatctggatctggagcaacaaacttctcactactcaaacaagcaggtgacgtggaggagaatcccgggcctactagcgccaccatggccttaccagtgaccgccttgctcctgccgctggccttgctgctccacgccgccaggccgatggaccccgacctggaaatcagagccgccttcctgcggcagagaaacacagccctgagaacagaggtggccgagctggaacaagaggtgcagcggctggaaaacgaggtgtcccagtacgagacaagatacggccctctcggaggcggaaaaacgcgtgaggacctgaagaacgtgttcccacctgaggtggccgtgttcgagcctagcgaggccgagatcagccacacccagaaagccaccctcgtgtgcctggctaccggcttctaccccgaccatgtggaactgtcttggtgggtcaacggcaaagaggtgcacagcggcgtgtctaccgacccccagccactgaaagaacagcccgccctgaacgacagccggtactgcctgagcagcagactgagagtgtccgccaccttctggcagaacccccggaaccacttcagatgccaggtgcagttctacggcctgagcgagaacgacgagtggacccaggacagagccaagcccgtgacccagatcgtgtctgccgaagcctggggcagagccgattgcgacgtgaagctggtggaaaagagcttcgagacagacaccaacctgaacttccagaacctgagcgtgatcggcttcagaatcctgctgctgaaagtggccggctttaacctgctgatgaccctgcggctgtggtccagc

SEQ ID NO: 17836 - DNA, 1341 bp, synthetic construct
  source 1..1341: mol_type = other DNA
atggccttaccagtgaccgccttgctcctgccgctggccttgctgctccacgccgccaggccgctcgagatccagaaccctgatcctgccgtgtaccagctgcgggatagcaagagcagcgacaagagcgtgtgtctgttcaccgacttcgacagccagaccaacgtgtcccagagcaaggactccgacgtgtacatcaccgataagaccgtgctggacatgcggagcatggacttcaagagcaactccgccgtggcctggtccaacaagtccgatttcgcctgcgccaacgccttcaacaacagcattatccccgaggacacattcttcccaagccccgagagcagctgcggctttaccagcgagagctaccagcagggcgtgctgagcgccaccatcctgtacgagatcctgctgggcaaggccaccctgtacgccgtgctggtgtctgccctggtgctgatggctatggtcaagcggaaggacagccggggaagggccaagcgatctggatctggagcaacaaacttctcactactcaaacaagcaggtgacgtggaggagaatcccgggcctactagcgccaccatggccttaccagtgaccgccttgctcctgccgctggccttgctgctccacgccgccaggccgatggaccctgatctcgaaattgaggccgcctttctggaacgcgagaacactgccctggaaaccagggtcgcagagctgagacagagagtgcagagactgcggaacagagtgtctcagtaccgcaccagatatggcccactcggcggaggtaaaacgcgtgaggacctgaagaacgtgttcccacctgaggtggccgtgttcgagcctagcgaggccgagatcagccacacccagaaagccaccctcgtgtgcctggctaccggcttctaccccgaccatgtggaactgtcttggtgggtcaacggcaaagaggtgcacagcggcgtgtctaccgacccccagccactgaaagaacagcccgccctgaacgacagccggtactgcctgagcagcagactgagagtgtccgccaccttctggcagaacccccggaaccacttcagatgccaggtgcagttctacggcctgagcgagaacgacgagtggacccaggacagagccaagcccgtgacccagatcgtgtctgccgaagcctggggcagagccgattgcgacgtgaagctggtggaaaagagcttcgagacagacaccaacctgaacttccagaacctgagcgtgatcggcttcagaatcctgctgctgaaagtggccggctttaacctgctgatgaccctgcggctgtggtccagc

SEQ ID NO: 17837 - DNA, 2046 bp, synthetic construct
  source 1..2046: mol_type = other DNA
atggccttaccagtgaccgccttgctcctgccgctggccttgctgctccacgccgccaggccgctcgagatccagaaccctgatcctgccgtgtaccagctgcgggatagcaagagcagcgacaagagcgtgtgtctgttcaccgacttcgacagccagaccaacgtgtcccagagcaaggactccgacgtgtacatcaccgataagaccgtgctggacatgcggagcatggacttcaagagcaactccgccgtggcctggtccaacaagtccgatttcgcctgcgccaacgccttcaacaacagcattatccccgaggacacattcttcccaagccccgagagcagctgcggctttaccagcgagagctaccagcagggcgtgctgagcgccaccatcctgtacgagatcctgctgggcaaggccaccctgtacgccgtgctggtgtctgccctggtgctgatggctatggtcaagcggaaggacagccggggaagggccaagcgatctggatctggagcaacaaacttctcactactcaaacaagcaggtgacgtggaggagaatcccgggcctactagcgccaccatggccttaccagtgaccgccttgctcctgccgctggccttgctgctccacgccgccaggccgctgttcaatcaagaggtgcagatccctctgaccgagagctactgtggcccctgtcctaagaactggatctgctacaagaacaactgctaccagttcttcgacgagagcaagaattggtacgagagccaggccagctgcatgagccagaatgccagcctgctgaaggtgtacagcaaagaggaccaggacctgctgaaactggtcaagagcgcccactggatgggccttgtgcacatccccaccaatggctcttggcagtgggaggacggcagcattctgagccctaacctgctgaccatcatcgagatgcagaagggcgactgcgccctgtacgccagcagctttaagggctacatcgagaattgcagcaccccgaacacctacatctgtatgcagagaaccgtttctggcggaggcggctctggaggaggcggaagtggcggcggaggcgacctctttaatcaagaagtccagattccactcaccgaatcctactgcggaccttgtccaaaaaattggatttgttataagaacaactgttatcaattctttgatgagtctaaaaattggtatgagtcccaggcttcctgcatgtctcagaacgcttctctgctgaaagtctactctaaagaagatcaggatctcctgaagctcgtcaagtctgcccattggatggggctcgtccacattcctaccaacggaagctggcaatgggaagatggctccatcctgtctccaaatctgctcacgattattgaaatgcagaaaggggattgtgctctctacgccagctccttcaagggatatattgagaactgtagcacgcccaatacttatatctgtatgcaacggaccgtgacgcgtgaggacctgaagaacgtgttcccacctgaggtggccgtgttcgagcctagcgaggccgagatcagccacacccagaaagccaccctcgtgtgcctggctaccggcttctaccccgaccatgtggaactgtcttggtgggtcaacggcaaagaggtgcacagcggcgtgtctaccgacccccagccactgaaagaacagcccgccctgaacgacagccggtactgcctgagcagcagactgagagtgtccgccaccttctggcagaacccccggaaccacttcagatgccaggtgcagttctacggcctgagcgagaacgacgagtggacccaggacagagccaagcccgtgacccagatcgtgtctgccgaagcctggggcagagccgattgcgacgtgaagctggtggaaaagagcttcgagacagacaccaacctgaacttccagaacctgagcgtgatcggcttcagaatcctgctgctgaaagtggccggctttaacctgctgatgaccctgcggctgtggtccagc

SEQ ID NO: 17838 - DNA, 2046 bp, synthetic construct
  source 1..2046: mol_type = other DNA
atggccttaccagtgaccgccttgctcctgccgctggccttgctgctccacgccgccaggccgctcgagatccagaaccctgatcctgccgtgtaccagctgcgggatagcaagagcagcgacaagagcgtgtgtctgttcaccgacttcgacagccagaccaacgtgtcccagagcaaggactccgacgtgtacatcaccgataagaccgtgctggacatgcggagcatggacttcaagagcaactccgccgtggcctggtccaacaagtccgatttcgcctgcgccaacgccttcaacaacagcattatccccgaggacacattcttcccaagccccgagagcagctgcggctttaccagcgagagctaccagcagggcgtgctgagcgccaccatcctgtacgagatcctgctgggcaaggccaccctgtacgccgtgctggtgtctgccctggtgctgatggctatggtcaagcggaaggacagccggggaagggccaagcgatctggatctggagcaacaaacttctcactactcaaacaagcaggtgacgtggaggagaatcccgggcctactagcgccaccatggccttaccagtgaccgccttgctcctgccgctggccttgctgctccacgccgccaggccgctgttcaatcaagaggtgcagatccctctgaccgagagctactgtggcccctgtcctaagaactggatctgctacaagaacaactgctaccagttcttcgacgagagcaagaattggtacgagagccaggccagctgcatgagccagaatgccagcctgctgaaggtgtacagcaaagaggaccaggacctgctgaaactggtcaagagcgcccactggatgggccttgtgcacatccccaccaatggctcttggcagtgggaggacggcagcattctgagccctaacctgctgaccatcatcgagatgcagaagggcgactgcgccctgtacgccagcagctttaagggcttcatcgagaattgcagcaccccgaacacctacatctgtatgcagagaaccgttggcggaggcggaagtggaggcggaggatctggcggcggaggctctgacctctttaatcaagaagtccagattccactcaccgaatcctactgcggaccttgtccaaaaaattggatttgttataagaacaactgttatcaattctttgatgagtctaaaaattggtatgagtcccaggcttcctgcatgtctcagaacgcttctctgctgaaagtctactctaaagaagatcaggatctcctgaagctcgtcaagtctgcccattggatggggctcgtccacattcctaccaacggaagctggcaatgggaagatggctccatcctgtctccaaatctgctcacgattattgaaatgcagaaaggggattgtgctctctacgccagctccttcaagggatttattgagaactgtagcacgcccaatacttatatctgtatgcaacggaccgtgacgcgtgaggacctgaagaacgtgttcccacctgaggtggccgtgttcgagcctagcgaggccgagatcagccacacccagaaagccaccctcgtgtgcctggctaccggcttctaccccgaccatgtggaactgtcttggtgggtcaacggcaaagaggtgcacagcggcgtgtctaccgacccccagccactgaaagaacagcccgccctgaacgacagccggtactgcctgagcagcagactgagagtgtccgccaccttctggcagaacccccggaaccacttcagatgccaggtgcagttctacggcctgagcgagaacgacgagtggacccaggacagagccaagcccgtgacccagatcgtgtctgccgaagcctggggcagagccgattgcgacgtgaagctggtggaaaagagcttcgagacagacaccaacctgaacttccagaacctgagcgtgatcggcttcagaatcctgctgctgaaagtggccggctttaacctgctgatgaccctgcggctgtggtccagc

SEQ ID NO: 17839 - DNA, 2124 bp, synthetic construct
  source 1..2124: mol_type = other DNA
atggccttaccagtgaccgccttgctcctgccgctggccttgctgctccacgccgccaggccgctcgagatccagaaccctgatcctgccgtgtaccagctgcgggatagcaagagcagcgacaagagcgtgtgtctgttcaccgacttcgacagccagaccaacgtgtcccagagcaaggactccgacgtgtacatcaccgataagaccgtgctggacatgcggagcatggacttcaagagcaactccgccgtggcctggtccaacaagtccgatttcgcctgcgccaacgccttcaacaacagcattatccccgaggacacattcttcccaagccccgagagcagctgcggctttaccagcgagagctaccagcagggcgtgctgagcgccaccatcctgtacgagatcctgctgggcaaggccaccctgtacgccgtgctggtgtctgccctggtgctgatggctatggtcaagcggaaggacagccggggaagggccaagcgatctggatctggagcaacaaacttctcactactcaaacaagcaggtgacgtggaggagaatcccgggcctactagcatggccttaccagtgaccgccttgctcctgccgctggccttgctgctccacgccgccaggccgatggaccccgacctggaaatcagagccgccttcctgcggcagagaaacacagccctgagaacagaggtggccgagctggaacaagaggtgcagcggctggaaaacgaggtgtcccagtacgagacaagatacggccctctcggaggcggaaaaggtaccggcggaggcggatctggcggcggaggtagcggtggcggaggatctgaattcgacatccagatgacacagagccctagcagcctgtctgccagcgtgggagacagagtgaccatcacatgcaaggccagcgaccacatcaacaactggctggcctggtatcagcagaagcctggacaggcccctaagctgctgatctacggcgctaccacactggaaacaggcgtgcccagcagattttctggcagcggctctggcaccgactacaccctgacaatatccagcctccagcctgaggacttcgccacctactactgtcagcagagctggaacaccccttggacattcggccagggcaccaagctggaaatcaagagaggcggaggcggaagtggaggcggaggatctggcggcggaggctctcaagttcagcttcaacagcctggcgctgagctggtcaaacctggcgcttctgtgaagatgagctgcaaagccagcggctacgccttcagcagctactggatcaactggatgaagcagaaacccggccagggactcgaatggatcggccaaatctatcccggcgacggcgacaccaactacaacggcaagttcaagggcagagccacactgaccgccgatacctctagcagcacagcctacatgcagctgagcagcctgaccagcgaagatagcgccgtgtacttctgtgcccggtccatcacaacagtcgtgggctgcgctatggactattggggccagggaacaagcgtgaccgtgtctagtacgcgtgaggacctgaagaacgtgttcccacctgaggtggccgtgttcgagcctagcgaggccgagatcagccacacccagaaagccaccctcgtgtgcctggctaccggcttctaccccgaccatgtggaactgtcttggtgggtcaacggcaaagaggtgcacagcggcgtgtctaccgacccccagccactgaaagaacagcccgccctgaacgacagccggtactgcctgagcagcagactgagagtgtccgccaccttctggcagaacccccggaaccacttcagatgccaggtgcagttctacggcctgagcgagaacgacgagtggacccaggacagagccaagcccgtgacccagatcgtgtctgccgaagcctggggcagagccgattgcgacgtgaagctggtggaaaagagcttcgagacagacaccaacctgaacttccagaacctgagcgtgatcggcttcagaatcctgctgctgaaagtggccggctttaacctgctgatgaccctgcggctgtggtccagc

SEQ ID NO: 17840 - DNA, 2829 bp, synthetic construct
  source 1..2829: mol_type = other DNA
atggccttaccagtgaccgccttgctcctgccgctggccttgctgctccacgccgccaggccgctcgagatccagaaccctgatcctgccgtgtaccagctgcgggatagcaagagcagcgacaagagcgtgtgtctgttcaccgacttcgacagccagaccaacgtgtcccagagcaaggactccgacgtgtacatcaccgataagaccgtgctggacatgcggagcatggacttcaagagcaactccgccgtggcctggtccaacaagtccgatttcgcctgcgccaacgccttcaacaacagcattatccccgaggacacattcttcccaagccccgagagcagctgcggctttaccagcgagagctaccagcagggcgtgctgagcgccaccatcctgtacgagatcctgctgggcaaggccaccctgtacgccgtgctggtgtctgccctggtgctgatggctatggtcaagcggaaggacagccggggaagggccaagcgatctggatctggagcaacaaacttctcactactcaaacaagcaggtgacgtggaggagaatcccgggcctactagcatggccttaccagtgaccgccttgctcctgccgctggccttgctgctccacgccgccaggccgctgttcaatcaagaggtgcagatccctctgaccgagagctactgtggcccctgtcctaagaactggatctgctacaagaacaactgctaccagttcttcgacgagagcaagaattggtacgagagccaggccagctgcatgagccagaatgccagcctgctgaaggtgtacagcaaagaggaccaggacctgctgaaactggtcaagagcgcccactggatgggccttgtgcacatccccaccaatggctcttggcagtgggaggacggcagcattctgagccctaacctgctgaccatcatcgagatgcagaagggcgactgcgccctgtacgccagcagctttaagggcttcatcgagaattgcagcaccccgaacacctacatctgtatgcagagaaccgttggcggaggcggaagtggaggcggaggatctggcggcggaggctctgacctctttaatcaagaagtccagattccactcaccgaatcctactgcggaccttgtccaaaaaattggatttgttataagaacaactgttatcaattctttgatgagtctaaaaattggtatgagtcccaggcttcctgcatgtctcagaacgcttctctgctgaaagtctactctaaagaagatcaggatctcctgaagctcgtcaagtctgcccattggatggggctcgtccacattcctaccaacggaagctggcaatgggaagatggctccatcctgtctccaaatctgctcacgattattgaaatgcagaaaggggattgtgctctctacgccagctccttcaagggatttattgagaactgtagcacgcccaatacttatatctgtatgcaacggaccgtgggtaccggcggaggcggatctggcggcggaggtagcggtggcggaggatctgaattcgacatccagatgacacagagccctagcagcctgtctgccagcgtgggagacagagtgaccatcacatgcaaggccagcgaccacatcaacaactggctggcctggtatcagcagaagcctggacaggcccctaagctgctgatctacggcgctaccacactggaaacaggcgtgcccagcagattttctggcagcggctctggcaccgactacaccctgacaatatccagcctccagcctgaggacttcgccacctactactgtcagcagagctggaacaccccttggacattcggccagggcaccaagctggaaatcaagagaggcggaggcggaagtggaggcggaggatctggcggcggaggctctcaagttcagcttcaacagcctggcgctgagctggtcaaacctggcgcttctgtgaagatgagctgcaaagccagcggctacgccttcagcagctactggatcaactggatgaagcagaaacccggccagggactcgaatggatcggccaaatctatcccggcgacggcgacaccaactacaacggcaagttcaagggcagagccacactgaccgccgatacctctagcagcacagcctacatgcagctgagcagcctgaccagcgaagatagcgccgtgtacttctgtgcccggtccatcacaacagtcgtgggctgcgctatggactattggggccagggaacaagcgtgaccgtgtctagtacgcgtgaggacctgaagaacgtgttcccacctgaggtggccgtgttcgagcctagcgaggccgagatcagccacacccagaaagccaccctcgtgtgcctggctaccggcttctaccccgaccatgtggaactgtcttggtgggtcaacggcaaagaggtgcacagcggcgtgtctaccgacccccagccactgaaagaacagcccgccctgaacgacagccggtactgcctgagcagcagactgagagtgtccgccaccttctggcagaacccccggaaccacttcagatgccaggtgcagttctacggcctgagcgagaacgacgagtggacccaggacagagccaagcccgtgacccagatcgtgtctgccgaagcctggggcagagccgattgcgacgtgaagctggtggaaaagagcttcgagacagacaccaacctgaacttccagaacctgagcgtgatcggcttcagaatcctgctgctgaaagtggccggctttaacctgctgatgaccctgcggctgtggtccagc

SEQ ID NO: 17841 - DNA, 1944 bp, synthetic construct
  source 1..1944: mol_type = other DNA
atggccttaccagtgaccgccttgctcctgccgctggccttgctgctccacgccgccaggccgctcgagatccagaaccctgatcctgccgtgtaccagctgcgggatagcaagagcagcgacaagagcgtgtgtctgttcaccgacttcgacagccagaccaacgtgtcccagagcaaggactccgacgtgtacatcaccgataagaccgtgctggacatgcggagcatggacttcaagagcaactccgccgtggcctggtccaacaagtccgatttcgcctgcgccaacgccttcaacaacagcattatccccgaggacacattcttcccaagccccgagagcagctgcggctttaccagcgagagctaccagcagggcgtgctgagcgccaccatcctgtacgagatcctgctgggcaaggccaccctgtacgccgtgctggtgtctgccctggtgctgatggctatggtcaagcggaaggacagccggggaagggccaagcgatctggatctggagcaacaaacttctcactactcaaacaagcaggtgacgtggaggagaatcccgggcctactagcatggccttaccagtgaccgccttgctcctgccgctggccttgctgctccacgccgccaggccgcagtctgtgctgacacagcctcctagtgtgtctggcgctcctggacagagagtgaccatctcttgtaccggcagcagcagcaatatcggagccggctatgacgtgcactggtatcagcagctccctggcacagcccctaaactgctgatcttcggcaacagcaacagacccagcggcgtgcccgatagattcagcggctttaagagcggcacaagcgccagcctggctatcactggactgcaagccgaggacgaggccgactacttctgccagagctacgatagcagcctgagcggcagcggagtgtttggcacaggcaccaaagtgacagtgcttggcggcggaggcggaagtggaggcggaggatctggcggcggaggctctcaaatgcaactggttcaaagcggcggtggcctggtgcaacctggaagaagtctgagactgagctgtgccgccagcggcttcaccttcgatgattacgccatgcactgggtccgacaggcccctggaaaaggactggaatgggtgtccggcatctcctggaatagcggctctatcggctacgccgacagcgtgaagggcagattcaccatcagccgggacaacgccaagaacagcctgtacctccagatgaactccctgagagccgaggatacagccctgtactactgcgccaaggacatccacagcggcagctactacggcctgctgtactacgctatggacgtgtggggccagggcacaaccgtgacagtttcttctacgcgtgaggacctgaagaacgtgttcccacctgaggtggccgtgttcgagcctagcgaggccgagatcagccacacccagaaagccaccctcgtgtgcctggctaccggcttctaccccgaccatgtggaactgtcttggtgggtcaacggcaaagaggtgcacagcggcgtgtctaccgacccccagccactgaaagaacagcccgccctgaacgacagccggtactgcctgagcagcagactgagagtgtccgccaccttctggcagaacccccggaaccacttcagatgccaggtgcagttctacggcctgagcgagaacgacgagtggacccaggacagagccaagcccgtgacccagatcgtgtctgccgaagcctggggcagagccgattgcgacgtgaagctggtggaaaagagcttcgagacagacaccaacctgaacttccagaacctgagcgtgatcggcttcagaatcctgctgctgaaagtggccggctttaacctgctgatgaccctgcggctgtggtccagc

SEQ ID NO: 17842 - DNA, 1455 bp, synthetic construct
  source 1..1455: mol_type = other DNA
atggccttaccagtgaccgccttgctcctgccgctggccttgctgctccacgccgccaggccgctcgagatccagaaccctgatcctgccgtgtaccagctgcgggatagcaagagcagcgacaagagcgtgtgtctgttcaccgacttcgacagccagaccaacgtgtcccagagcaaggactccgacgtgtacatcaccgataagaccgtgctggacatgcggagcatggacttcaagagcaactccgccgtggcctggtccaacaagtccgatttcgcctgcgccaacgccttcaacaacagcattatccccgaggacacattcttcccaagccccgagagcagctgcggctttaccagcgagagctaccagcagggcgtgctgagcgccaccatcctgtacgagatcctgctgggcaaggccaccctgtacgccgtgctggtgtctgccctggtgctgatggctatggtcaagcggaaggacagccggggaagggccaagcgatctggatctggagcaacaaacttctcactactcaaacaagcaggtgacgtggaggagaatcccgggcctactagcatggccttaccagtgaccgccttgctcctgccgctggccttgctgctccacgccgccaggccgatgtgtatgccctgcttcaccaccgaccatcagatggcccggaagtgcgacgattgctgtggcggaaaaggcagaggcaagtgctacggccctcagtgcttgtgtagactcgagggcggaggcggaagtggaggcggaggatctggcggcggaggctctttcgaagtgtgtatgccttgttttaccacggatcaacaaatggctcgcaagtgttctgactgctgcggaggcaaaggccggggaaagtgttatggcccacagtgtctgtgccggacgcgtgaggacctgaagaacgtgttcccacctgaggtggccgtgttcgagcctagcgaggccgagatcagccacacccagaaagccaccctcgtgtgcctggctaccggcttctaccccgaccatgtggaactgtcttggtgggtcaacggcaaagaggtgcacagcggcgtgtctaccgacccccagccactgaaagaacagcccgccctgaacgacagccggtactgcctgagcagcagactgagagtgtccgccaccttctggcagaacccccggaaccacttcagatgccaggtgcagttctacggcctgagcgagaacgacgagtggacccaggacagagccaagcccgtgacccagatcgtgtctgccgaagcctggggcagagccgattgcgacgtgaagctggtggaaaagagcttcgagacagacaccaacctgaacttccagaacctgagcgtgatcggcttcagaatcctgctgctgaaagtggccggctttaacctgctgatgaccctgcggctgtggtccagc

SEQ ID NO: 17843 - DNA, 2085 bp, synthetic construct
  source 1..2085: mol_type = other DNA
atggccttaccagtgaccgccttgctcctgccgctggccttgctgctccacgccgccaggccgctcgagatccagaaccctgatcctgccgtgtaccagctgcgggatagcaagagcagcgacaagagcgtgtgtctgttcaccgacttcgacagccagaccaacgtgtcccagagcaaggactccgacgtgtacatcaccgataagaccgtgctggacatgcggagcatggacttcaagagcaactccgccgtggcctggtccaacaagtccgatttcgcctgcgccaacgccttcaacaacagcattatccccgaggacacattcttcccaagccccgagagcagctgcggctttaccagcgagagctaccagcagggcgtgctgagcgccaccatcctgtacgagatcctgctgggcaaggccaccctgtacgccgtgctggtgtctgccctggtgctgatggctatggtcaagcggaaggacagccggggaagggccaagcgatctggatctggagcaacaaacttctcactactcaaacaagcaggtgacgtggaggagaatcccgggcctactagcatggccttaccagtgaccgccttgctcctgccgctggccttgctgctccacgccgccaggccgttcgaagtgtgtatgccttgttttaccacggatcaacaaatggctcgcaagtgttctgactgctgcggaggcaaaggccggggaaagtgttatggcccacagtgtctgtgccggggtaccggcggaggcggatctggcggcggaggtagcggtggcggaggatctgaattcgacatccagatgacacagagccctagcagcctgtctgccagcgtgggagacagagtgaccatcacatgcaaggccagcgaccacatcaacaactggctggcctggtatcagcagaagcctggacaggcccctaagctgctgatctacggcgctaccacactggaaacaggcgtgcccagcagattttctggcagcggctctggcaccgactacaccctgacaatatccagcctccagcctgaggacttcgccacctactactgtcagcagagctggaacaccccttggacattcggccagggcaccaagctggaaatcaagagaggcggaggcggaagtggaggcggaggatctggcggcggaggctctcaagttcagcttcaacagcctggcgctgagctggtcaaacctggcgcttctgtgaagatgagctgcaaagccagcggctacgccttcagcagctactggatcaactggatgaagcagaaacccggccagggactcgaatggatcggccaaatctatcccggcgacggcgacaccaactacaacggcaagttcaagggcagagccacactgaccgccgatacctctagcagcacagcctacatgcagctgagcagcctgaccagcgaagatagcgccgtgtacttctgtgcccggtccatcacaacagtcgtgggctgcgctatggactattggggccagggaacaagcgtgaccgtgtctagtacgcgtgaggacctgaagaacgtgttcccacctgaggtggccgtgttcgagcctagcgaggccgagatcagccacacccagaaagccaccctcgtgtgcctggctaccggcttctaccccgaccatgtggaactgtcttggtgggtcaacggcaaagaggtgcacagcggcgtgtctaccgacccccagccactgaaagaacagcccgccctgaacgacagccggtactgcctgagcagcagactgagagtgtccgccaccttctggcagaacccccggaaccacttcagatgccaggtgcagttctacggcctgagcgagaacgacgagtggacccaggacagagccaagcccgtgacccagatcgtgtctgccgaagcctggggcagagccgattgcgacgtgaagctggtggaaaagagcttcgagacagacaccaacctgaacttccagaacctgagcgtgatcggcttcagaatcctgctgctgaaagtggccggctttaacctgctgatgaccctgcggctgtggtccagc

SEQ ID NO: 17844 - DNA, 2475 bp, synthetic construct
  source 1..2475: mol_type = other DNA
atggccttaccagtgaccgccttgctcctgccgctggccttgctgctccacgccgccaggccgctcgagatccagaaccctgatcctgccgtgtaccagctgcgggatagcaagagcagcgacaagagcgtgtgtctgttcaccgacttcgacagccagaccaacgtgtcccagagcaaggactccgacgtgtacatcaccgataagaccgtgctggacatgcggagcatggacttcaagagcaactccgccgtggcctggtccaacaagtccgatttcgcctgcgccaacgccttcaacaacagcattatccccgaggacacattcttcccaagccccgagagcagctgcggctttaccagcgagagctaccagcagggcgtgctgagcgccaccatcctgtacgagatcctgctgggcaaggccaccctgtacgccgtgctggtgtctgccctggtgctgatggctatggtcaagcggaaggacagccggggaagggccaagcgatctggatctggagcaacaaacttctcactactcaaacaagcaggtgacgtggaggagaatcccgggcctactagcatggccttaccagtgaccgccttgctcctgccgctggccttgctgctccacgccgccaggccgttcgaaagccccgtagctcctgcctgtgaccccagactcctaaataaactgctgcgtgactcccacctccttcacagccgactgagtcagtgtcccgacgtggaccctttgtctatccctgttctgctgcctgctgtggactttagcctgggagaatggaaaacccagacggaacagagcaaggcacaggacattctaggggcagtgtcccttctactggagggagtgatggcagcacgaggacagttggaaccctcctgcctctcatccctcctgggacagctttctgggcaggttcgcctcctcttgggggccctgcagggcctcctaggaacccagcttcctctacagggcaggaccacagctcacaaggaccccaatgccctcttcttgagcttgcaacaactgcttcggggaaaggtgcgcttcctgcttctggtagaaggtcccaccctctgtgtcagacggaccctgccaaccacagctgtcccaagcagtacttctggtaccggcggaggcggatctggcggcggaggtagcggtggcggaggatctgaattcgacatccagatgacacagagccctagcagcctgtctgccagcgtgggagacagagtgaccatcacatgcaaggccagcgaccacatcaacaactggctggcctggtatcagcagaagcctggacaggcccctaagctgctgatctacggcgctaccacactggaaacaggcgtgcccagcagattttctggcagcggctctggcaccgactacaccctgacaatatccagcctccagcctgaggacttcgccacctactactgtcagcagagctggaacaccccttggacattcggccagggcaccaagctggaaatcaagagaggcggaggcggaagtggaggcggaggatctggcggcggaggctctcaagttcagcttcaacagcctggcgctgagctggtcaaacctggcgcttctgtgaagatgagctgcaaagccagcggctacgccttcagcagctactggatcaactggatgaagcagaaacccggccagggactcgaatggatcggccaaatctatcccggcgacggcgacaccaactacaacggcaagttcaagggcagagccacactgaccgccgatacctctagcagcacagcctacatgcagctgagcagcctgaccagcgaagatagcgccgtgtacttctgtgcccggtccatcacaacagtcgtgggctgcgctatggactattggggccagggaacaagcgtgaccgtgtctagtacgcgtgaggacctgaagaacgtgttcccacctgaggtggccgtgttcgagcctagcgaggccgagatcagccacacccagaaagccaccctcgtgtgcctggctaccggcttctaccccgaccatgtggaactgtcttggtgggtcaacggcaaagaggtgcacagcggcgtgtctaccgacccccagccactgaaagaacagcccgccctgaacgacagccggtactgcctgagcagcagactgagagtgtccgccaccttctggcagaacccccggaaccacttcagatgccaggtgcagttctacggcctgagcgagaacgacgagtggacccaggacagagccaagcccgtgacccagatcgtgtctgccgaagcctggggcagagccgattgcgacgtgaagctggtggaaaagagcttcgagacagacaccaacctgaacttccagaacctgagcgtgatcggcttcagaatcctgctgctgaaagtggccggctttaacctgctgatgaccctgcggctgtggtccagc

SEQ ID NO: 17845 - DNA, 2196 bp, synthetic construct
  source 1..2196: mol_type = other DNA
atggccttaccagtgaccgccttgctcctgccgctggccttgctgctccacgccgccaggccgctcgagatccagaaccctgatcctgccgtgtaccagctgcgggatagcaagagcagcgacaagagcgtgtgtctgttcaccgacttcgacagccagaccaacgtgtcccagagcaaggactccgacgtgtacatcaccgataagaccgtgctggacatgcggagcatggacttcaagagcaactccgccgtggcctggtccaacaagtccgatttcgcctgcgccaacgccttcaacaacagcattatccccgaggacacattcttcccaagccccgagagcagctgcggctttaccagcgagagctaccagcagggcgtgctgagcgccaccatcctgtacgagatcctgctgggcaaggccaccctgtacgccgtgctggtgtctgccctggtgctgatggctatggtcaagcggaaggacagccggggaagggccaagcgatctggatctggagcaacaaacttctcactactcaaacaagcaggtgacgtggaggagaatcccgggcctactagcatggccttaccagtgaccgccttgctcctgccgctggccttgctgctccacgccgccaggccgttcgaaatgggcagctgggaagagttcgagctgagactgaacgccatcgaggaacggctgtatgccctcggaggatctgaagccgagctggcctacttcgagtacgtgatcgccgacttcgagggcaacctgcagcggtacaaaggcaagggcaaccctgaagtggaagccctgtacttcgaggccgacgccatcttcgaggaactggtggcctacagacacaacggtaccggcggaggcggatctggcggcggaggtagcggtggcggaggatctgaattcgacatccagatgacacagagccctagcagcctgtctgccagcgtgggagacagagtgaccatcacatgcaaggccagcgaccacatcaacaactggctggcctggtatcagcagaagcctggacaggcccctaagctgctgatctacggcgctaccacactggaaacaggcgtgcccagcagattttctggcagcggctctggcaccgactacaccctgacaatatccagcctccagcctgaggacttcgccacctactactgtcagcagagctggaacaccccttggacattcggccagggcaccaagctggaaatcaagagaggcggaggcggaagtggaggcggaggatctggcggcggaggctctcaagttcagcttcaacagcctggcgctgagctggtcaaacctggcgcttctgtgaagatgagctgcaaagccagcggctacgccttcagcagctactggatcaactggatgaagcagaaacccggccagggactcgaatggatcggccaaatctatcccggcgacggcgacaccaactacaacggcaagttcaagggcagagccacactgaccgccgatacctctagcagcacagcctacatgcagctgagcagcctgaccagcgaagatagcgccgtgtacttctgtgcccggtccatcacaacagtcgtgggctgcgctatggactattggggccagggaacaagcgtgaccgtgtctagtacgcgtgaggacctgaagaacgtgttcccacctgaggtggccgtgttcgagcctagcgaggccgagatcagccacacccagaaagccaccctcgtgtgcctggctaccggcttctaccccgaccatgtggaactgtcttggtgggtcaacggcaaagaggtgcacagcggcgtgtctaccgacccccagccactgaaagaacagcccgccctgaacgacagccggtactgcctgagcagcagactgagagtgtccgccaccttctggcagaacccccggaaccacttcagatgccaggtgcagttctacggcctgagcgagaacgacgagtggacccaggacagagccaagcccgtgacccagatcgtgtctgccgaagcctggggcagagccgattgcgacgtgaagctggtggaaaagagcttcgagacagacaccaacctgaacttccagaacctgagcgtgatcggcttcagaatcctgctgctgaaagtggccggctttaacctgctgatgaccctgcggctgtggtccagc

SEQ ID NO: 17846 - DNA, 2922 bp, synthetic construct
  source 1..2922: mol_type = other DNA
atggccttaccagtgaccgccttgctcctgccgctggccttgctgctccacgccgccaggccgctcgaggaggacctgaagaacgtgttcccacctgaggtggccgtgttcgagcctagcgaggccgagatcagccacacccagaaagccaccctcgtgtgcctggctaccggcttctaccccgaccatgtggaactgtcttggtgggtcaacggcaaagaggtgcacagcggcgtgtgtaccgacccccagccactgaaagaacagcccgccctgaacgacagccggtactgcctgagcagcagactgagagtgtccgccaccttctggcagaacccccggaaccacttcagatgccaggtgcagttctacggcctgagcgagaacgacgagtggacccaggacagagccaagcccgtgacccagatcgtgtctgccgaagcctggggcagagccgatgatgtgattaagatccactggcaggaaaagaagtccaacaccatcctgggcagccaggaaggcaacaccatgaagaccaacgacacctacatgaagttcagctggctgaccgtgcccgagaagtccctggacaaagaacacagatgcatcgtgcggcacgaaaacaacaagaacggcgtggaccaggaaatcatcttcccacccatcaagaccgatgtgattacaatggaccccaaggacaactgctccaaggacgccaacgataccctgctgctccagctgaccaacaccagcgcctactacatgtacttgttgctgctgctgaagtccgtggtgtacttcgccatcatcacatgctgcctgctgatggctatggtcaagcggaaggacagccggggaagggccaagcgatctggatctggagcaacaaacttctcactactcaaacaagcaggtgacgtggaggagaatcccgggcctactagcatggccttaccagtgaccgccttgctcctgccgctggccttgctgctccacgccgccaggccggacatccagatgacacagactacatcctccctgtctgcctctctgggagacagagtcaccatcagttgcagggcaagtcaggacattagtaaatatttaaattggtatcagcagaaaccagatggaactgttaaactcctgatctaccatacatcaagattacactcaggagtcccatcaaggttcagtggcagtgggtctggaacagattattctctcaccattagcaacctggagcaagaagatattgccacttacttttgccaacagggtaatacgcttccgtacacgttcggaggggggaccaagctggagatcacaggtggcggtggctcgggcggtggtgggtcgggtggcggcggatctgaggtgaaactgcaggagtcaggacctggcctggtggcgccctcacagagcctgtccgtcacatgcactgtctcaggggtctcattacccgactatggtgtaagctggattcgccagcctccacgaaagggtctggagtggctgggagtaatatggggtagtgaaaccacatactataattcagctctcaaatccagactgaccatcatcaaggacaactccaagagccaagttttcttaaaaatgaacagtctgcaaactgatgacacagccatttactactgtgccaaacattattactacggtggtagctatgctatggactactggggtcaaggaacctcagtcaccgtctcctcaacgcgtatccagaaccctgatcctgccgtgtaccagctgcgggatagcaagagcagcgacaagagcgtgtgtctgttcaccgacttcgacagccagaccaacgtgtcccagagcaaggactccgacgtgtacatcaccgataagtgcgtgctggacatgcggagcatggacttcaagagcaactccgccgtggcctggtccaacaagtccgatttcgcctgcgccaacgccttcaacaacagcattatccccgaggacacattcttcccaagccccgagagcagcgactccaccgaccacgtgaagcccaaagagacagagaacaccaagcagcccagcaagagctgccacaagcccaaggccatcgtgcacaccgagaaagtgaacatgatgagcctgaccgtgctgggcctgcggatgctgttcgccaaaaccgtggccgtgaacttcctgctgaccgccaagctgttcttcctcctcaccgcccgcgccaagagaagcggatctggcgtgaagcagaccctgaatttcgacctgctgaagctggctggcgacgtggaatccaacccaggcccttctagaggccatatgaccgagtacaagcccacggtgcgcctcgccacccgcgacgacgtccccagggccgtacgcaccctcgccgccgcgttcgccgactaccccgccacgcgccacaccgtcgatccggaccgccacatcgagcgggtcaccgagctgcaagaactcttcctcacgcgcgtcgggctcgacatcggcaaggtgtgggtcgcggacgacggcgccgcggtggcggtctggaccacgccggagagcgtcgaagcgggggcggtgttcgccgagatcggcccgcgcatggccgagttgagcggttcccggctggccgcgcagcaacagatggaaggcctcctggcgccgcaccggcccaaggagcccgcgtggttcctggccaccgtcggcgtctcgcccgaccaccagggcaagggtctgggcagcgccgtcgtgctccccggagtggaggcggccgagcgcgccggggtgcccgccttcctggagacctccgcgccccgcaacctccccttctacgagcggctcggcttcaccgtcaccgccgacgtcgaggtgcccgaaggaccgcgcacctggtgcatgacccgcaagcccggtgcctga

SEQ ID NO: 17847 - DNA, 2925 bp, synthetic construct
  source 1..2925: mol_type = other DNA
atggccttaccagtgaccgccttgctcctgccgctggccttgctgctccacgccgccaggccgctcgaggaggacctgaagaacgtgttcccacctgaggtggccgtgttcgagcctagcgaggccgagatcagccacacccagaaagccaccctcgtgtgcctggctaccggcttctaccccgaccatgtggaactgtcttggtgggtcaacggcaaagaggtgcacagcggcgtgtgtaccgacccccagccactgaaagaacagcccgccctgaacgacagccggtactgcctgagcagcagactgagagtgtccgccaccttctggcagaacccccggaaccacttcagatgccaggtgcagttctacggcctgagcgagaacgacgagtggacccaggacagagccaagcccgtgacccagatcgtgtctgccgaagcctggggcagagccgatgatgtgattaagatccactggcaggaaaagaagtccaacaccatcctgggcagccaggaaggcaacaccatgaagaccaacgacacctacatgaagttcagctggctgaccgtgcccgagaagtccctggacaaagaacacagatgcatcgtgcggcacgaaaacaacaagaacggcgtggaccaggaaatcatcttcccacccatcaagaccgatgtgattacaatggaccccaaggacaactgctccaaggacgccaacgataccctgctgctccagctgaccaacaccagcgcctactacatgtacttgttgctgctgctgaagtccgtggtgtacttcgccatcatcacatgctgcctgctgatggctatggtcaagcggaaggacagccggggaagggccaagcgatctggatctggagcaacaaacttctcactactcaaacaagcaggtgacgtggaggagaatcccgggcctactagcaccatggccttaccagtgaccgccttgctcctgccgctggccttgctgctccacgccgccaggccggagatcgtgatgacccagagccctgccaccctgtctctgagccctggcgaaagagccaccctgagctgtagagccagccaggacatcagcaagtacctgaactggtatcagcagaagcccggccaggcccccagactgctgatctaccacaccagcagactgcacagcggcatccccgccagattttctggctctggcagcggcaccgactacaccctgacaatcagcagcctccagcccgaggacttcgccgtgtacttctgtcagcaaggcaacaccctgccctacaccttcggccagggcaccaagctggaaatcaagggcggaggcggaagtggaggcggaggatctggcggcggaggctctcaggtgcaactccaggaatctggccctggcctcgtgaagcccagcgagacactgagcctgacctgtaccgtgtccggcgtgtccctgcctgactatggcgtgtcctggatcagacagccccctggcaagggcctggaatggatcggagtgatttggggcagcgaaaccacctactacaacagctccctgaagtccagagtgaccatctccaaggacaactccaagaaccaggtgtccctgaagctgagcagcgtgacagccgccgacaccgccgtgtattactgcgccaagcactactactacggcggcagctacgctatggactactggggccagggaaccctcgtgaccgtgtctagtacgcgtatccagaaccctgatcctgccgtgtaccagctgcgggatagcaagagcagcgacaagagcgtgtgtctgttcaccgacttcgacagccagaccaacgtgtcccagagcaaggactccgacgtgtacatcaccgataagtgcgtgctggacatgcggagcatggacttcaagagcaactccgccgtggcctggtccaacaagtccgatttcgcctgcgccaacgccttcaacaacagcattatccccgaggacacattcttcccaagccccgagagcagcgactccaccgaccacgtgaagcccaaagagacagagaacaccaagcagcccagcaagagctgccacaagcccaaggccatcgtgcacaccgagaaagtgaacatgatgagcctgaccgtgctgggcctgcggatgctgttcgccaaaaccgtggccgtgaacttcctgctgaccgccaagctgttcttcctcctcaccgcccgcgccaagagaagcggatctggcgtgaagcagaccctgaatttcgacctgctgaagctggctggcgacgtggaatccaacccaggcccttctagaggccatatgaccgagtacaagcccacggtgcgcctcgccacccgcgacgacgtccccagggccgtacgcaccctcgccgccgcgttcgccgactaccccgccacgcgccacaccgtcgatccggaccgccacatcgagcgggtcaccgagctgcaagaactcttcctcacgcgcgtcgggctcgacatcggcaaggtgtgggtcgcggacgacggcgccgcggtggcggtctggaccacgccggagagcgtcgaagcgggggcggtgttcgccgagatcggcccgcgcatggccgagttgagcggttcccggctggccgcgcagcaacagatggaaggcctcctggcgccgcaccggcccaaggagcccgcgtggttcctggccaccgtcggcgtctcgcccgaccaccagggcaagggtctgggcagcgccgtcgtgctccccggagtggaggcggccgagcgcgccggggtgcccgccttcctggagacctccgcgccccgcaacctccccttctacgagcggctcggcttcaccgtcaccgccgacgtcgaggtgcccgaaggaccgcgcacctggtgcatgacccgcaagcccggtgcctga

SEQ ID NO: 17848 - DNA, 2928 bp, synthetic construct
  source 1..2928: mol_type = other DNA
atggccttaccagtgaccgccttgctcctgccgctggccttgctgctccacgccgccaggccgctcgaggaggacctgaagaacgtgttcccacctgaggtggccgtgttcgagcctagcgaggccgagatcagccacacccagaaagccaccctcgtgtgcctggctaccggcttctaccccgaccatgtggaactgtcttggtgggtcaacggcaaagaggtgcacagcggcgtgtgtaccgacccccagccactgaaagaacagcccgccctgaacgacagccggtactgcctgagcagcagactgagagtgtccgccaccttctggcagaacccccggaaccacttcagatgccaggtgcagttctacggcctgagcgagaacgacgagtggacccaggacagagccaagcccgtgacccagatcgtgtctgccgaagcctggggcagagccgatgatgtgattaagatccactggcaggaaaagaagtccaacaccatcctgggcagccaggaaggcaacaccatgaagaccaacgacacctacatgaagttcagctggctgaccgtgcccgagaagtccctggacaaagaacacagatgcatcgtgcggcacgaaaacaacaagaacggcgtggaccaggaaatcatcttcccacccatcaagaccgatgtgattacaatggaccccaaggacaactgctccaaggacgccaacgataccctgctgctccagctgaccaacaccagcgcctactacatgtacttgttgctgctgctgaagtccgtggtgtacttcgccatcatcacatgctgcctgctgatggctatggtcaagcggaaggacagccggggaagggccaagcgatctggatctggagcaacaaacttctcactactcaaacaagcaggtgacgtggaggagaatcccgggcctactagcaccatggccttaccagtgaccgccttgctcctgccgctggccttgctgctccacgccgccaggccggacgagatcgtgctgacacagagccccgccaccctgtcactgtctccaggcgaaagagccaccctgagctgtagcgccagcagcagcgtgtcctacatgcactggtatcagcagaagcccggccaggcccccagactgctgatctacgataccagcaagctggcctccggcatccccgccagattttctggcagcggctccggcaccgacttcaccctgacaatcagcagcctggaacccgaggacgtggccgtgtactactgttttcaaggcagcgtgtaccccttcaccttcggccagggcaccaagctggaaatcaagagaggtggcggtggctcgggcggtggtgggtcgggtggcggcggatctcaggtgcagctccaggaatctggccctggcctcgtgaagcctagccagaccctgagcctgacctgtaccgtgtctggcggcagcatcagcacaagcggcatgggcgtgggctggatcagacagcaccctggcaagggcctggaatggatcggccacatttggtgggacgacgacaagcggtacaaccccgccctgaagtccagagtgaccatcagcgtggacaccagcaagaaccagttcagcctgaagctgagcagcgtgacagccgccgataccgccgtgtattattgcgcccggatggaactgtggtcctactacttcgactactggggccagggaaccctcgtgaccgtgtctagtacgcgtatccagaaccctgatcctgccgtgtaccagctgcgggatagcaagagcagcgacaagagcgtgtgtctgttcaccgacttcgacagccagaccaacgtgtcccagagcaaggactccgacgtgtacatcaccgataagtgcgtgctggacatgcggagcatggacttcaagagcaactccgccgtggcctggtccaacaagtccgatttcgcctgcgccaacgccttcaacaacagcattatccccgaggacacattcttcccaagccccgagagcagcgactccaccgaccacgtgaagcccaaagagacagagaacaccaagcagcccagcaagagctgccacaagcccaaggccatcgtgcacaccgagaaagtgaacatgatgagcctgaccgtgctgggcctgcggatgctgttcgccaaaaccgtggccgtgaacttcctgctgaccgccaagctgttcttcctcctcaccgcccgcgccaagagaagcggatctggcgtgaagcagaccctgaatttcgacctgctgaagctggctggcgacgtggaatccaacccaggcccttctagaggccatatgaccgagtacaagcccacggtgcgcctcgccacccgcgacgacgtccccagggccgtacgcaccctcgccgccgcgttcgccgactaccccgccacgcgccacaccgtcgatccggaccgccacatcgagcgggtcaccgagctgcaagaactcttcctcacgcgcgtcgggctcgacatcggcaaggtgtgggtcgcggacgacggcgccgcggtggcggtctggaccacgccggagagcgtcgaagcgggggcggtgttcgccgagatcggcccgcgcatggccgagttgagcggttcccggctggccgcgcagcaacagatggaaggcctcctggcgccgcaccggcccaaggagcccgcgtggttcctggccaccgtcggcgtctcgcccgaccaccagggcaagggtctgggcagcgccgtcgtgctccccggagtggaggcggccgagcgcgccggggtgcccgccttcctggagacctccgcgccccgcaacctccccttctacgagcggctcggcttcaccgtcaccgccgacgtcgaggtgcccgaaggaccgcgcacctggtgcatgacccgcaagcccggtgcctga

SEQ ID NO: 17849 - DNA, 2916 bp, synthetic construct
  source 1..2916: mol_type = other DNA
atggccttaccagtgaccgccttgctcctgccgctggccttgctgctccacgccgccaggccgctcgaggaggacctgaagaacgtgttcccacctgaggtggccgtgttcgagcctagcgaggccgagatcagccacacccagaaagccaccctcgtgtgcctggctaccggcttctaccccgaccatgtggaactgtcttggtgggtcaacggcaaagaggtgcacagcggcgtgtgtaccgacccccagccactgaaagaacagcccgccctgaacgacagccggtactgcctgagcagcagactgagagtgtccgccaccttctggcagaacccccggaaccacttcagatgccaggtgcagttctacggcctgagcgagaacgacgagtggacccaggacagagccaagcccgtgacccagatcgtgtctgccgaagcctggggcagagccgatgatgtgattaagatccactggcaggaaaagaagtccaacaccatcctgggcagccaggaaggcaacaccatgaagaccaacgacacctacatgaagttcagctggctgaccgtgcccgagaagtccctggacaaagaacacagatgcatcgtgcggcacgaaaacaacaagaacggcgtggaccaggaaatcatcttcccacccatcaagaccgatgtgattacaatggaccccaaggacaactgctccaaggacgccaacgataccctgctgctccagctgaccaacaccagcgcctactacatgtacttgttgctgctgctgaagtccgtggtgtacttcgccatcatcacatgctgcctgctgatggctatggtcaagcggaaggacagccggggaagggccaagcgatctggatctggagcaacaaacttctcactactcaaacaagcaggtgacgtggaggagaatcccgggcctactagcatggccttaccagtgaccgccttgctcctgccgctggccttgctgctccacgccgccaggccggacatccagatgacacagagccctagcagcctgtctgccagcgtgggagacagagtgaccatcacctgtagagccagccaggacatcagcaactacctgaactggtatcagcagaagcccggcaaggcccctaagctgctgatctactacaccagcagactgcacagcggcgtgcccagcagattttctggctctggcagcggcaccgacttcaccctgacaatatctagcctccagcctgaggacttcgccacctactattgccagcagggcaacaccctgccttacacatttggacagggcaccaaggtggaaatcaagagaggcggaggcggaagtggaggcggaggatctggcggcggaggctctgaagtgcagctggttgaatcaggtggcggcctggttcaacctggcggatctctgagactgagctgtgccgccagcggcttcaccttcagcgactactttatgagctgggtccgacaggcccctggcaaaggacttgaatgggtcgccaccatcagcaatggcggcacctacacttactaccccgacagcgtgaagggcagattcaccatctccagagacaacagcaagaacaccctgtacctccagatgaactccctgagagccgaggacaccgccgtgtactactgcgccagattcgacggctacatcttcgactattggggccagggcaccctggtcacagtctcttctacgcgtatccagaaccctgatcctgccgtgtaccagctgcgggatagcaagagcagcgacaagagcgtgtgtctgttcaccgacttcgacagccagaccaacgtgtcccagagcaaggactccgacgtgtacatcaccgataagtgcgtgctggacatgcggagcatggacttcaagagcaactccgccgtggcctggtccaacaagtccgatttcgcctgcgccaacgccttcaacaacagcattatccccgaggacacattcttcccaagccccgagagcagcgactccaccgaccacgtgaagcccaaagagacagagaacaccaagcagcccagcaagagctgccacaagcccaaggccatcgtgcacaccgagaaagtgaacatgatgagcctgaccgtgctgggcctgcggatgctgttcgccaaaaccgtggccgtgaacttcctgctgaccgccaagctgttcttcctcctcaccgcccgcgccaagagaagcggatctggcgtgaagcagaccctgaatttcgacctgctgaagctggctggcgacgtggaatccaacccaggcccttctagaggccatatgaccgagtacaagcccacggtgcgcctcgccacccgcgacgacgtccccagggccgtacgcaccctcgccgccgcgttcgccgactaccccgccacgcgccacaccgtcgatccggaccgccacatcgagcgggtcaccgagctgcaagaactcttcctcacgcgcgtcgggctcgacatcggcaaggtgtgggtcgcggacgacggcgccgcggtggcggtctggaccacgccggagagcgtcgaagcgggggcggtgttcgccgagatcggcccgcgcatggccgagttgagcggttcccggctggccgcgcagcaacagatggaaggcctcctggcgccgcaccggcccaaggagcccgcgtggttcctggccaccgtcggcgtctcgcccgaccaccagggcaagggtctgggcagcgccgtcgtgctccccggagtggaggcggccgagcgcgccggggtgcccgccttcctggagacctccgcgccccgcaacctccccttctacgagcggctcggcttcaccgtcaccgccgacgtcgaggtgcccgaaggaccgcgcacctggtgcatgacccgcaagcccggtgcctga

SEQ ID NO: 17850 - DNA, 2928 bp, synthetic construct
  source 1..2928: mol_type = other DNA
atggccttaccagtgaccgccttgctcctgccgctggccttgctgctccacgccgccaggccgctcgaggaggacctgaagaacgtgttcccacctgaggtggccgtgttcgagcctagcgaggccgagatcagccacacccagaaagccaccctcgtgtgcctggctaccggcttctaccccgaccatgtggaactgtcttggtgggtcaacggcaaagaggtgcacagcggcgtgtgtaccgacccccagccactgaaagaacagcccgccctgaacgacagccggtactgcctgagcagcagactgagagtgtccgccaccttctggcagaacccccggaaccacttcagatgccaggtgcagttctacggcctgagcgagaacgacgagtggacccaggacagagccaagcccgtgacccagatcgtgtctgccgaagcctggggcagagccgatgatgtgattaagatccactggcaggaaaagaagtccaacaccatcctgggcagccaggaaggcaacaccatgaagaccaacgacacctacatgaagttcagctggctgaccgtgcccgagaagtccctggacaaagaacacagatgcatcgtgcggcacgaaaacaacaagaacggcgtggaccaggaaatcatcttcccacccatcaagaccgatgtgattacaatggaccccaaggacaactgctccaaggacgccaacgataccctgctgctccagctgaccaacaccagcgcctactacatgtacttgttgctgctgctgaagtccgtggtgtacttcgccatcatcacatgctgcctgctgatggctatggtcaagcggaaggacagccggggaagggccaagcgatctggatctggagcaacaaacttctcactactcaaacaagcaggtgacgtggaggagaatcccgggcctactagcatggccttaccagtgaccgccttgctcctgccgctggccttgctgctccacgccgccaggccggacatccagatgacacagagccctagcagcctgtctgccagcgtgggagacagagtgaccatcacatgcaaggccagcgaccacatcaacaactggctggcctggtatcagcagaagcctggacaggcccctaagctgctgatctacggcgctaccacactggaaacaggcgtgcccagcagattttctggcagcggctctggcaccgactacaccctgacaatatccagcctccagcctgaggacttcgccacctactactgtcagcagagctggaacaccccttggacattcggccagggcaccaagctggaaatcaagagaggcggaggcggaagtggaggcggaggatctggcggcggaggctctcaagttcagcttcaacagcctggcgctgagctggtcaaacctggcgcttctgtgaagatgagctgcaaagccagcggctacgccttcagcagctactggatcaactggatgaagcagaaacccggccagggactcgaatggatcggccaaatctatcccggcgacggcgacaccaactacaacggcaagttcaagggcagagccacactgaccgccgatacctctagcagcacagcctacatgcagctgagcagcctgaccagcgaagatagcgccgtgtacttctgtgcccggtccatcacaacagtcgtgggctgcgctatggactattggggccagggaacaagcgtgaccgtgtctagtacgcgtatccagaaccctgatcctgccgtgtaccagctgcgggatagcaagagcagcgacaagagcgtgtgtctgttcaccgacttcgacagccagaccaacgtgtcccagagcaaggactccgacgtgtacatcaccgataagtgcgtgctggacatgcggagcatggacttcaagagcaactccgccgtggcctggtccaacaagtccgatttcgcctgcgccaacgccttcaacaacagcattatccccgaggacacattcttcccaagccccgagagcagcgactccaccgaccacgtgaagcccaaagagacagagaacaccaagcagcccagcaagagctgccacaagcccaaggccatcgtgcacaccgagaaagtgaacatgatgagcctgaccgtgctgggcctgcggatgctgttcgccaaaaccgtggccgtgaacttcctgctgaccgccaagctgttcttcctcctcaccgcccgcgccaagagaagcggatctggcgtgaagcagaccctgaatttcgacctgctgaagctggctggcgacgtggaatccaacccaggcccttctagaggccatatgaccgagtacaagcccacggtgcgcctcgccacccgcgacgacgtccccagggccgtacgcaccctcgccgccgcgttcgccgactaccccgccacgcgccacaccgtcgatccggaccgccacatcgagcgggtcaccgagctgcaagaactcttcctcacgcgcgtcgggctcgacatcggcaaggtgtgggtcgcggacgacggcgccgcggtggcggtctggaccacgccggagagcgtcgaagcgggggcggtgttcgccgagatcggcccgcgcatggccgagttgagcggttcccggctggccgcgcagcaacagatggaaggcctcctggcgccgcaccggcccaaggagcccgcgtggttcctggccaccgtcggcgtctcgcccgaccaccagggcaagggtctgggcagcgccgtcgtgctccccggagtggaggcggccgagcgcgccggggtgcccgccttcctggagacctccgcgccccgcaacctccccttctacgagcggctcggcttcaccgtcaccgccgacgtcgaggtgcccgaaggaccgcgcacctggtgcatgacccgcaagcccggtgcctga

SEQ ID NO: 17851 - DNA, 2934 bp, synthetic construct
  source 1..2934: mol_type = other DNA
atggccttaccagtgaccgccttgctcctgccgctggccttgctgctccacgccgccaggccgctcgaggaggacctgaagaacgtgttcccacctgaggtggccgtgttcgagcctagcgaggccgagatcagccacacccagaaagccaccctcgtgtgcctggctaccggcttctaccccgaccatgtggaactgtcttggtgggtcaacggcaaagaggtgcacagcggcgtgtgtaccgacccccagccactgaaagaacagcccgccctgaacgacagccggtactgcctgagcagcagactgagagtgtccgccaccttctggcagaacccccggaaccacttcagatgccaggtgcagttctacggcctgagcgagaacgacgagtggacccaggacagagccaagcccgtgacccagatcgtgtctgccgaagcctggggcagagccgatgatgtgattaagatccactggcaggaaaagaagtccaacaccatcctgggcagccaggaaggcaacaccatgaagaccaacgacacctacatgaagttcagctggctgaccgtgcccgagaagtccctggacaaagaacacagatgcatcgtgcggcacgaaaacaacaagaacggcgtggaccaggaaatcatcttcccacccatcaagaccgatgtgattacaatggaccccaaggacaactgctccaaggacgccaacgataccctgctgctccagctgaccaacaccagcgcctactacatgtacttgttgctgctgctgaagtccgtggtgtacttcgccatcatcacatgctgcctgctgatggctatggtcaagcggaaggacagccggggaagggccaagcgatctggatctggagcaacaaacttctcactactcaaacaagcaggtgacgtggaggagaatcccgggcctactagcatggccttaccagtgaccgccttgctcctgccgctggccttgctgctccacgccgccaggccgcagatcgtgctgtctcagtctcctgccatcctgagcgcttccccaggcgagaaagtgaccatgacctgtagagccagcagcagcgtgtcctacatgcactggtatcagcagaagcccggcagcagccctaagccttggatctacgccaccagcaatctggcctctggcgtgccagccagattttctggctctggcagcggcaccagctacagcttcacaatcagcagagtggaagccgaggacgccgccacctactattgtcagcagtggaccttcaatcctcctaccttcggcggaggcacccggctggaaatcaaaagaacagtggctgctggcggaggcggaagtggaggcggaggatctggcggcggaggctctcaggcttatctgcaacagagcggagccgaactcgtcagacctggcgcttctgtgaagatgagctgcaaggccagcggctacaccttcaccagctataatatgcactgggtcaagcagacccctcggcagggactcgaatggatcggcggaatctatcccggcaacggcgacacctcctacaaccagaagttcaagggcaaagccacactgaccgtgggcaagagcagcagcaccgcctatatgcagctcagcagcctgaccagcgaggacagcgccgtgtacttctgcgccagatacgactacaactacgctatggactactggggccagggcaccagcgtgacagttagctctgccagcacgcgtatccagaaccctgatcctgccgtgtaccagctgcgggatagcaagagcagcgacaagagcgtgtgtctgttcaccgacttcgacagccagaccaacgtgtcccagagcaaggactccgacgtgtacatcaccgataagtgcgtgctggacatgcggagcatggacttcaagagcaactccgccgtggcctggtccaacaagtccgatttcgcctgcgccaacgccttcaacaacagcattatccccgaggacacattcttcccaagccccgagagcagcgactccaccgaccacgtgaagcccaaagagacagagaacaccaagcagcccagcaagagctgccacaagcccaaggccatcgtgcacaccgagaaagtgaacatgatgagcctgaccgtgctgggcctgcggatgctgttcgccaaaaccgtggccgtgaacttcctgctgaccgccaagctgttcttcctcctcaccgcccgcgccaagagaagcggatctggcgtgaagcagaccctgaatttcgacctgctgaagctggctggcgacgtggaatccaacccaggcccttctagaggccatatgaccgagtacaagcccacggtgcgcctcgccacccgcgacgacgtccccagggccgtacgcaccctcgccgccgcgttcgccgactaccccgccacgcgccacaccgtcgatccggaccgccacatcgagcgggtcaccgagctgcaagaactcttcctcacgcgcgtcgggctcgacatcggcaaggtgtgggtcgcggacgacggcgccgcggtggcggtctggaccacgccggagagcgtcgaagcgggggcggtgttcgccgagatcggcccgcgcatggccgagttgagcggttcccggctggccgcgcagcaacagatggaaggcctcctggcgccgcaccggcccaaggagcccgcgtggttcctggccaccgtcggcgtctcgcccgaccaccagggcaagggtctgggcagcgccgtcgtgctccccggagtggaggcggccgagcgcgccggggtgcccgccttcctggagacctccgcgccccgcaacctccccttctacgagcggctcggcttcaccgtcaccgccgacgtcgaggtgcccgaaggaccgcgcacctggtgcatgacccgcaagcccggtgcctga

SEQ ID NO: 17852 - DNA, 2928 bp, synthetic construct
  source 1..2928: mol_type = other DNA
atggccttaccagtgaccgccttgctcctgccgctggccttgctgctccacgccgccaggccgctcgaggaggacctgaagaacgtgttcccacctgaggtggccgtgttcgagcctagcgaggccgagatcagccacacccagaaagccaccctcgtgtgcctggctaccggcttctaccccgaccatgtggaactgtcttggtgggtcaacggcaaagaggtgcacagcggcgtgtgtaccgacccccagccactgaaagaacagcccgccctgaacgacagccggtactgcctgagcagcagactgagagtgtccgccaccttctggcagaacccccggaaccacttcagatgccaggtgcagttctacggcctgagcgagaacgacgagtggacccaggacagagccaagcccgtgacccagatcgtgtctgccgaagcctggggcagagccgatgatgtgattaagatccactggcaggaaaagaagtccaacaccatcctgggcagccaggaaggcaacaccatgaagaccaacgacacctacatgaagttcagctggctgaccgtgcccgagaagtccctggacaaagaacacagatgcatcgtgcggcacgaaaacaacaagaacggcgtggaccaggaaatcatcttcccacccatcaagaccgatgtgattacaatggaccccaaggacaactgctccaaggacgccaacgataccctgctgctccagctgaccaacaccagcgcctactacatgtacttgttgctgctgctgaagtccgtggtgtacttcgccatcatcacatgctgcctgctgatggctatggtcaagcggaaggacagccggggaagggccaagcgatctggatctggagcaacaaacttctcactactcaaacaagcaggtgacgtggaggagaatcccgggcctactagcatggccttaccagtgaccgccttgctcctgccgctggccttgctgctccacgccgccaggccggagatcgtgctgacacagagccctgccaccctgtctctgagccctggcgaaagagccaccctgagctgtagagccagccagagcgtgtccagctacctggcctggtatcagcagaagcccggccaggctccccggctgctgatctacgatgccagcaatagagccaccggcatccccgccagattttccggctctggcagcggcaccgacttcaccctgaccatcagctccctggaacccgaggacttcgccgtgtactactgccagcagcggagcaactggcccatcacattcggccagggcacccggctggaaatcaaaggcggaggcggaagtggaggcggaggatctggcggcggaggctctgaggtgcagcttgttgagtctggcggaggactggtgcagcccgatagaagcctgagactgtcttgtgccgccagcggcttcaccttccacgattatgccatgcactgggtccgacaggcccctggcaaaggacttgaatgggtgtccaccatctcttggaacagcggcacaatcggctacgccgactctgtgaagggcagattcaccatcagccgggacaacgccaagaacagcctgtacctccagatgaactccctgagagccgaggacacagccctgtactactgcgccaaggacatccagtacggcaactactactacggcatggacgtgtggggccagggcacaacagtgacagtctcttctacgcgtatccagaaccctgatcctgccgtgtaccagctgcgggatagcaagagcagcgacaagagcgtgtgtctgttcaccgacttcgacagccagaccaacgtgtcccagagcaaggactccgacgtgtacatcaccgataagtgcgtgctggacatgcggagcatggacttcaagagcaactccgccgtggcctggtccaacaagtccgatttcgcctgcgccaacgccttcaacaacagcattatccccgaggacacattcttcccaagccccgagagcagcgactccaccgaccacgtgaagcccaaagagacagagaacaccaagcagcccagcaagagctgccacaagcccaaggccatcgtgcacaccgagaaagtgaacatgatgagcctgaccgtgctgggcctgcggatgctgttcgccaaaaccgtggccgtgaacttcctgctgaccgccaagctgttcttcctcctcaccgcccgcgccaagagaagcggatctggcgtgaagcagaccctgaatttcgacctgctgaagctggctggcgacgtggaatccaacccaggcccttctagaggccatatgaccgagtacaagcccacggtgcgcctcgccacccgcgacgacgtccccagggccgtacgcaccctcgccgccgcgttcgccgactaccccgccacgcgccacaccgtcgatccggaccgccacatcgagcgggtcaccgagctgcaagaactcttcctcacgcgcgtcgggctcgacatcggcaaggtgtgggtcgcggacgacggcgccgcggtggcggtctggaccacgccggagagcgtcgaagcgggggcggtgttcgccgagatcggcccgcgcatggccgagttgagcggttcccggctggccgcgcagcaacagatggaaggcctcctggcgccgcaccggcccaaggagcccgcgtggttcctggccaccgtcggcgtctcgcccgaccaccagggcaagggtctgggcagcgccgtcgtgctccccggagtggaggcggccgagcgcgccggggtgcccgccttcctggagacctccgcgccccgcaacctccccttctacgagcggctcggcttcaccgtcaccgccgacgtcgaggtgcccgaaggaccgcgcacctggtgcatgacccgcaagcccggtgcctga

SEQ ID NO: 17853 - DNA, 2922 bp, synthetic construct
  source 1..2922: mol_type = other DNA
atggccttaccagtgaccgccttgctcctgccgctggccttgctgctccacgccgccaggccgctcgaggaggacctgaagaacgtgttcccacctgaggtggccgtgttcgagcctagcgaggccgagatcagccacacccagaaagccaccctcgtgtgcctggctaccggcttctaccccgaccatgtggaactgtcttggtgggtcaacggcaaagaggtgcacagcggcgtgtgtaccgacccccagccactgaaagaacagcccgccctgaacgacagccggtactgcctgagcagcagactgagagtgtccgccaccttctggcagaacccccggaaccacttcagatgccaggtgcagttctacggcctgagcgagaacgacgagtggacccaggacagagccaagcccgtgacccagatcgtgtctgccgaagcctggggcagagccgatgatgtgattaagatccactggcaggaaaagaagtccaacaccatcctgggcagccaggaaggcaacaccatgaagaccaacgacacctacatgaagttcagctggctgaccgtgcccgagaagtccctggacaaagaacacagatgcatcgtgcggcacgaaaacaacaagaacggcgtggaccaggaaatcatcttcccacccatcaagaccgatgtgattacaatggaccccaaggacaactgctccaaggacgccaacgataccctgctgctccagctgaccaacaccagcgcctactacatgtacttgttgctgctgctgaagtccgtggtgtacttcgccatcatcacatgctgcctgctgatggctatggtcaagcggaaggacagccggggaagggccaagcgatctggatctggagcaacaaacttctcactactcaaacaagcaggtgacgtggaggagaatcccgggcctactagcatggccttaccagtgaccgccttgctcctgccgctggccttgctgctccacgccgccaggccggacatccagatgacccagagccccagcagcctgtctgccagcgtgggcgacagagtgaccatcacctgtagagccagccaggacgtgaacaccgccgtggcctggtatcagcagaagcctggcaaggcccccaagctgctgatctacagcgccagcttcctggaaagcggcgtgcccagcagattcagcggaagcagaagcggcaccgacttcaccctgaccatcagctccctccagcccgaggacttcgccacctactactgccagcagcactacaccacccctcccaccttcggccagaccaaggtggaaatcaagagaggcggaggcggaagtggaggcggaggatctggcggcggaggctctgaagtgcaactggtggaatctggcggcggactggtgcagcctggcggatctctgagactgagctgtgccgccagcggcttcaacatcaaggacacctacatccactgggtgcgccaggcccctggaaagggactggaatgggtggcccggatctaccccaccaacggctacaccagatacgccgacagcgtgaagggccggttcaccatcagcgccgacaccagcaagaataccgcctacctccagatgaacagcctgcgggccgaggataccgccgtgtactactgctcaagatggggaggcgacggcttctacgctatggacgtgtggggccagggcacccttgtgaccgtgtcatctacgcgtatccagaaccctgatcctgccgtgtaccagctgcgggatagcaagagcagcgacaagagcgtgtgtctgttcaccgacttcgacagccagaccaacgtgtcccagagcaaggactccgacgtgtacatcaccgataagtgcgtgctggacatgcggagcatggacttcaagagcaactccgccgtggcctggtccaacaagtccgatttcgcctgcgccaacgccttcaacaacagcattatccccgaggacacattcttcccaagccccgagagcagcgactccaccgaccacgtgaagcccaaagagacagagaacaccaagcagcccagcaagagctgccacaagcccaaggccatcgtgcacaccgagaaagtgaacatgatgagcctgaccgtgctgggcctgcggatgctgttcgccaaaaccgtggccgtgaacttcctgctgaccgccaagctgttcttcctcctcaccgcccgcgccaagagaagcggatctggcgtgaagcagaccctgaatttcgacctgctgaagctggctggcgacgtggaatccaacccaggcccttctagaggccatatgaccgagtacaagcccacggtgcgcctcgccacccgcgacgacgtccccagggccgtacgcaccctcgccgccgcgttcgccgactaccccgccacgcgccacaccgtcgatccggaccgccacatcgagcgggtcaccgagctgcaagaactcttcctcacgcgcgtcgggctcgacatcggcaaggtgtgggtcgcggacgacggcgccgcggtggcggtctggaccacgccggagagcgtcgaagcgggggcggtgttcgccgagatcggcccgcgcatggccgagttgagcggttcccggctggccgcgcagcaacagatggaaggcctcctggcgccgcaccggcccaaggagcccgcgtggttcctggccaccgtcggcgtctcgcccgaccaccagggcaagggtctgggcagcgccgtcgtgctccccggagtggaggcggccgagcgcgccggggtgcccgccttcctggagacctccgcgccccgcaacctccccttctacgagcggctcggcttcaccgtcaccgccgacgtcgaggtgcccgaaggaccgcgcacctggtgcatgacccgcaagcccggtgcctga

SEQ ID NO: 17854 - DNA, 2559 bp, synthetic construct
  source 1..2559: mol_type = other DNA
atggccttaccagtgaccgccttgctcctgccgctggccttgctgctccacgccgccaggccgctcgaggaggacctgaagaacgtgttcccacctgaggtggccgtgttcgagcctagcgaggccgagatcagccacacccagaaagccaccctcgtgtgcctggctaccggcttctaccccgaccatgtggaactgtcttggtgggtcaacggcaaagaggtgcacagcggcgtgtgtaccgacccccagccactgaaagaacagcccgccctgaacgacagccggtactgcctgagcagcagactgagagtgtccgccaccttctggcagaacccccggaaccacttcagatgccaggtgcagttctacggcctgagcgagaacgacgagtggacccaggacagagccaagcccgtgacccagatcgtgtctgccgaagcctggggcagagccgatgatgtgattaagatccactggcaggaaaagaagtccaacaccatcctgggcagccaggaaggcaacaccatgaagaccaacgacacctacatgaagttcagctggctgaccgtgcccgagaagtccctggacaaagaacacagatgcatcgtgcggcacgaaaacaacaagaacggcgtggaccaggaaatcatcttcccacccatcaagaccgatgtgattacaatggaccccaaggacaactgctccaaggacgccaacgataccctgctgctccagctgaccaacaccagcgcctactacatgtacttgttgctgctgctgaagtccgtggtgtacttcgccatcatcacatgctgcctgctgatggctatggtcaagcggaaggacagccggggaagggccaagcgatctggatctggagcaacaaacttctcactactcaaacaagcaggtgacgtggaggagaatcccgggcctactagcatggccctgcccgtgacagccctgctgctgcctctggctctgctgctgcacgccgccagacccgatgaattcgaggtgcaactggtggaaagcggcggaggcctggtgcaggctggcggatctctgagactgagctgtgccgccagcggcatcaccttcagcatcaacacaatgggctggtacagacaggcccctggcaagcagagggaactggtggccctgatctccagcatcggcgacacctactacgccgacagcgtgaagggccggttcaccatcagccgggacaacgccaagaacaccgtgtacctccagatgaacagcctgaagcccgaggacaccgccgtgtactactgcaagcggttcagaacagccgcccagggcaccgattattggggccagggaacacaagtgaccgtgtcctctacgcgtatccagaaccctgatcctgccgtgtaccagctgcgggatagcaagagcagcgacaagagcgtgtgtctgttcaccgacttcgacagccagaccaacgtgtcccagagcaaggactccgacgtgtacatcaccgataagtgcgtgctggacatgcggagcatggacttcaagagcaactccgccgtggcctggtccaacaagtccgatttcgcctgcgccaacgccttcaacaacagcattatccccgaggacacattcttcccaagccccgagagcagcgactccaccgaccacgtgaagcccaaagagacagagaacaccaagcagcccagcaagagctgccacaagcccaaggccatcgtgcacaccgagaaagtgaacatgatgagcctgaccgtgctgggcctgcggatgctgttcgccaaaaccgtggccgtgaacttcctgctgaccgccaagctgttcttcctcctcaccgcccgcgccaagagaagcggatctggcgtgaagcagaccctgaatttcgacctgctgaagctggctggcgacgtggaatccaacccaggcccttctagaggccatatgaccgagtacaagcccacggtgcgcctcgccacccgcgacgacgtccccagggccgtacgcaccctcgccgccgcgttcgccgactaccccgccacgcgccacaccgtcgatccggaccgccacatcgagcgggtcaccgagctgcaagaactcttcctcacgcgcgtcgggctcgacatcggcaaggtgtgggtcgcggacgacggcgccgcggtggcggtctggaccacgccggagagcgtcgaagcgggggcggtgttcgccgagatcggcccgcgcatggccgagttgagcggttcccggctggccgcgcagcaacagatggaaggcctcctggcgccgcaccggcccaaggagcccgcgtggttcctggccaccgtcggcgtctcgcccgaccaccagggcaagggtctgggcagcgccgtcgtgctccccggagtggaggcggccgagcgcgccggggtgcccgccttcctggagacctccgcgccccgcaacctccccttctacgagcggctcggcttcaccgtcaccgccgacgtcgaggtgcccgaaggaccgcgcacctggtgcatgacccgcaagcccggtgcctga

SEQ ID NO: 17855 - DNA, 2559 bp, synthetic construct; identical to SEQ ID NO: 17854
  source 1..2559: mol_type = other DNA

SEQ ID NO: 17856 - DNA, 3354 bp, synthetic construct
  source 1..3354: mol_type = other DNA
atggccttaccagtgaccgccttgctcctgccgctggccttgctgctccacgccgccaggccgctcgaggaggacctgaagaacgtgttcccacctgaggtggccgtgttcgagcctagcgaggccgagatcagccacacccagaaagccaccctcgtgtgcctggctaccggcttctaccccgaccatgtggaactgtcttggtgggtcaacggcaaagaggtgcacagcggcgtgtgtaccgacccccagccactgaaagaacagcccgccctgaacgacagccggtactgcctgagcagcagactgagagtgtccgccaccttctggcagaacccccggaaccacttcagatgccaggtgcagttctacggcctgagcgagaacgacgagtggacccaggacagagccaagcccgtgacccagatcgtgtctgccgaagcctggggcagagccgatgatgtgattaagatccactggcaggaaaagaagtccaacaccatcctgggcagccaggaaggcaacaccatgaagaccaacgacacctacatgaagttcagctggctgaccgtgcccgagaagtccctggacaaagaacacagatgcatcgtgcggcacgaaaacaacaagaacggcgtggaccaggaaatcatcttcccacccatcaagaccgatgtgattacaatggaccccaaggacaactgctccaaggacgccaacgataccctgctgctccagctgaccaacaccagcgcctactacatgtacttgttgctgctgctgaagtccgtggtgtacttcgccatcatcacatgctgcctgctgatggctatggtcaagcggaaggacagccggggaagggccaagcgatctggatctggagcaacaaacttctcactactcaaacaagcaggtgacgtggaggagaatcccgggcctactagcatggccttaccagtgaccgccttgctcctgccgctggccttgctgctccacgccgccaggccgcaggtccagctcgtcgagtccggcggcggcctcgtccaggccggcgactccgtcaccctctcctgcaccgcctccggccgcaccttctcctcctacgccctcgcctggttccgccagcgccccggcaaggagcgcgagttcgtcgccggcctccgctggggcggccccaccaactacgccgactccgtcaaggaccgcttcaccatctccggcgactccgccaagcacaccatgtacctccagatgaactccctcaagcccgaggacaccgccgtctactactgcggctacaaccccggcggctgggccgtcccctcccagtacgagtacgactcctggggccagggcacccaggtcaccgtctcctccggtaccggcggaggcggatctggcggcggaggtagcggtggcggaggatctgaattcgacatccagatgacacagagccctagcagcctgtctgccagcgtgggagacagagtgaccatcacatgcaaggccagcgaccacatcaacaactggctggcctggtatcagcagaagcctggacaggcccctaagctgctgatctacggcgctaccacactggaaacaggcgtgcccagcagattttctggcagcggctctggcaccgactacaccctgacaatatccagcctccagcctgaggacttcgccacctactactgtcagcagagctggaacaccccttggacattcggccagggcaccaagctggaaatcaagagaggcggaggcggaagtggaggcggaggatctggcggcggaggctctcaagttcagcttcaacagcctggcgctgagctggtcaaacctggcgcttctgtgaagatgagctgcaaagccagcggctacgccttcagcagctactggatcaactggatgaagcagaaacccggccagggactcgaatggatcggccaaatctatcccggcgacggcgacaccaactacaacggcaagttcaagggcagagccacactgaccgccgatacctctagcagcacagcctacatgcagctgagcagcctgaccagcgaagatagcgccgtgtacttctgtgcccggtccatcacaacagtcgtgggctgcgctatggactattggggccagggaacaagcgtgaccgtgtctagtacgcgtatccagaaccctgatcctgccgtgtaccagctgcgggatagcaagagcagcgacaagagcgtgtgtctgttcaccgacttcgacagccagaccaacgtgtcccagagcaaggactccgacgtgtacatcaccgataagtgcgtgctggacatgcggagcatggacttcaagagcaactccgccgtggcctggtccaacaagtccgatttcgcctgcgccaacgccttcaacaacagcattatccccgaggacacattcttcccaagccccgagagcagcgactccaccgaccacgtgaagcccaaagagacagagaacaccaagcagcccagcaagagctgccacaagcccaaggccatcgtgcacaccgagaaagtgaacatgatgagcctgaccgtgctgggcctgcggatgctgttcgccaaaaccgtggccgtgaacttcctgctgaccgccaagctgttcttcctcctcaccgcccgcgccaagagaagcggatctggcgtgaagcagaccctgaatttcgacctgctgaagctggctggcgacgtggaatccaacccaggcccttctagaggccatatgaccgagtacaagcccacggtgcgcctcgccacccgcgacgacgtccccagggccgtacgcaccctcgccgccgcgttcgccgactaccccgccacgcgccacaccgtcgatccggaccgccacatcgagcgggtcaccgagctgcaagaactcttcctcacgcgcgtcgggctcgacatcggcaaggtgtgggtcgcggacgacggcgccgcggtggcggtctggaccacgccggagagcgtcgaagcgggggcggtgttcgccgagatcggcccgcgcatggccgagttgagcggttcccggctggccgcgcagcaacagatggaaggcctcctggcgccgcaccggcccaaggagcccgcgtggttcctggccaccgtcggcgtctcgcccgaccaccagggcaagggtctgggcagcgccgtcgtgctccccggagtggaggcggccgagcgcgccggggtgcccgccttcctggagacctccgcgccccgcaacctccccttctacgagcggctcggcttcaccgtcaccgccgacgtcgaggtgcccgaaggaccgcgcacctggtgcatgacccgcaagcccggtgcctga

SEQ ID NO: 17857 - DNA, 3741 bp, synthetic construct
  source 1..3741: mol_type = other DNA
atggccttaccagtgaccgccttgctcctgccgctggccttgctgctccacgccgccaggccgctcgaggaggacctgaagaacgtgttcccacctgaggtggccgtgttcgagcctagcgaggccgagatcagccacacccagaaagccaccctcgtgtgcctggctaccggcttctaccccgaccatgtggaactgtcttggtgggtcaacggcaaagaggtgcacagcggcgtgtgtaccgacccccagccactgaaagaacagcccgccctgaacgacagccggtactgcctgagcagcagactgagagtgtccgccaccttctggcagaacccccggaaccacttcagatgccaggtgcagttctacggcctgagcgagaacgacgagtggacccaggacagagccaagcccgtgacccagatcgtgtctgccgaagcctggggcagagccgatgatgtgattaagatccactggcaggaaaagaagtccaacaccatcctgggcagccaggaaggcaacaccatgaagaccaacgacacctacatgaagttcagctggctgaccgtgcccgagaagtccctggacaaagaacacagatgcatcgtgcggcacgaaaacaacaagaacggcgtggaccaggaaatcatcttcccacccatcaagaccgatgtgattacaatggaccccaaggacaactgctccaaggacgccaacgataccctgctgctccagctgaccaacaccagcgcctactacatgtacttgttgctgctgctgaagtccgtggtgtacttcgccatcatcacatgctgcctgctgatggctatggtcaagcggaaggacagccggggaagggccaagcgatctggatctggagcaacaaacttctcactactcaaacaagcaggtgacgtggaggagaatcccgggcctactagcatggccttaccagtgaccgccttgctcctgccgctggccttgctgctccacgccgccaggccggaggttcagctgcttgagtctggcggaggactggttcaacctggcggaagcctgagactgtcttgtgccgccagcggcttcacctttagcagctacgccatgagctgggtccgacaggctcctggcaaaggactggaatgggtgtccagcatcagcggcagcggcgactacatctactacgccgatagcgtgaagggcagattcaccatcagccgggacatcagcaagaacaccctgtacctccagatgaacagcctgagagccgaggacaccgccgtgtactactgtgccaaagaaggcaccggcgctaacagcagcctggccgattatagaggccagggcacactggtcaccgtgtctagtggcggaggaagcggcggaggatctcaggtccagctcgtcgagtccggcggcggcctcgtccaggccggcgactccgtcaccctctcctgcaccgcctccggccgcaccttctcctcctacgccctcgcctggttccgccagcgccccggcaaggagcgcgagttcgtcgccggcctccgctggggcggccccaccaactacgccgactccgtcaaggaccgcttcaccatctccggcgactccgccaagcacaccatgtacctccagatgaactccctcaagcccgaggacaccgccgtctactactgcggctacaaccccggcggctgggccgtcccctcccagtacgagtacgactcctggggccagggcacccaggtcaccgtctcctccggtaccggcggaggcggatctggcggcggaggtagcggtggcggaggatctgaattcgacatccagatgacacagagccctagcagcctgtctgccagcgtgggagacagagtgaccatcacatgcaaggccagcgaccacatcaacaactggctggcctggtatcagcagaagcctggacaggcccctaagctgctgatctacggcgctaccacactggaaacaggcgtgcccagcagattttctggcagcggctctggcaccgactacaccctgacaatatccagcctccagcctgaggacttcgccacctactactgtcagcagagctggaacaccccttggacattcggccagggcaccaagctggaaatcaagagaggcggaggcggaagtggaggcggaggatctggcggcggaggctctcaagttcagcttcaacagcctggcgctgagctggtcaaacctggcgcttctgtgaagatgagctgcaaagccagcggctacgccttcagcagctactggatcaactggatgaagcagaaacccggccagggactcgaatggatcggccaaatctatcccggcgacggcgacaccaactacaacggcaagttcaagggcagagccacactgaccgccgatacctctagcagcacagcctacatgcagctgagcagcctgaccagcgaagatagcgccgtgtacttctgtgcccggtccatcacaacagtcgtgggctgcgctatggactattggggccagggaacaagcgtgaccgtgtctagtacgcgtatccagaaccctgatcctgccgtgtaccagctgcgggatagcaagagcagcgacaagagcgtgtgtctgttcaccgacttcgacagccagaccaacgtgtcccagagcaaggactccgacgtgtacatcaccgataagtgcgtgctggacatgcggagcatggacttcaagagcaactccgccgtggcctggtccaacaagtccgatttcgcctgcgccaacgccttcaacaacagcattatccccgaggacacattcttcccaagccccgagagcagcgactccaccgaccacgtgaagcccaaagagacagagaacaccaagcagcccagcaagagctgccacaagcccaaggccatcgtgcacaccgagaaagtgaacatgatgagcctgaccgtgctgggcctgcggatgctgttcgccaaaaccgtggccgtgaacttcctgctgaccgccaagctgttcttcctcctcaccgcccgcgccaagagaagcggatctggcgtgaagcagaccctgaatttcgacctgctgaagctggctggcgacgtggaatccaacccaggcccttctagaggccatatgaccgagtacaagcccacggtgcgcctcgccacccgcgacgacgtccccagggccgtacgcaccctcgccgccgcgttcgccgactaccccgccacgcgccacaccgtcgatccggaccgccacatcgagcgggtcaccgagctgcaagaactcttcctcacgcgcgtcgggctcgacatcggcaaggtgtgggtcgcggacgacggcgccgcggtggcggtctggaccacgccggagagcgtcgaagcgggggcggtgttcgccgagatcggcccgcgcatggccgagttgagcggttcccggctggccgcgcagcaacagatggaaggcctcctggcgccgcaccggcccaaggagcccgcgtggttcctggccaccgtcggcgtctcgcccgaccaccagggcaagggtctgggcagcgccgtcgtgctccccggagtggaggcggccgagcgcgccggggtgcccgccttcctggagacctccgcgccccgcaacctccccttctacgagcggctcggcttcaccgtcaccgccgacgtcgaggtgcccgaaggaccgcgcacctggtgcatgacccgcaagcccggtgcctga

SEQ ID NO: 17858 - DNA, 3735 bp, synthetic construct
  source 1..3735: mol_type = other DNA
atggccttaccagtgaccgccttgctcctgccgctggccttgctgctccacgccgccaggccgctcgaggaggacctgaagaacgtgttcccacctgaggtggccgtgttcgagcctagcgaggccgagatcagccacacccagaaagccaccctcgtgtgcctggctaccggcttctaccccgaccatgtggaactgtcttggtgggtcaacggcaaagaggtgcacagcggcgtgtgtaccgacccccagccactgaaagaacagcccgccctgaacgacagccggtactgcctgagcagcagactgagagtgtccgccaccttctggcagaacccccggaaccacttcagatgccaggtgcagttctacggcctgagcgagaacgacgagtggacccaggacagagccaagcccgtgacccagatcgtgtctgccgaagcctggggcagagccgatgatgtgattaagatccactggcaggaaaagaagtccaacaccatcctgggcagccaggaaggcaacaccatgaagaccaacgacacctacatgaagttcagctggctgaccgtgcccgagaagtccctggacaaagaacacagatgcatcgtgcggcacgaaaacaacaagaacggcgtggaccaggaaatcatcttcccacccatcaagaccgatgtgattacaatggaccccaaggacaactgctccaaggacgccaacgataccctgctgctccagctgaccaacaccagcgcctactacatgtacttgttgctgctgctgaagtccgtggtgtacttcgccatcatcacatgctgcctgctgatggctatggtcaagcggaaggacagccggggaagggccaagcgatctggatctggagcaacaaacttctcactactcaaacaagcaggtgacgtggaggagaatcccgggcctactagcatggccttaccagtgaccgccttgctcctgccgctggccttgctgctccacgccgccaggccgggcgtgacacagagccccacacacctgattaagaccagaggccagcaggccacactgagatgcagccctatcagcggccacaccagcgtgtactggtatcagcaggctctcggactgggcctccagttcctgctttggtacgacgagggcgaagagagaaaccggggcaacttccctcctcggttttccggcagacagttccccaactacagcagcgagctgaacgtgaacgccctggaactggaagatagcgccctgtacctgtgtgcctcttctcttggtggacctcgcggactggctggactgagaggggatgagcagtttttcggccctggcaccagactgaccgtgctggaaggcggaggaagcggcggaggatctcaggtccagctcgtcgagtccggcggcggcctcgtccaggccggcgactccgtcaccctctcctgcaccgcctccggccgcaccttctcctcctacgccctcgcctggttccgccagcgccccggcaaggagcgcgagttcgtcgccggcctccgctggggcggccccaccaactacgccgactccgtcaaggaccgcttcaccatctccggcgactccgccaagcacaccatgtacctccagatgaactccctcaagcccgaggacaccgccgtctactactgcggctacaaccccggcggctgggccgtcccctcccagtacgagtacgactcctggggccagggcacccaggtcaccgtctcctccggtaccggcggaggcggatctggcggcggaggtagcggtggcggaggatctgaattcgacatccagatgacacagagccctagcagcctgtctgccagcgtgggagacagagtgaccatcacatgcaaggccagcgaccacatcaacaactggctggcctggtatcagcagaagcctggacaggcccctaagctgctgatctacggcgctaccacactggaaacaggcgtgcccagcagattttctggcagcggctctggcaccgactacaccctgacaatatccagcctccagcctgaggacttcgccacctactactgtcagcagagctggaacaccccttggacattcggccagggcaccaagctggaaatcaagagaggcggaggcggaagtggaggcggaggatctggcggcggaggctctcaagttcagcttcaacagcctggcgctgagctggtcaaacctggcgcttctgtgaagatgagctgcaaagccagcggctacgccttcagcagctactggatcaactggatgaagcagaaacccggccagggactcgaatggatcggccaaatctatcccggcgacggcgacaccaactacaacggcaagttcaagggcagagccacactgaccgccgatacctctagcagcacagcctacatgcagctgagcagcctgaccagcgaagatagcgccgtgtacttctgtgcccggtccatcacaacagtcgtgggctgcgctatggactattggggccagggaacaagcgtgaccgtgtctagtacgcgtatccagaaccctgatcctgccgtgtaccagctgcgggatagcaagagcagcgacaagagcgtgtgtctgttcaccgacttcgacagccagaccaacgtgtcccagagcaaggactccgacgtgtacatcaccgataagtgcgtgctggacatgcggagcatggacttcaagagcaactccgccgtggcctggtccaacaagtccgatttcgcctgcgccaacgccttcaacaacagcattatccccgaggacacattcttcccaagccccgagagcagcgactccaccgaccacgtgaagcccaaagagacagagaacaccaagcagcccagcaagagctgccacaagcccaaggccatcgtgcacaccgagaaagtgaacatgatgagcctgaccgtgctgggcctgcggatgctgttcgccaaaaccgtggccgtgaacttcctgctgaccgccaagctgttcttcctcctcaccgcccgcgccaagagaagcggatctggcgtgaagcagaccctgaatttcgacctgctgaagctggctggcgacgtggaatccaacccaggcccttctagaggccatatgaccgagtacaagcccacggtgcgcctcgccacccgcgacgacgtccccagggccgtacgcaccctcgccgccgcgttcgccgactaccccgccacgcgccacaccgtcgatccggaccgccacatcgagcgggtcaccgagctgcaagaactcttcctcacgcgcgtcgggctcgacatcggcaaggtgtgggtcgcggacgacggcgccgcggtggcggtctggaccacgccggagagcgtcgaagcgggggcggtgttcgccgagatcggcccgcgcatggccgagttgagcggttcccggctggccgcgcagcaacagatggaaggcctcctggcgccgcaccggcccaaggagcccgcgtggttcctggccaccgtcggcgtctcgcccgaccaccagggcaagggtctgggcagcgccgtcgtgctccccggagtggaggcggccgagcgcgccggggtgcccgccttcctggagacctccgcgccccgcaacctccccttctacgagcggctcggcttcaccgtcaccgccgacgtcgaggtgcccgaaggaccgcgcacctggtgcatgacccgcaagcccggtgcctga

SEQ ID NO: 17859 - DNA, 3717 bp, synthetic construct
  source 1..3717: mol_type = other DNA
atggccttaccagtgaccgccttgctcctgccgctggccttgctgctccacgccgccaggccgctcgaggaggacctgaagaacgtgttcccacctgaggtggccgtgttcgagcctagcgaggccgagatcagccacacccagaaagccaccctcgtgtgcctggctaccggcttctaccccgaccatgtggaactgtcttggtgggtcaacggcaaagaggtgcacagcggcgtgtgtaccgacccccagccactgaaagaacagcccgccctgaacgacagccggtactgcctgagcagcagactgagagtgtccgccaccttctggcagaacccccggaaccacttcagatgccaggtgcagttctacggcctgagcgagaacgacgagtggacccaggacagagccaagcccgtgacccagatcgtgtctgccgaagcctggggcagagccgatgatgtgattaagatccactggcaggaaaagaagtccaacaccatcctgggcagccaggaaggcaacaccatgaagaccaacgacacctacatgaagttcagctggctgaccgtgcccgagaagtccctggacaaagaacacagatgcatcgtgcggcacgaaaacaacaagaacggcgtggaccaggaaatcatcttcccacccatcaagaccgatgtgattacaatggaccccaaggacaactgctccaaggacgccaacgataccctgctgctccagctgaccaacaccagcgcctactacatgtacttgttgctgctgctgaagtccgtggtgtacttcgccatcatcacatgctgcctgctgatggctatggtcaagcggaaggacagccggggaagggccaagcgatctggatctggagcaacaaacttctcactactcaaacaagcaggtgacgtggaggagaatcccgggcctactagcatggccttaccagtgaccgccttgctcctgccgctggccttgctgctccacgccgccaggccgggcgtgacacagagccccacacacctgattaagaccagaggccagcaggccacactgagatgcagccctatcagcggccacaccagcgtgtactggtatcagcaggctctcggactgggcctccagttcctgctttggtacgacgagggcgaagagagaaaccggggcaacttccctcctcggttttccggcagacagttccccaactacagcagcgagctgaacgtgaacgccctggaactggaagatagcgccctgtacctgtgtgcctcttctcttggtggacctcgcggactggctggactgagaggggatgagcagtttttcggccctggcaccagactgaccgtgctggaaggcggaggaagcggcggaggatctggcgtgacacagagccccacacacctgattaagaccagaggccagcaggccacactgagatgcagccctatcagcggccacaccagcgtgtactggtatcagcaggctctcggactgggcctccagttcctgctttggtacgacgagggcgaagagagaaaccggggcaacttccctcctcggttttccggcagacagttccccaactacagcagcgagctgaacgtgaacgccctggaactggaagatagcgccctgtacctgtgtgccagctctctcggcggagatgaactgggagccgatggcaacgagcagttctttggccctggcaccagactgaccgtgctggaaggtaccggcggaggcggatctggcggcggaggtagcggtggcggaggatctgaattcgacatccagatgacacagagccctagcagcctgtctgccagcgtgggagacagagtgaccatcacatgcaaggccagcgaccacatcaacaactggctggcctggtatcagcagaagcctggacaggcccctaagctgctgatctacggcgctaccacactggaaacaggcgtgcccagcagattttctggcagcggctctggcaccgactacaccctgacaatatccagcctccagcctgaggacttcgccacctactactgtcagcagagctggaacaccccttggacattcggccagggcaccaagctggaaatcaagagaggcggaggcggaagtggaggcggaggatctggcggcggaggctctcaagttcagcttcaacagcctggcgctgagctggtcaaacctggcgcttctgtgaagatgagctgcaaagccagcggctacgccttcagcagctactggatcaactggatgaagcagaaacccggccagggactcgaatggatcggccaaatctatcccggcgacggcgacaccaactacaacggcaagttcaagggcagagccacactgaccgccgatacctctagcagcacagcctacatgcagctgagcagcctgaccagcgaagatagcgccgtgtacttctgtgcccggtccatcacaacagtcgtgggctgcgctatggactattggggccagggaacaagcgtgaccgtgtctagtacgcgtatccagaaccctgatcctgccgtgtaccagctgcgggatagcaagagcagcgacaagagcgtgtgtctgttcaccgacttcgacagccagaccaacgtgtcccagagcaaggactccgacgtgtacatcaccgataagtgcgtgctggacatgcggagcatggacttcaagagcaactccgccgtggcctggtccaacaagtccgatttcgcctgcgccaacgccttcaacaacagcattatccccgaggacacattcttcccaagccccgagagcagcgactccaccgaccacgtgaagcccaaagagacagagaacaccaagcagcccagcaagagctgccacaagcccaaggccatcgtgcacaccgagaaagtgaacatgatgagcctgaccgtgctgggcctgcggatgctgttcgccaaaaccgtggccgtgaacttcctgctgaccgccaagctgttcttcctcctcaccgcccgcgccaagagaagcggatctggcgtgaagcagaccctgaatttcgacctgctgaagctggctggcgacgtggaatccaacccaggcccttctagaggccatatgaccgagtacaagcccacggtgcgcctcgccacccgcgacgacgtccccagggccgtacgcaccctcgccgccgcgttcgccgactaccccgccacgcgccacaccgtcgatccggaccgccacatcgagcgggtcaccgagctgcaagaactcttcctcacgcgcgtcgggctcgacatcggcaaggtgtgggtcgcggacgacggcgccgcggtggcggtctggaccacgccggagagcgtcgaagcgggggcggtgttcgccgagatcggcccgcgcatggccgagttgagcggttcccggctggccgcgcagcaacagatggaaggcctcctggcgccgcaccggcccaaggagcccgcgtggttcctggccaccgtcggcgtctcgcccgaccaccagggcaagggtctgggcagcgccgtcgtgctccccggagtggaggcggccgagcgcgccggggtgcccgccttcctggagacctccgcgccccgcaacctccccttctacgagcggctcggcttcaccgtcaccgccgacgtcgaggtgcccgaaggaccgcgcacctggtgcatgacccgcaagcccggtgcctga

SEQ ID NO: 17860 - DNA, 2577 bp, synthetic construct
  source 1..2577: mol_type = other DNA
atggccttaccagtgaccgccttgctcctgccgctggccttgctgctccacgccgccaggccgctcgaggaggacctgaagaacgtgttcccacctgaggtggccgtgttcgagcctagcgaggccgagatcagccacacccagaaagccaccctcgtgtgcctggctaccggcttctaccccgaccatgtggaactgtcttggtgggtcaacggcaaagaggtgcacagcggcgtgtgtaccgacccccagccactgaaagaacagcccgccctgaacgacagccggtactgcctgagcagcagactgagagtgtccgccaccttctggcagaacccccggaaccacttcagatgccaggtgcagttctacggcctgagcgagaacgacgagtggacccaggacagagccaagcccgtgacccagatcgtgtctgccgaagcctggggcagagccgatgatgtgattaagatccactggcaggaaaagaagtccaacaccatcctgggcagccaggaaggcaacaccatgaagaccaacgacacctacatgaagttcagctggctgaccgtgcccgagaagtccctggacaaagaacacagatgcatcgtgcggcacgaaaacaacaagaacggcgtggaccaggaaatcatcttcccacccatcaagaccgatgtgattacaatggaccccaaggacaactgctccaaggacgccaacgataccctgctgctccagctgaccaacaccagcgcctactacatgtacttgttgctgctgctgaagtccgtggtgtacttcgccatcatcacatgctgcctgctgatggctatggtcaagcggaaggacagccggggaagggccaagcgatctggatctggagcaacaaacttctcactactcaaacaagcaggtgacgtggaggagaatcccgggcctactagcatggccctgcccgtgacagccctgctgctgcctctggctctgctgctgcacgccgccagacccgatgaattcggctctgacctgggcatcaagctgctgttcgccgctgccaagggccaggacgacgaagtgcggattctgctggctgctggggccgacgtgaacgccaaggatttcgagggctacacccccctgcacgtggccgcctatgatggacacctggaaatcgtggaagtgctgctgaaggctggcgctgatgtgaatgccaaagacagccagggccggacccctctgcatgaagccgcctacagcggccatctggaaattgtggaagtgctgctgaaagccggggcagacgtgaacgctcaggacgacgctggcgagacaccagccgatctggctgcagcttggggccacgaagatatcgccgaggtgctgcagaagacgcgtatccagaaccctgatcctgccgtgtaccagctgcgggatagcaagagcagcgacaagagcgtgtgtctgttcaccgacttcgacagccagaccaacgtgtcccagagcaaggactccgacgtgtacatcaccgataagtgcgtgctggacatgcggagcatggacttcaagagcaactccgccgtggcctggtccaacaagtccgatttcgcctgcgccaacgccttcaacaacagcattatccccgaggacacattcttcccaagccccgagagcagcgactccaccgaccacgtgaagcccaaagagacagagaacaccaagcagcccagcaagagctgccacaagcccaaggccatcgtgcacaccgagaaagtgaacatgatgagcctgaccgtgctgggcctgcggatgctgttcgccaaaaccgtggccgtgaacttcctgctgaccgccaagctgttcttcctcctcaccgcccgcgccaagagaagcggatctggcgtgaagcagaccctgaatttcgacctgctgaagctggctggcgacgtggaatccaacccaggcccttctagaggccatatgaccgagtacaagcccacggtgcgcctcgccacccgcgacgacgtccccagggccgtacgcaccctcgccgccgcgttcgccgactaccccgccacgcgccacaccgtcgatccggaccgccacatcgagcgggtcaccgagctgcaagaactcttcctcacgcgcgtcgggctcgacatcggcaaggtgtgggtcgcggacgacggcgccgcggtggcggtctggaccacgccggagagcgtcgaagcgggggcggtgttcgccgagatcggcccgcgcatggccgagttgagcggttcccggctggccgcgcagcaacagatggaaggcctcctggcgccgcaccggcccaaggagcccgcgtggttcctggccaccgtcggcgtctcgcccgaccaccagggcaagggtctgggcagcgccgtcgtgctccccggagtggaggcggccgagcgcgccggggtgcccgccttcctggagacctccgcgccccgcaacctccccttctacgagcggctcggcttcaccgtcaccgccgacgtcgaggtgcccgaaggaccgcgcacctggtgcatgacccgcaagcccggtgcctga

SEQ ID NO: 17861 - DNA, 2364 bp, synthetic construct
  source 1..2364: mol_type = other DNA
atggccttaccagtgaccgccttgctcctgccgctggccttgctgctccacgccgccaggccgctcgaggaggacctgaagaacgtgttcccacctgaggtggccgtgttcgagcctagcgaggccgagatcagccacacccagaaagccaccctcgtgtgcctggctaccggcttctaccccgaccatgtggaactgtcttggtgggtcaacggcaaagaggtgcacagcggcgtgtgtaccgacccccagccactgaaagaacagcccgccctgaacgacagccggtactgcctgagcagcagactgagagtgtccgccaccttctggcagaacccccggaaccacttcagatgccaggtgcagttctacggcctgagcgagaacgacgagtggacccaggacagagccaagcccgtgacccagatcgtgtctgccgaagcctggggcagagccgatgatgtgattaagatccactggcaggaaaagaagtccaacaccatcctgggcagccaggaaggcaacaccatgaagaccaacgacacctacatgaagttcagctggctgaccgtgcccgagaagtccctggacaaagaacacagatgcatcgtgcggcacgaaaacaacaagaacggcgtggaccaggaaatcatcttcccacccatcaagaccgatgtgattacaatggaccccaaggacaactgctccaaggacgccaacgataccctgctgctccagctgaccaacaccagcgcctactacatgtacttgttgctgctgctgaagtccgtggtgtacttcgccatcatcacatgctgcctgctgatggctatggtcaagcggaaggacagccggggaagggccaagcgatctggatctggagcaacaaacttctcactactcaaacaagcaggtgacgtggaggagaatcccgggcctactagcatggactggatttggcgcatccttttccttgtcggcgctgctaccggcgcccattccttcgaaggcagcggattcgaatacgccaaagagatgcggaacgcctactgggagatcgccctgctgcccaatctgaccaaccagcagaagagagcccccatcagaaagctgtacgacgacccctcccagagcagcgagctgctgtctgaggctaaaaaactgaacgatagccagacgcgtatccagaaccctgatcctgccgtgtaccagctgcgggatagcaagagcagcgacaagagcgtgtgtctgttcaccgacttcgacagccagaccaacgtgtcccagagcaaggactccgacgtgtacatcaccgataagtgcgtgctggacatgcggagcatggacttcaagagcaactccgccgtggcctggtccaacaagtccgatttcgcctgcgccaacgccttcaacaacagcattatccccgaggacacattcttcccaagccccgagagcagcgactccaccgaccacgtgaagcccaaagagacagagaacaccaagcagcccagcaagagctgccacaagcccaaggccatcgtgcacaccgagaaagtgaacatgatgagcctgaccgtgctgggcctgcggatgctgttcgccaaaaccgtggccgtgaacttcctgctgaccgccaagctgttcttcctcctcaccgcccgcgccaagagaagcggatctggcgtgaagcagaccctgaatttcgacctgctgaagctggctggcgacgtggaatccaacccaggcccttctagaggccatatgaccgagtacaagcccacggtgcgcctcgccacccgcgacgacgtccccagggccgtacgcaccctcgccgccgcgttcgccgactaccccgccacgcgccacaccgtcgatccggaccgccacatcgagcgggtcaccgagctgcaagaactcttcctcacgcgcgtcgggctcgacatcggcaaggtgtgggtcgcggacgacggcgccgcggtggcggtctggaccacgccggagagcgtcgaagcgggggcggtgttcgccgagatcggcccgcgcatggccgagttgagcggttcccggctggccgcgcagcaacagatggaaggcctcctggcgccgcaccggcccaaggagcccgcgtggttcctggccaccgtcggcgtctcgcccgaccaccagggcaagggtctgggcagcgccgtcgtgctccccggagtggaggcggccgagcgcgccggggtgcccgccttcctggagacctccgcgccccgcaacctccccttctacgagcggctcggcttcaccgtcaccgccgacgtcgaggtgcccgaaggaccgcgcacctggtgcatgacccgcaagcccggtgcctga

SEQ ID NO: 17862 - DNA, 3030 bp, synthetic construct
  source 1..3030: mol_type = other DNA
atggccttaccagtgaccgccttgctcctgccgctggccttgctgctccacgccgccaggccgctcgaggaggacctgaagaacgtgttcccacctgaggtggccgtgttcgagcctagcgaggccgagatcagccacacccagaaagccaccctcgtgtgcctggctaccggcttctaccccgaccatgtggaactgtcttggtgggtcaacggcaaagaggtgcacagcggcgtgtgtaccgacccccagccactgaaagaacagcccgccctgaacgacagccggtactgcctgagcagcagactgagagtgtccgccaccttctggcagaacccccggaaccacttcagatgccaggtgcagttctacggcctgagcgagaacgacgagtggacccaggacagagccaagcccgtgacccagatcgtgtctgccgaagcctggggcagagccgatgatgtgattaagatccactggcaggaaaagaagtccaacaccatcctgggcagccaggaaggcaacaccatgaagaccaacgacacctacatgaagttcagctggctgaccgtgcccgagaagtccctggacaaagaacacagatgcatcgtgcggcacgaaaacaacaagaacggcgtggaccaggaaatcatcttcccacccatcaagaccgatgtgattacaatggaccccaaggacaactgctccaaggacgccaacgataccctgctgctccagctgaccaacaccagcgcctactacatgtacttgttgctgctgctgaagtccgtggtgtacttcgccatcatcacatgctgcctgctgatggctatggtcaagcggaaggacagccggggaagggccaagcgatctggatctggagcaacaaacttctcactactcaaacaagcaggtgacgtggaggagaatcccgggcctactagcatggccctgcccgtgacagccctgctgctgcctctggctctgctgctgcacgccgccagacccgatgaattcgaggtgcaactggtggaaagcggcggaggcctggtgcaggctggcggatctctgagactgagctgtgccgccagcggcatcaccttcagcatcaacacaatgggctggtacagacaggcccctggcaagcagagggaactggtggccctgatctccagcatcggcgacacctactacgccgacagcgtgaagggccggttcaccatcagccgggacaacgccaagaacaccgtgtacctccagatgaacagcctgaagcccgaggacaccgccgtgtactactgcaagcggttcagaacagccgcccagggcaccgattattggggccagggaacacaagtgaccgtgtcctctctcgagggaggaggcggctccgggggaggcggaagtggaggcggaggatctgggtctggaggaagcggatctggaggctcagggtcagggggctcaggcagtggaggctctttcgaagtgcaactggtggaatctgggggcggactggtgcagccaggcggaagtctgaggctgtcttgtgccgcctccggcagcatcttcggcttcaacgacatggcctggtatcggcaggctcccggaaaacagcgcgagctggtggctctgattagcagagtgggcgtgaccagcagcgccgactctgtgaagggcagattcacaatctccagagtgaacgccaaggatacagtgtacctccagatgaactctctgaaacctgaggatacagcagtgtactattgctacatggaccagcggctggacggcagcacactggcctactggggacagggaactcaagtgacagtgtctagcacgcgtatccagaaccctgatcctgccgtgtaccagctgcgggatagcaagagcagcgacaagagcgtgtgtctgttcaccgacttcgacagccagaccaacgtgtcccagagcaaggactccgacgtgtacatcaccgataagtgcgtgctggacatgcggagcatggacttcaagagcaactccgccgtggcctggtccaacaagtccgatttcgcctgcgccaacgccttcaacaacagcattatccccgaggacacattcttcccaagccccgagagcagcgactccaccgaccacgtgaagcccaaagagacagagaacaccaagcagcccagcaagagctgccacaagcccaaggccatcgtgcacaccgagaaagtgaacatgatgagcctgaccgtgctgggcctgcggatgctgttcgccaaaaccgtggccgtgaacttcctgctgaccgccaagctgttcttcctcctcaccgcccgcgccaagagaagcggatctggcgtgaagcagaccctgaatttcgacctgctgaagctggctggcgacgtggaatccaacccaggcccttctagaggccatatgaccgagtacaagcccacggtgcgcctcgccacccgcgacgacgtccccagggccgtacgcaccctcgccgccgcgttcgccgactaccccgccacgcgccacaccgtcgatccggaccgccacatcgagcgggtcaccgagctgcaagaactcttcctcacgcgcgtcgggctcgacatcggcaaggtgtgggtcgcggacgacggcgccgcggtggcggtctggaccacgccggagagcgtcgaagcgggggcggtgttcgccgagatcggcccgcgcatggccgagttgagcggttcccggctggccgcgcagcaacagatggaaggcctcctggcgccgcaccggcccaaggagcccgcgtggttcctggccaccgtcggcgtctcgcccgaccaccagggcaagggtctgggcagcgccgtcgtgctccccggagtggaggcggccgagcgcgccggggtgcccgccttcctggagacctccgcgccccgcaacctccccttctacgagcggctcggcttcaccgtcaccgccgacgtcgaggtgcccgaaggaccgcgcacctggtgcatgacccgcaagcccggtgcctga

SEQ ID NO: 17863 - DNA, 2772 bp, synthetic construct
  source 1..2772: mol_type = other DNA
atggccttaccagtgaccgccttgctcctgccgctggccttgctgctccacgccgccaggccgctcgaggaggacctgaagaacgtgttcccacctgaggtggccgtgttcgagcctagcgaggccgagatcagccacacccagaaagccaccctcgtgtgcctggctaccggcttctaccccgaccatgtggaactgtcttggtgggtcaacggcaaagaggtgcacagcggcgtgtgtaccgacccccagccactgaaagaacagcccgccctgaacgacagccggtactgcctgagcagcagactgagagtgtccgccaccttctggcagaacccccggaaccacttcagatgccaggtgcagttctacggcctgagcgagaacgacgagtggacccaggacagagccaagcccgtgacccagatcgtgtctgccgaagcctggggcagagccgatgatgtgattaagatccactggcaggaaaagaagtccaacaccatcctgggcagccaggaaggcaacaccatgaagaccaacgacacctacatgaagttcagctggctgaccgtgcccgagaagtccctggacaaagaacacagatgcatcgtgcggcacgaaaacaacaagaacggcgtggaccaggaaatcatcttcccacccatcaagaccgatgtgattacaatggaccccaaggacaactgctccaaggacgccaacgataccctgctgctccagctgaccaacaccagcgcctactacatgtacttgttgctgctgctgaagtccgtggtgtacttcgccatcatcacatgctgcctgctgatggctatggtcaagcggaaggacagccggggaagggccaagcgatctggatctggagcaacaaacttctcactactcaaacaagcaggtgacgtggaggagaatcccgggcctactagcatggcccttccagtcactgccttgctgttgcctctggcgctcctgctccacgccgctagaccgggcatgagaaccgaggacctgcctaaggccgtggtgttcctggaaccccagtggtacagagtgctggaaaaggacagcgtgaccctgaagtgccagggcgcctacagccccgaggacaatagcacccagtggttccacaacgagagcctgatctccagccaggccagcagctacttcatcgacgccgccaccgtggacgacagcggcgagtatagatgccagaccaacctgagcaccctgagcgaccccgtgcagctggaagtgcacatcggatggctgctgctgcaggcccccagatgggtgttcaaagaagaggaccccatccacctgagatgccactcttggaagaacaccgccctgcacaaagtgacctacctgcagaacggcaagggcagaaagtacttccaccacaacagcgacttctacatccccaaggccaccctgaaggactccggctcctacttctgcagaggcctcgtgggcagcaagaacgtgtccagcgagacagtgaacatcaccatcacccagggcctggccgtgtctaccatcagcagctttttcccacccggctaccagacgcgtatccagaaccctgatcctgccgtgtaccagctgcgggatagcaagagcagcgacaagagcgtgtgtctgttcaccgacttcgacagccagaccaacgtgtcccagagcaaggactccgacgtgtacatcaccgataagtgcgtgctggacatgcggagcatggacttcaagagcaactccgccgtggcctggtccaacaagtccgatttcgcctgcgccaacgccttcaacaacagcattatccccgaggacacattcttcccaagccccgagagcagcgactccaccgaccacgtgaagcccaaagagacagagaacaccaagcagcccagcaagagctgccacaagcccaaggccatcgtgcacaccgagaaagtgaacatgatgagcctgaccgtgctgggcctgcggatgctgttcgccaaaaccgtggccgtgaacttcctgctgaccgccaagctgttcttcctcctcaccgcccgcgccaagagaagcggatctggcgtgaagcagaccctgaatttcgacctgctgaagctggctggcgacgtggaatccaacccaggcccttctagaggccatatgaccgagtacaagcccacggtgcgcctcgccacccgcgacgacgtccccagggccgtacgcaccctcgccgccgcgttcgccgactaccccgccacgcgccacaccgtcgatccggaccgccacatcgagcgggtcaccgagctgcaagaactcttcctcacgcgcgtcgggctcgacatcggcaaggtgtgggtcgcggacgacggcgccgcggtggcggtctggaccacgccggagagcgtcgaagcgggggcggtgttcgccgagatcggcccgcgcatggccgagttgagcggttcccggctggccgcgcagcaacagatggaaggcctcctggcgccgcaccggcccaaggagcccgcgtggttcctggccaccgtcggcgtctcgcccgaccaccagggcaagggtctgggcagcgccgtcgtgctccccggagtggaggcggccgagcgcgccggggtgcccgccttcctggagacctccgcgccccgcaacctccccttctacgagcggctcggcttcaccgtcaccgccgacgtcgaggtgcccgaaggaccgcgcacctggtgcatgacccgcaagcccggtgcctga

SEQ ID NO: 17864 - DNA, 1653 bp, synthetic construct
  source 1..1653: mol_type = other DNA
atggccttaccagtgaccgccttgctcctgccgctggccttgctgctccacgccgccaggccgctcgaggaggacctgaagaacgtgttcccacctgaggtggccgtgttcgagcctagcgaggccgagatcagccacacccagaaagccaccctcgtgtgcctggctaccggcttctaccccgaccatgtggaactgtcttggtgggtcaacggcaaagaggtgcacagcggcgtgtgtaccgacccccagccactgaaagaacagcccgccctgaacgacagccggtactgcctgagcagcagactgagagtgtccgccaccttctggcagaacccccggaaccacttcagatgccaggtgcagttctacggcctgagcgagaacgacgagtggacccaggacagagccaagcccgtgacccagatcgtgtctgccgaagcctggggcagagccgatgatgtgattaagatccactggcaggaaaagaagtccaacaccatcctgggcagccaggaaggcaacaccatgaagaccaacgacacctacatgaagttcagctggctgaccgtgcccgagaagtccctggacaaagaacacagatgcatcgtgcggcacgaaaacaacaagaacggcgtggaccaggaaatcatcttcccacccatcaagaccgatgtgattacaatggaccccaaggacaactgctccaaggacgccaacgataccctgctgctccagctgaccaacaccagcgcctactacatgtacttgttgctgctgctgaagtccgtggtgtacttcgccatcatcacatgctgcctgctgatggctatggtcaagcggaaggacagccggggaagggccaagcgatctggatctggagcaacaaacttctcactactcaaacaagcaggtgacgtggaggagaatcccgggcctactagcgccaccatggccttaccagtgaccgccttgctcctgccgctggccttgctgctccacgccgccaggccgatggaccccgacctggaaatcagagccgccttcctgcggcagagaaacacagccctgagaacagaggtggccgagctggaacaagaggtgcagcggctggaaaacgaggtgtcccagtacgagacaagatacggccctctcggaggcggaaaaacgcgtatccagaaccctgatcctgccgtgtaccagctgcgggatagcaagagcagcgacaagagcgtgtgtctgttcaccgacttcgacagccagaccaacgtgtcccagagcaaggactccgacgtgtacatcaccgataagtgcgtgctggacatgcggagcatggacttcaagagcaactccgccgtggcctggtccaacaagtccgatttcgcctgcgccaacgccttcaacaacagcattatccccgaggacacattcttcccaagccccgagagcagcgactccaccgaccacgtgaagcccaaagagacagagaacaccaagcagcccagcaagagctgccacaagcccaaggccatcgtgcacaccgagaaagtgaacatgatgagcctgaccgtgctgggcctgcggatgctgttcgccaaaaccgtggccgtgaacttcctgctgaccgccaagctgttcttcctcctcaccgcc

SEQ ID NO: 17865 - DNA, 1653 bp, synthetic construct
  source 1..1653: mol_type = other DNA
atggccttaccagtgaccgccttgctcctgccgctggccttgctgctccacgccgccaggccgctcgaggaggacctgaagaacgtgttcccacctgaggtggccgtgttcgagcctagcgaggccgagatcagccacacccagaaagccaccctcgtgtgcctggctaccggcttctaccccgaccatgtggaactgtcttggtgggtcaacggcaaagaggtgcacagcggcgtgtgtaccgacccccagccactgaaagaacagcccgccctgaacgacagccggtactgcctgagcagcagactgagagtgtccgccaccttctggcagaacccccggaaccacttcagatgccaggtgcagttctacggcctgagcgagaacgacgagtggacccaggacagagccaagcccgtgacccagatcgtgtctgccgaagcctggggcagagccgatgatgtgattaagatccactggcaggaaaagaagtccaacaccatcctgggcagccaggaaggcaacaccatgaagaccaacgacacctacatgaagttcagctggctgaccgtgcccgagaagtccctggacaaagaacacagatgcatcgtgcggcacgaaaacaacaagaacggcgtggaccaggaaatcatcttcccacccatcaagaccgatgtgattacaatggaccccaaggacaactgctccaaggacgccaacgataccctgctgctccagctgaccaacaccagcgcctactacatgtacttgttgctgctgctgaagtccgtggtgtacttcgccatcatcacatgctgcctgctgatggctatggtcaagcggaaggacagccggggaagggccaagcgatctggatctggagcaacaaacttctcactactcaaacaagcaggtgacgtggaggagaatcccgggcctactagcgccaccatggccttaccagtgaccgccttgctcctgccgctggccttgctgctccacgccgccaggccgatggaccctgatctcgaaattgaggccgcctttctggaacgcgagaacactgccctggaaaccagggtcgcagagctgagacagagagtgcagagactgcggaacagagtgtctcagtaccgcaccagatatggcccactcggcggaggtaaaacgcgtatccagaaccctgatcctgccgtgtaccagctgcgggatagcaagagcagcgacaagagcgtgtgtctgttcaccgacttcgacagccagaccaacgtgtcccagagcaaggactccgacgtgtacatcaccgataagtgcgtgctggacatgcggagcatggacttcaagagcaactccgccgtggcctggtccaacaagtccgatttcgcctgcgccaacgccttcaacaacagcattatccccgaggacacattcttcccaagccccgagagcagcgactccaccgaccacgtgaagcccaaagagacagagaacaccaagcagcccagcaagagctgccacaagcccaaggccatcgtgcacaccgagaaagtgaacatgatgagcctgaccgtgctgggcctgcggatgctgttcgccaaaaccgtggccgtgaacttcctgctgaccgccaagctgttcttcctcctcaccgcc

SEQ ID NO: 17866 - DNA, 1584 bp, synthetic construct
  source 1..1584: mol_type = other DNA
atggccttaccagtgaccgccttgctcctgccgctggccttgctgctccacgccgccaggccgctcgaggaggacctgaagaacgtgttcccacctgaggtggccgtgttcgagcctagcgaggccgagatcagccacacccagaaagccaccctcgtgtgcctggctaccggcttctaccccgaccatgtggaactgtcttggtgggtcaacggcaaagaggtgcacagcggcgtgtgtaccgacccccagccactgaaagaacagcccgccctgaacgacagccggtactgcctgagcagcagactgagagtgtccgccaccttctggcagaacccccggaaccacttcagatgccaggtgcagttctacggcctgagcgagaacgacgagtggacccaggacagagccaagcccgtgacccagatcgtgtctgccgaagcctggggcagagccgatgatgtgattaagatccactggcaggaaaagaagtccaacaccatcctgggcagccaggaaggcaacaccatgaagaccaacgacacctacatgaagttcagctggctgaccgtgcccgagaagtccctggacaaagaacacagatgcatcgtgcggcacgaaaacaacaagaacggcgtggaccaggaaatcatcttcccacccatcaagaccgatgtgattacaatggaccccaaggacaactgctccaaggacgccaacgataccctgctgctccagctgaccaacaccagcgcctactacatgtacttgttgctgctgctgaagtccgtggtgtacttcgccatcatcacatgctgcctgctgatggctatggtcaagcggaaggacagccggggaagggccaagcgatctggatctggagcaacaaacttctcactactcaaacaagcaggtgacgtggaggagaatcccgggcctactagcgccaccatggccttaccagtgaccgccttgctcctgccgctggccttgctgctccacgccgccaggccggaagttgctgccctcgagaaggaggtagcagctttggaaaaagaagtcgcagcccttgagaaagaagttgcggctctggagaagacgcgtatccagaaccctgatcctgccgtgtaccagctgcgggatagcaagagcagcgacaagagcgtgtgtctgttcaccgacttcgacagccagaccaacgtgtcccagagcaaggactccgacgtgtacatcaccgataagtgcgtgctggacatgcggagcatggacttcaagagcaactccgccgtggcctggtccaacaagtccgatttcgcctgcgccaacgccttcaacaacagcattatccccgaggacacattcttcccaagccccgagagcagcgactccaccgaccacgtgaagcccaaagagacagagaacaccaagcagcccagcaagagctgccacaagcccaaggccatcgtgcacaccgagaaagtgaacatgatgagcctgaccgtgctgggcctgcggatgctgttcgccaaaaccgtggccgtgaacttcctgctgaccgccaagctgttcttcctcctcaccgcc

SEQ ID NO: 17867 - DNA, 2358 bp, synthetic construct
  source 1..2358: mol_type = other DNA
atggccttaccagtgaccgccttgctcctgccgctggccttgctgctccacgccgccaggccgctcgaggaggacctgaagaacgtgttcccacctgaggtggccgtgttcgagcctagcgaggccgagatcagccacacccagaaagccaccctcgtgtgcctggctaccggcttctaccccgaccatgtggaactgtcttggtgggtcaacggcaaagaggtgcacagcggcgtgtgtaccgacccccagccactgaaagaacagcccgccctgaacgacagccggtactgcctgagcagcagactgagagtgtccgccaccttctggcagaacccccggaaccacttcagatgccaggtgcagttctacggcctgagcgagaacgacgagtggacccaggacagagccaagcccgtgacccagatcgtgtctgccgaagcctggggcagagccgatgatgtgattaagatccactggcaggaaaagaagtccaacaccatcctgggcagccaggaaggcaacaccatgaagaccaacgacacctacatgaagttcagctggctgaccgtgcccgagaagtccctggacaaagaacacagatgcatcgtgcggcacgaaaacaacaagaacggcgtggaccaggaaatcatcttcccacccatcaagaccgatgtgattacaatggaccccaaggacaactgctccaaggacgccaacgataccctgctgctccagctgaccaacaccagcgcctactacatgtacttgttgctgctgctgaagtccgtggtgtacttcgccatcatcacatgctgcctgctgatggctatggtcaagcggaaggacagccggggaagggccaagcgatctggatctggagcaacaaacttctcactactcaaacaagcaggtgacgtggaggagaatcccgggcctactagcgccaccatggccttaccagtgaccgccttgctcctgccgctggccttgctgctccacgccgccaggccgctgttcaatcaagaggtgcagatccctctgaccgagagctactgtggcccctgtcctaagaactggatctgctacaagaacaactgctaccagttcttcgacgagagcaagaattggtacgagagccaggccagctgcatgagccagaatgccagcctgctgaaggtgtacagcaaagaggaccaggacctgctgaaactggtcaagagcgcccactggatgggccttgtgcacatccccaccaatggctcttggcagtgggaggacggcagcattctgagccctaacctgctgaccatcatcgagatgcagaagggcgactgcgccctgtacgccagcagctttaagggctacatcgagaattgcagcaccccgaacacctacatctgtatgcagagaaccgtttctggcggaggcggctctggaggaggcggaagtggcggcggaggcgacctctttaatcaagaagtccagattccactcaccgaatcctactgcggaccttgtccaaaaaattggatttgttataagaacaactgttatcaattctttgatgagtctaaaaattggtatgagtcccaggcttcctgcatgtctcagaacgcttctctgctgaaagtctactctaaagaagatcaggatctcctgaagctcgtcaagtctgcccattggatggggctcgtccacattcctaccaacggaagctggcaatgggaagatggctccatcctgtctccaaatctgctcacgattattgaaatgcagaaaggggattgtgctctctacgccagctccttcaagggatatattgagaactgtagcacgcccaatacttatatctgtatgcaacggaccgtgacgcgtatccagaaccctgatcctgccgtgtaccagctgcgggatagcaagagcagcgacaagagcgtgtgtctgttcaccgacttcgacagccagaccaacgtgtcccagagcaaggactccgacgtgtacatcaccgataagtgcgtgctggacatgcggagcatggacttcaagagcaactccgccgtggcctggtccaacaagtccgatttcgcctgcgccaacgccttcaacaacagcattatccccgaggacacattcttcccaagccccgagagcagcgactccaccgaccacgtgaagcccaaagagacagagaacaccaagcagcccagcaagagctgccacaagcccaaggccatcgtgcacaccgagaaagtgaacatgatgagcctgaccgtgctgggcctgcggatgctgttcgccaaaaccgtggccgtgaacttcctgctgaccgccaagctgttcttcctcctcaccgcc

SEQ ID NO: 17868 - DNA, 2358 bp, synthetic construct
  source 1..2358: mol_type = other DNA
atggccttaccagtgaccgccttgctcctgccgctggccttgctgctccacgccgccaggccgctcgaggaggacctgaagaacgtgttcccacctgaggtggccgtgttcgagcctagcgaggccgagatcagccacacccagaaagccaccctcgtgtgcctggctaccggcttctaccccgaccatgtggaactgtcttggtgggtcaacggcaaagaggtgcacagcggcgtgtgtaccgacccccagccactgaaagaacagcccgccctgaacgacagccggtactgcctgagcagcagactgagagtgtccgccaccttctggcagaacccccggaaccacttcagatgccaggtgcagttctacggcctgagcgagaacgacgagtggacccaggacagagccaagcccgtgacccagatcgtgtctgccgaagcctggggcagagccgatgatgtgattaagatccactggcaggaaaagaagtccaacaccatcctgggcagccaggaaggcaacaccatgaagaccaacgacacctacatgaagttcagctggctgaccgtgcccgagaagtccctggacaaagaacacagatgcatcgtgcggcacgaaaacaacaagaacggcgtggaccaggaaatcatcttcccacccatcaagaccgatgtgattacaatggaccccaaggacaactgctccaaggacgccaacgataccctgctgctccagctgaccaacaccagcgcctactacatgtacttgttgctgctgctgaagtccgtggtgtacttcgccatcatcacatgctgcctgctgatggctatggtcaagcggaaggacagccggggaagggccaagcgatctggatctggagcaacaaacttctcactactcaaacaagcaggtgacgtggaggagaatcccgggcctactagcgccaccatggccttaccagtgaccgccttgctcctgccgctggccttgctgctccacgccgccaggccgctgttcaatcaagaggtgcagatccctctgaccgagagctactgtggcccctgtcctaagaactggatctgctacaagaacaactgctaccagttcttcgacgagagcaagaattggtacgagagccaggccagctgcatgagccagaatgccagcctgctgaaggtgtacagcaaagaggaccaggacctgctgaaactggtcaagagcgcccactggatgggccttgtgcacatccccaccaatggctcttggcagtgggaggacggcagcattctgagccctaacctgctgaccatcatcgagatgcagaagggcgactgcgccctgtacgccagcagctttaagggcttcatcgagaattgcagcaccccgaacacctacatctgtatgcagagaaccgttggcggaggcggaagtggaggcggaggatctggcggcggaggctctgacctctttaatcaagaagtccagattccactcaccgaatcctactgcggaccttgtccaaaaaattggatttgttataagaacaactgttatcaattctttgatgagtctaaaaattggtatgagtcccaggcttcctgcatgtctcagaacgcttctctgctgaaagtctactctaaagaagatcaggatctcctgaagctcgtcaagtctgcccattggatggggctcgtccacattcctaccaacggaagctggcaatgggaagatggctccatcctgtctccaaatctgctcacgattattgaaatgcagaaaggggattgtgctctctacgccagctccttcaagggatttattgagaactgtagcacgcccaatacttatatctgtatgcaacggaccgtgacgcgtatccagaaccctgatcctgccgtgtaccagctgcgggatagcaagagcagcgacaagagcgtgtgtctgttcaccgacttcgacagccagaccaacgtgtcccagagcaaggactccgacgtgtacatcaccgataagtgcgtgctggacatgcggagcatggacttcaagagcaactccgccgtggcctggtccaacaagtccgatttcgcctgcgccaacgccttcaacaacagcattatccccgaggacacattcttcccaagccccgagagcagcgactccaccgaccacgtgaagcccaaagagacagagaacaccaagcagcccagcaagagctgccacaagcccaaggccatcgtgcacaccgagaaagtgaacatgatgagcctgaccgtgctgggcctgcggatgctgttcgccaaaaccgtggccgtgaacttcctgctgaccgccaagctgttcttcctcctcaccgcc

SEQ ID NO: 17869 - DNA, 2436 bp, synthetic construct
  source 1..2436: mol_type = other DNA
atggccttaccagtgaccgccttgctcctgccgctggccttgctgctccacgccgccaggccgctcgaggaggacctgaagaacgtgttcccacctgaggtggccgtgttcgagcctagcgaggccgagatcagccacacccagaaagccaccctcgtgtgcctggctaccggcttctaccccgaccatgtggaactgtcttggtgggtcaacggcaaagaggtgcacagcggcgtgtgtaccgacccccagccactgaaagaacagcccgccctgaacgacagccggtactgcctgagcagcagactgagagtgtccgccaccttctggcagaacccccggaaccacttcagatgccaggtgcagttctacggcctgagcgagaacgacgagtggacccaggacagagccaagcccgtgacccagatcgtgtctgccgaagcctggggcagagccgatgatgtgattaagatccactggcaggaaaagaagtccaacaccatcctgggcagccaggaaggcaacaccatgaagaccaacgacacctacatgaagttcagctggctgaccgtgcccgagaagtccctggacaaagaacacagatgcatcgtgcggcacgaaaacaacaagaacggcgtggaccaggaaatcatcttcccacccatcaagaccgatgtgattacaatggaccccaaggacaactgctccaaggacgccaacgataccctgctgctccagctgaccaacaccagcgcctactacatgtacttgttgctgctgctgaagtccgtggtgtacttcgccatcatcacatgctgcctgctgatggctatggtcaagcggaaggacagccggggaagggccaagcgatctggatctggagcaacaaacttctcactactcaaacaagcaggtgacgtggaggagaatcccgggcctactagcatggccttaccagtgaccgccttgctcctgccgctggccttgctgctccacgccgccaggccgatggaccccgacctggaaatcagagccgccttcctgcggcagagaaacacagccctgagaacagaggtggccgagctggaacaagaggtgcagcggctggaaaacgaggtgtcccagtacgagacaagatacggccctctcggaggcggaaaaggtaccggcggaggcggatctggcggcggaggtagcggtggcggaggatctgaattcgacatccagatgacacagagccctagcagcctgtctgccagcgtgggagacagagtgaccatcacatgcaaggccagcgaccacatcaacaactggctggcctggtatcagcagaagcctggacaggcccctaagctgctgatctacggcgctaccacactggaaacaggcgtgcccagcagattttctggcagcggctctggcaccgactacaccctgacaatatccagcctccagcctgaggacttcgccacctactactgtcagcagagctggaacaccccttggacattcggccagggcaccaagctggaaatcaagagaggcggaggcggaagtggaggcggaggatctggcggcggaggctctcaagttcagcttcaacagcctggcgctgagctggtcaaacctggcgcttctgtgaagatgagctgcaaagccagcggctacgccttcagcagctactggatcaactggatgaagcagaaacccggccagggactcgaatggatcggccaaatctatcccggcgacggcgacaccaactacaacggcaagttcaagggcagagccacactgaccgccgatacctctagcagcacagcctacatgcagctgagcagcctgaccagcgaagatagcgccgtgtacttctgtgcccggtccatcacaacagtcgtgggctgcgctatggactattggggccagggaacaagcgtgaccgtgtctagtacgcgtatccagaaccctgatcctgccgtgtaccagctgcgggatagcaagagcagcgacaagagcgtgtgtctgttcaccgacttcgacagccagaccaacgtgtcccagagcaaggactccgacgtgtacatcaccgataagtgcgtgctggacatgcggagcatggacttcaagagcaactccgccgtggcctggtccaacaagtccgatttcgcctgcgccaacgccttcaacaacagcattatccccgaggacacattcttcccaagccccgagagcagcgactccaccgaccacgtgaagcccaaagagacagagaacaccaagcagcccagcaagagctgccacaagcccaaggccatcgtgcacaccgagaaagtgaacatgatgagcctgaccgtgctgggcctgcggatgctgttcgccaaaaccgtggccgtgaacttcctgctgaccgccaagctgttcttcctcctcaccgcc

SEQ ID NO: 17870 - DNA, 3141 bp, synthetic construct
  source 1..3141: mol_type = other DNA
atggccttaccagtgaccgccttgctcctgccgctggccttgctgctccacgccgccaggccgctcgaggaggacctgaagaacgtgttcccacctgaggtggccgtgttcgagcctagcgaggccgagatcagccacacccagaaagccaccctcgtgtgcctggctaccggcttctaccccgaccatgtggaactgtcttggtgggtcaacggcaaagaggtgcacagcggcgtgtgtaccgacccccagccactgaaagaacagcccgccctgaacgacagccggtactgcctgagcagcagactgagagtgtccgccaccttctggcagaacccccggaaccacttcagatgccaggtgcagttctacggcctgagcgagaacgacgagtggacccaggacagagccaagcccgtgacccagatcgtgtctgccgaagcctggggcagagccgatgatgtgattaagatccactggcaggaaaagaagtccaacaccatcctgggcagccaggaaggcaacaccatgaagaccaacgacacctacatgaagttcagctggctgaccgtgcccgagaagtccctggacaaagaacacagatgcatcgtgcggcacgaaaacaacaagaacggcgtggaccaggaaatcatcttcccacccatcaagaccgatgtgattacaatggaccccaaggacaactgctccaaggacgccaacgataccctgctgctccagctgaccaacaccagcgcctactacatgtacttgttgctgctgctgaagtccgtggtgtacttcgccatcatcacatgctgcctgctgatggctatggtcaagcggaaggacagccggggaagggccaagcgatctggatctggagcaacaaacttctcactactcaaacaagcaggtgacgtggaggagaatcccgggcctactagcatggccttaccagtgaccgccttgctcctgccgctggccttgctgctccacgccgccaggccgctgttcaatcaagaggtgcagatccctctgaccgagagctactgtggcccctgtcctaagaactggatctgctacaagaacaactgctaccagttcttcgacgagagcaagaattggtacgagagccaggccagctgcatgagccagaatgccagcctgctgaaggtgtacagcaaagaggaccaggacctgctgaaactggtcaagagcgcccactggatgggccttgtgcacatccccaccaatggctcttggcagtgggaggacggcagcattctgagccctaacctgctgaccatcatcgagatgcagaagggcgactgcgccctgtacgccagcagctttaagggcttcatcgagaattgcagcaccccgaacacctacatctgtatgcagagaaccgttggcggaggcggaagtggaggcggaggatctggcggcggaggctctgacctctttaatcaagaagtccagattccactcaccgaatcctactgcggaccttgtccaaaaaattggatttgttataagaacaactgttatcaattctttgatgagtctaaaaattggtatgagtcccaggcttcctgcatgtctcagaacgcttctctgctgaaagtctactctaaagaagatcaggatctcctgaagctcgtcaagtctgcccattggatggggctcgtccacattcctaccaacggaagctggcaatgggaagatggctccatcctgtctccaaatctgctcacgattattgaaatgcagaaaggggattgtgctctctacgccagctccttcaagggatttattgagaactgtagcacgcccaatacttatatctgtatgcaacggaccgtgggtaccggcggaggcggatctggcggcggaggtagcggtggcggaggatctgaattcgacatccagatgacacagagccctagcagcctgtctgccagcgtgggagacagagtgaccatcacatgcaaggccagcgaccacatcaacaactggctggcctggtatcagcagaagcctggacaggcccctaagctgctgatctacggcgctaccacactggaaacaggcgtgcccagcagattttctggcagcggctctggcaccgactacaccctgacaatatccagcctccagcctgaggacttcgccacctactactgtcagcagagctggaacaccccttggacattcggccagggcaccaagctggaaatcaagagaggcggaggcggaagtggaggcggaggatctggcggcggaggctctcaagttcagcttcaacagcctggcgctgagctggtcaaacctggcgcttctgtgaagatgagctgcaaagccagcggctacgccttcagcagctactggatcaactggatgaagcagaaacccggccagggactcgaatggatcggccaaatctatcccggcgacggcgacaccaactacaacggcaagttcaagggcagagccacactgaccgccgatacctctagcagcacagcctacatgcagctgagcagcctgaccagcgaagatagcgccgtgtacttctgtgcccggtccatcacaacagtcgtgggctgcgctatggactattggggccagggaacaagcgtgaccgtgtctagtacgcgtatccagaaccctgatcctgccgtgtaccagctgcgggatagcaagagcagcgacaagagcgtgtgtctgttcaccgacttcgacagccagaccaacgtgtcccagagcaaggactccgacgtgtacatcaccgataagtgcgtgctggacatgcggagcatggacttcaagagcaactccgccgtggcctggtccaacaagtccgatttcgcctgcgccaacgccttcaacaacagcattatccccgaggacacattcttcccaagccccgagagcagcgactccaccgaccacgtgaagcccaaagagacagagaacaccaagcagcccagcaagagctgccacaagcccaaggccatcgtgcacaccgagaaagtgaacatgatgagcctgaccgtgctgggcctgcggatgctgttcgccaaaaccgtggccgtgaacttcctgctgaccgccaagctgttcttcctcctcaccgcc

SEQ ID NO: 17871 - DNA, 2256 bp, synthetic construct
  source 1..2256: mol_type = other DNA
atggccttaccagtgaccgccttgctcctgccgctggccttgctgctccacgccgccaggccgctcgaggaggacctgaagaacgtgttcccacctgaggtggccgtgttcgagcctagcgaggccgagatcagccacacccagaaagccaccctcgtgtgcctggctaccggcttctaccccgaccatgtggaactgtcttggtgggtcaacggcaaagaggtgcacagcggcgtgtgtaccgacccccagccactgaaagaacagcccgccctgaacgacagccggtactgcctgagcagcagactgagagtgtccgccaccttctggcagaacccccggaaccacttcagatgccaggtgcagttctacggcctgagcgagaacgacgagtggacccaggacagagccaagcccgtgacccagatcgtgtctgccgaagcctggggcagagccgatgatgtgattaagatccactggcaggaaaagaagtccaacaccatcctgggcagccaggaaggcaacaccatgaagaccaacgacacctacatgaagttcagctggctgaccgtgcccgagaagtccctggacaaagaacacagatgcatcgtgcggcacgaaaacaacaagaacggcgtggaccaggaaatcatcttcccacccatcaagaccgatgtgattacaatggaccccaaggacaactgctccaaggacgccaacgataccctgctgctccagctgaccaacaccagcgcctactacatgtacttgttgctgctgctgaagtccgtggtgtacttcgccatcatcacatgctgcctgctgatggctatggtcaagcggaaggacagccggggaagggccaagcgatctggatctggagcaacaaacttctcactactcaaacaagcaggtgacgtggaggagaatcccgggcctactagcatggccttaccagtgaccgccttgctcctgccgctggccttgctgctccacgccgccaggccgcagtctgtgctgacacagcctcctagtgtgtctggcgctcctggacagagagtgaccatctcttgtaccggcagcagcagcaatatcggagccggctatgacgtgcactggtatcagcagctccctggcacagcccctaaactgctgatcttcggcaacagcaacagacccagcggcgtgcccgatagattcagcggctttaagagcggcacaagcgccagcctggctatcactggactgcaagccgaggacgaggccgactacttctgccagagctacgatagcagcctgagcggcagcggagtgtttggcacaggcaccaaagtgacagtgcttggcggcggaggcggaagtggaggcggaggatctggcggcggaggctctcaaatgcaactggttcaaagcggcggtggcctggtgcaacctggaagaagtctgagactgagctgtgccgccagcggcttcaccttcgatgattacgccatgcactgggtccgacaggcccctggaaaaggactggaatgggtgtccggcatctcctggaatagcggctctatcggctacgccgacagcgtgaagggcagattcaccatcagccgggacaacgccaagaacagcctgtacctccagatgaactccctgagagccgaggatacagccctgtactactgcgccaaggacatccacagcggcagctactacggcctgctgtactacgctatggacgtgtggggccagggcacaaccgtgacagtttcttctacgcgtatccagaaccctgatcctgccgtgtaccagctgcgggatagcaagagcagcgacaagagcgtgtgtctgttcaccgacttcgacagccagaccaacgtgtcccagagcaaggactccgacgtgtacatcaccgataagtgcgtgctggacatgcggagcatggacttcaagagcaactccgccgtggcctggtccaacaagtccgatttcgcctgcgccaacgccttcaacaacagcattatccccgaggacacattcttcccaagccccgagagcagcgactccaccgaccacgtgaagcccaaagagacagagaacaccaagcagcccagcaagagctgccacaagcccaaggccatcgtgcacaccgagaaagtgaacatgatgagcctgaccgtgctgggcctgcggatgctgttcgccaaaaccgtggccgtgaacttcctgctgaccgccaagctgttcttcctcctcaccgcc

SEQ ID NO: 17872 - DNA, 1767 bp, synthetic construct
  source 1..1767: mol_type = other DNA
atggccttaccagtgaccgccttgctcctgccgctggccttgctgctccacgccgccaggccgctcgaggaggacctgaagaacgtgttcccacctgaggtggccgtgttcgagcctagcgaggccgagatcagccacacccagaaagccaccctcgtgtgcctggctaccggcttctaccccgaccatgtggaactgtcttggtgggtcaacggcaaagaggtgcacagcggcgtgtgtaccgacccccagccactgaaagaacagcccgccctgaacgacagccggtactgcctgagcagcagactgagagtgtccgccaccttctggcagaacccccggaaccacttcagatgccaggtgcagttctacggcctgagcgagaacgacgagtggacccaggacagagccaagcccgtgacccagatcgtgtctgccgaagcctggggcagagccgatgatgtgattaagatccactggcaggaaaagaagtccaacaccatcctgggcagccaggaaggcaacaccatgaagaccaacgacacctacatgaagttcagctggctgaccgtgcccgagaagtccctggacaaagaacacagatgcatcgtgcggcacgaaaacaacaagaacggcgtggaccaggaaatcatcttcccacccatcaagaccgatgtgattacaatggaccccaaggacaactgctccaaggacgccaacgataccctgctgctccagctgaccaacaccagcgcctactacatgtacttgttgctgctgctgaagtccgtggtgtacttcgccatcatcacatgctgcctgctgatggctatggtcaagcggaaggacagccggggaagggccaagcgatctggatctggagcaacaaacttctcactactcaaacaagcaggtgacgtggaggagaatcccgggcctactagcatggccttaccagtgaccgccttgctcctgccgctggccttgctgctccacgccgccaggccgatgtgtatgccctgcttcaccaccgaccatcagatggcccggaagtgcgacgattgctgtggcggaaaaggcagaggcaagtgctacggccctcagtgcttgtgtagactcgagggcggaggcggaagtggaggcggaggatctggcggcggaggctctttcgaagtgtgtatgccttgttttaccacggatcaacaaatggctcgcaagtgttctgactgctgcggaggcaaaggccggggaaagtgttatggcccacagtgtctgtgccggacgcgtatccagaaccctgatcctgccgtgtaccagctgcgggatagcaagagcagcgacaagagcgtgtgtctgttcaccgacttcgacagccagaccaacgtgtcccagagcaaggactccgacgtgtacatcaccgataagtgcgtgctggacatgcggagcatggacttcaagagcaactccgccgtggcctggtccaacaagtccgatttcgcctgcgccaacgccttcaacaacagcattatccccgaggacacattcttcccaagccccgagagcagcgactccaccgaccacgtgaagcccaaagagacagagaacaccaagcagcccagcaagagctgccacaagcccaaggccatcgtgcacaccgagaaagtgaacatgatgagcctgaccgtgctgggcctgcggatgctgttcgccaaaaccgtggccgtgaacttcctgctgaccgccaagctgttcttcctcctcaccgcc

SEQ ID NO: 17873 - DNA, 2556 bp, synthetic construct
  source 1..2556: mol_type = other DNA
atggccttaccagtgaccgccttgctcctgccgctggccttgctgctccacgccgccaggccgctcgaggaggacctgaagaacgtgttcccacctgaggtggccgtgttcgagcctagcgaggccgagatcagccacacccagaaagccaccctcgtgtgcctggctaccggcttctaccccgaccatgtggaactgtcttggtgggtcaacggcaaagaggtgcacagcggcgtgtgtaccgacccccagccactgaaagaacagcccgccctgaacgacagccggtactgcctgagcagcagactgagagtgtccgccaccttctggcagaacccccggaaccacttcagatgccaggtgcagttctacggcctgagcgagaacgacgagtggacccaggacagagccaagcccgtgacccagatcgtgtctgccgaagcctggggcagagccgatgatgtgattaagatccactggcaggaaaagaagtccaacaccatcctgggcagccaggaaggcaacaccatgaagaccaacgacacctacatgaagttcagctggctgaccgtgcccgagaagtccctggacaaagaacacagatgcatcgtgcggcacgaaaacaacaagaacggcgtggaccaggaaatcatcttcccacccatcaagaccgatgtgattacaatggaccccaaggacaactgctccaaggacgccaacgataccctgctgctccagctgaccaacaccagcgcctactacatgtacttgttgctgctgctgaagtccgtggtgtacttcgccatcatcacatgctgcctgctgatggctatggtcaagcggaaggacagccggggaagggccaagcgatctggatctggagcaacaaacttctcactactcaaacaagcaggtgacgtggaggagaatcccgggcctactagcatggccttaccagtgaccgccttgctcctgccgctggccttgctgctccacgccgccaggccgatgtgtatgccctgcttcaccaccgaccatcagatggcccggaagtgcgacgattgctgtggcggaaaaggcagaggcaagtgctacggccctcagtgcttgtgtagactcgagggcggaggcggaagtggaggcggaggatctggcggcggaggctctttcgaagtgtgtatgccttgttttaccacggatcaacaaatggctcgcaagtgttctgactgctgcggaggcaaaggccggggaaagtgttatggcccacagtgtctgtgccggggtaccggcggaggcggatctggcggcggaggtagcggtggcggaggatctgaattcgacatccagatgacacagagccctagcagcctgtctgccagcgtgggagacagagtgaccatcacatgcaaggccagcgaccacatcaacaactggctggcctggtatcagcagaagcctggacaggcccctaagctgctgatctacggcgctaccacactggaaacaggcgtgcccagcagattttctggcagcggctctggcaccgactacaccctgacaatatccagcctccagcctgaggacttcgccacctactactgtcagcagagctggaacaccccttggacattcggccagggcaccaagctggaaatcaagagaggcggaggcggaagtggaggcggaggatctggcggcggaggctctcaagttcagcttcaacagcctggcgctgagctggtcaaacctggcgcttctgtgaagatgagctgcaaagccagcggctacgccttcagcagctactggatcaactggatgaagcagaaacccggccagggactcgaatggatcggccaaatctatcccggcgacggcgacaccaactacaacggcaagttcaagggcagagccacactgaccgccgatacctctagcagcacagcctacatgcagctgagcagcctgaccagcgaagatagcgccgtgtacttctgtgcccggtccatcacaacagtcgtgggctgcgctatggactattggggccagggaacaagcgtgaccgtgtctagtacgcgtatccagaaccctgatcctgccgtgtaccagctgcgggatagcaagagcagcgacaagagcgtgtgtctgttcaccgacttcgacagccagaccaacgtgtcccagagcaaggactccgacgtgtacatcaccgataagtgcgtgctggacatgcggagcatggacttcaagagcaactccgccgtggcctggtccaacaagtccgatttcgcctgcgccaacgccttcaacaacagcattatccccgaggacacattcttcccaagccccgagagcagcgactccaccgaccacgtgaagcccaaagagacagagaacaccaagcagcccagcaagagctgccacaagcccaaggccatcgtgcacaccgagaaagtgaacatgatgagcctgaccgtgctgggcctgcggatgctgttcgccaaaaccgtggccgtgaacttcctgctgaccgccaagctgttcttcctcctcaccgcc

SEQ ID NO: 17874 - DNA, 2781 bp, synthetic construct
  source 1..2781: mol_type = other DNA
atggccttaccagtgaccgccttgctcctgccgctggccttgctgctccacgccgccaggccgctcgaggaggacctgaagaacgtgttcccacctgaggtggccgtgttcgagcctagcgaggccgagatcagccacacccagaaagccaccctcgtgtgcctggctaccggcttctaccccgaccatgtggaactgtcttggtgggtcaacggcaaagaggtgcacagcggcgtgtgtaccgacccccagccactgaaagaacagcccgccctgaacgacagccggtactgcctgagcagcagactgagagtgtccgccaccttctggcagaacccccggaaccacttcagatgccaggtgcagttctacggcctgagcgagaacgacgagtggacccaggacagagccaagcccgtgacccagatcgtgtctgccgaagcctggggcagagccgatgatgtgattaagatccactggcaggaaaagaagtccaacaccatcctgggcagccaggaaggcaacaccatgaagaccaacgacacctacatgaagttcagctggctgaccgtgcccgagaagtccctggacaaagaacacagatgcatcgtgcggcacgaaaacaacaagaacggcgtggaccaggaaatcatcttcccacccatcaagaccgatgtgattacaatggaccccaaggacaactgctccaaggacgccaacgataccctgctgctccagctgaccaacaccagcgcctactacatgtacttgttgctgctgctgaagtccgtggtgtacttcgccatcatcacatgctgcctgctgatggctatggtcaagcggaaggacagccggggaagggccaagcgatctggatctggagcaacaaacttctcactactcaaacaagcaggtgacgtggaggagaatcccgggcctactagcatggccttaccagtgaccgccttgctcctgccgctggccttgctgctccacgccgccaggccgagccccgtagctcctgcctgtgaccccagactcctaaataaactgctgcgtgactcccacctccttcacagccgactgagtcagtgtcccgacgtggaccctttgtctatccctgttctgctgcctgctgtggactttagcctgggagaatggaaaacccagacggaacagagcaaggcacaggacattctaggggcagtgtcccttctactggagggagtgatggcagcacgaggacagttggaaccctcctgcctctcatccctcctgggacagctttctgggcaggttcgcctcctcttgggggccctgcagggcctcctaggaacccagcttcctctacagggcaggaccacagctcacaaggaccccaatgccctcttcttgagcttgcaacaactgcttcggggaaaggtgcgcttcctgcttctggtagaaggtcccaccctctgtgtcagacggaccctgccaaccacagctgtcccaagcagtacttctggtaccggcggaggcggatctggcggcggaggtagcggtggcggaggatctgaattcgacatccagatgacacagagccctagcagcctgtctgccagcgtgggagacagagtgaccatcacatgcaaggccagcgaccacatcaacaactggctggcctggtatcagcagaagcctggacaggcccctaagctgctgatctacggcgctaccacactggaaacaggcgtgcccagcagattttctggcagcggctctggcaccgactacaccctgacaatatccagcctccagcctgaggacttcgccacctactactgtcagcagagctggaacaccccttggacattcggccagggcaccaagctggaaatcaagagaggcggaggcggaagtggaggcggaggatctggcggcggaggctctcaagttcagcttcaacagcctggcgctgagctggtcaaacctggcgcttctgtgaagatgagctgcaaagccagcggctacgccttcagcagctactggatcaactggatgaagcagaaacccggccagggactcgaatggatcggccaaatctatcccggcgacggcgacaccaactacaacggcaagttcaagggcagagccacactgaccgccgatacctctagcagcacagcctacatgcagctgagcagcctgaccagcgaagatagcgccgtgtacttctgtgcccggtccatcacaacagtcgtgggctgcgctatggactattggggccagggaacaagcgtgaccgtgtctagtacgcgtatccagaaccctgatcctgccgtgtaccagctgcgggatagcaagagcagcgacaagagcgtgtgtctgttcaccgacttcgacagccagaccaacgtgtcccagagcaaggactccgacgtgtacatcaccgataagtgcgtgctggacatgcggagcatggacttcaagagcaactccgccgtggcctggtccaacaagtccgatttcgcctgcgccaacgccttcaacaacagcattatccccgaggacacattcttcccaagccccgagagcagcgactccaccgaccacgtgaagcccaaagagacagagaacaccaagcagcccagcaagagctgccacaagcccaaggccatcgtgcacaccgagaaagtgaacatgatgagcctgaccgtgctgggcctgcggatgctgttcgccaaaaccgtggccgtgaacttcctgctgaccgccaagctgttcttcctcctcaccgcc

SEQ ID NO: 17875 - DNA, 2502 bp, synthetic construct
  source 1..2502: mol_type = other DNA
atggccttaccagtgaccgccttgctcctgccgctggccttgctgctccacgccgccaggccgctcgaggaggacctgaagaacgtgttcccacctgaggtggccgtgttcgagcctagcgaggccgagatcagccacacccagaaagccaccctcgtgtgcctggctaccggcttctaccccgaccatgtggaactgtcttggtgggtcaacggcaaagaggtgcacagcggcgtgtgtaccgacccccagccactgaaagaacagcccgccctgaacgacagccggtactgcctgagcagcagactgagagtgtccgccaccttctggcagaacccccggaaccacttcagatgccaggtgcagttctacggcctgagcgagaacgacgagtggacccaggacagagccaagcccgtgacccagatcgtgtctgccgaagcctggggcagagccgatgatgtgattaagatccactggcaggaaaagaagtccaacaccatcctgggcagccaggaaggcaacaccatgaagaccaacgacacctacatgaagttcagctggctgaccgtgcccgagaagtccctggacaaagaacacagatgcatcgtgcggcacgaaaacaacaagaacggcgtggaccaggaaatcatcttcccacccatcaagaccgatgtgattacaatggaccccaaggacaactgctccaaggacgccaacgataccctgctgctccagctgaccaacaccagcgcctactacatgtacttgttgctgctgctgaagtccgtggtgtacttcgccatcatcacatgctgcctgctgatggctatggtcaagcggaaggacagccggggaagggccaagcgatctggatctggagcaacaaacttctcactactcaaacaagcaggtgacgtggaggagaatcccgggcctactagcatggccttaccagtgaccgccttgctcctgccgctggccttgctgctccacgccgccaggccgatgggcagctgggaagagttcgagctgagactgaacgccatcgaggaacggctgtatgccctcggaggatctgaagccgagctggcctacttcgagtacgtgatcgccgacttcgagggcaacctgcagcggtacaaaggcaagggcaaccctgaagtggaagccctgtacttcgaggccgacgccatcttcgaggaactggtggcctacagacacaacggtaccggcggaggcggatctggcggcggaggtagcggtggcggaggatctgaattcgacatccagatgacacagagccctagcagcctgtctgccagcgtgggagacagagtgaccatcacatgcaaggccagcgaccacatcaacaactggctggcctggtatcagcagaagcctggacaggcccctaagctgctgatctacggcgctaccacactggaaacaggcgtgcccagcagattttctggcagcggctctggcaccgactacaccctgacaatatccagcctccagcctgaggacttcgccacctactactgtcagcagagctggaacaccccttggacattcggccagggcaccaagctggaaatcaagagaggcggaggcggaagtggaggcggaggatctggcggcggaggctctcaagttcagcttcaacagcctggcgctgagctggtcaaacctggcgcttctgtgaagatgagctgcaaagccagcggctacgccttcagcagctactggatcaactggatgaagcagaaacccggccagggactcgaatggatcggccaaatctatcccggcgacggcgacaccaactacaacggcaagttcaagggcagagccacactgaccgccgatacctctagcagcacagcctacatgcagctgagcagcctgaccagcgaagatagcgccgtgtacttctgtgcccggtccatcacaacagtcgtgggctgcgctatggactattggggccagggaacaagcgtgaccgtgtctagtacgcgtatccagaaccctgatcctgccgtgtaccagctgcgggatagcaagagcagcgacaagagcgtgtgtctgttcaccgacttcgacagccagaccaacgtgtcccagagcaaggactccgacgtgtacatcaccgataagtgcgtgctggacatgcggagcatggacttcaagagcaactccgccgtggcctggtccaacaagtccgatttcgcctgcgccaacgccttcaacaacagcattatccccgaggacacattcttcccaagccccgagagcagcgactccaccgaccacgtgaagcccaaagagacagagaacaccaagcagcccagcaagagctgccacaagcccaaggccatcgtgcacaccgagaaagtgaacatgatgagcctgaccgtgctgggcctgcggatgctgttcgccaaaaccgtggccgtgaacttcctgctgaccgccaagctgttcttcctcctcaccgcc

SEQ ID NO: 17876 - DNA, 2922 bp, synthetic construct
  source 1..2922: mol_type = other DNA
atggccttaccagtgaccgccttgctcctgccgctggccttgctgctccacgccgccaggccgctcgagatccagaaccctgatcctgccgtgtaccagctgcgggatagcaagagcagcgacaagagcgtgtgtctgttcaccgacttcgacagccagaccaacgtgtcccagagcaaggactccgacgtgtacatcaccgataagtgcgtgctggacatgcggagcatggacttcaagagcaactccgccgtggcctggtccaacaagtccgatttcgcctgcgccaacgccttcaacaacagcattatccccgaggacacattcttcccaagccccgagagcagcgactccaccgaccacgtgaagcccaaagagacagagaacaccaagcagcccagcaagagctgccacaagcccaaggccatcgtgcacaccgagaaagtgaacatgatgagcctgaccgtgctgggcctgcggatgctgttcgccaaaaccgtggccgtgaacttcctgctgaccgccaagctgttcttcctcctcaccgccagggccaagcgatctggatctggagcaacaaacttctcactactcaaacaagcaggtgacgtggaggagaatcccgggcctactagcatggccttaccagtgaccgccttgctcctgccgctggccttgctgctccacgccgccaggccggacatccagatgacacagactacatcctccctgtctgcctctctgggagacagagtcaccatcagttgcagggcaagtcaggacattagtaaatatttaaattggtatcagcagaaaccagatggaactgttaaactcctgatctaccatacatcaagattacactcaggagtcccatcaaggttcagtggcagtgggtctggaacagattattctctcaccattagcaacctggagcaagaagatattgccacttacttttgccaacagggtaatacgcttccgtacacgttcggaggggggaccaagctggagatcacaggtggcggtggctcgggcggtggtgggtcgggtggcggcggatctgaggtgaaactgcaggagtcaggacctggcctggtggcgccctcacagagcctgtccgtcacatgcactgtctcaggggtctcattacccgactatggtgtaagctggattcgccagcctccacgaaagggtctggagtggctgggagtaatatggggtagtgaaaccacatactataattcagctctcaaatccagactgaccatcatcaaggacaactccaagagccaagttttcttaaaaatgaacagtctgcaaactgatgacacagccatttactactgtgccaaacattattactacggtggtagctatgctatggactactggggtcaaggaacctcagtcaccgtctcctcaacgcgtgaggacctgaagaacgtgttcccacctgaggtggccgtgttcgagcctagcgaggccgagatcagccacacccagaaagccaccctcgtgtgcctggctaccggcttctaccccgaccatgtggaactgtcttggtgggtcaacggcaaagaggtgcacagcggcgtgtgtaccgacccccagccactgaaagaacagcccgccctgaacgacagccggtactgcctgagcagcagactgagagtgtccgccaccttctggcagaacccccggaaccacttcagatgccaggtgcagttctacggcctgagcgagaacgacgagtggacccaggacagagccaagcccgtgacccagatcgtgtctgccgaagcctggggcagagccgatgatgtgattaagatccactggcaggaaaagaagtccaacaccatcctgggcagccaggaaggcaacaccatgaagaccaacgacacctacatgaagttcagctggctgaccgtgcccgagaagtccctggacaaagaacacagatgcatcgtgcggcacgaaaacaacaagaacggcgtggaccaggaaatcatcttcccacccatcaagaccgatgtgattacaatggaccccaaggacaactgctccaaggacgccaacgataccctgctgctccagctgaccaacaccagcgcctactacatgtacttgttgctgctgctgaagtccgtggtgtacttcgccatcatcacatgctgcctgctgatggctatggtcaagcggaaggacagccggggacgcgccaagagaagcggatctggcgtgaagcagaccctgaatttcgacctgctgaagctggctggcgacgtggaatccaacccaggcccttctagaggccatatgaccgagtacaagcccacggtgcgcctcgccacccgcgacgacgtccccagggccgtacgcaccctcgccgccgcgttcgccgactaccccgccacgcgccacaccgtcgatccggaccgccacatcgagcgggtcaccgagctgcaagaactcttcctcacgcgcgtcgggctcgacatcggcaaggtgtgggtcgcggacgacggcgccgcggtggcggtctggaccacgccggagagcgtcgaagcgggggcggtgttcgccgagatcggcccgcgcatggccgagttgagcggttcccggctggccgcgcagcaacagatggaaggcctcctggcgccgcaccggcccaaggagcccgcgtggttcctggccaccgtcggcgtctcgcccgaccaccagggcaagggtctgggcagcgccgtcgtgctccccggagtggaggcggccgagcgcgccggggtgcccgccttcctggagacctccgcgccccgcaacctccccttctacgagcggctcggcttcaccgtcaccgccgacgtcgaggtgcccgaaggaccgcgcacctggtgcatgacccgcaagcccggtgcctga

SEQ ID NO: 17877 - DNA, 2925 bp, synthetic construct
  source 1..2925: mol_type = other DNA
atggccttaccagtgaccgccttgctcctgccgctggccttgctgctccacgccgccaggccgctcgagatccagaaccctgatcctgccgtgtaccagctgcgggatagcaagagcagcgacaagagcgtgtgtctgttcaccgacttcgacagccagaccaacgtgtcccagagcaaggactccgacgtgtacatcaccgataagtgcgtgctggacatgcggagcatggacttcaagagcaactccgccgtggcctggtccaacaagtccgatttcgcctgcgccaacgccttcaacaacagcattatccccgaggacacattcttcccaagccccgagagcagcgactccaccgaccacgtgaagcccaaagagacagagaacaccaagcagcccagcaagagctgccacaagcccaaggccatcgtgcacaccgagaaagtgaacatgatgagcctgaccgtgctgggcctgcggatgctgttcgccaaaaccgtggccgtgaacttcctgctgaccgccaagctgttcttcctcctcaccgccagggccaagcgatctggatctggagcaacaaacttctcactactcaaacaagcaggtgacgtggaggagaatcccgggcctactagcaccatggccttaccagtgaccgccttgctcctgccgctggccttgctgctccacgccgccaggccggagatcgtgatgacccagagccctgccaccctgtctctgagccctggcgaaagagccaccctgagctgtagagccagccaggacatcagcaagtacctgaactggtatcagcagaagcccggccaggcccccagactgctgatctaccacaccagcagactgcacagcggcatccccgccagattttctggctctggcagcggcaccgactacaccctgacaatcagcagcctccagcccgaggacttcgccgtgtacttctgtcagcaaggcaacaccctgccctacaccttcggccagggcaccaagctggaaatcaagggcggaggcggaagtggaggcggaggatctggcggcggaggctctcaggtgcaactccaggaatctggccctggcctcgtgaagcccagcgagacactgagcctgacctgtaccgtgtccggcgtgtccctgcctgactatggcgtgtcctggatcagacagccccctggcaagggcctggaatggatcggagtgatttggggcagcgaaaccacctactacaacagctccctgaagtccagagtgaccatctccaaggacaactccaagaaccaggtgtccctgaagctgagcagcgtgacagccgccgacaccgccgtgtattactgcgccaagcactactactacggcggcagctacgctatggactactggggccagggaaccctcgtgaccgtgtctagtacgcgtgaggacctgaagaacgtgttcccacctgaggtggccgtgttcgagcctagcgaggccgagatcagccacacccagaaagccaccctcgtgtgcctggctaccggcttctaccccgaccatgtggaactgtcttggtgggtcaacggcaaagaggtgcacagcggcgtgtgtaccgacccccagccactgaaagaacagcccgccctgaacgacagccggtactgcctgagcagcagactgagagtgtccgccaccttctggcagaacccccggaaccacttcagatgccaggtgcagttctacggcctgagcgagaacgacgagtggacccaggacagagccaagcccgtgacccagatcgtgtctgccgaagcctggggcagagccgatgatgtgattaagatccactggcaggaaaagaagtccaacaccatcctgggcagccaggaaggcaacaccatgaagaccaacgacacctacatgaagttcagctggctgaccgtgcccgagaagtccctggacaaagaacacagatgcatcgtgcggcacgaaaacaacaagaacggcgtggaccaggaaatcatcttcccacccatcaagaccgatgtgattacaatggaccccaaggacaactgctccaaggacgccaacgataccctgctgctccagctgaccaacaccagcgcctactacatgtacttgttgctgctgctgaagtccgtggtgtacttcgccatcatcacatgctgcctgctgatggctatggtcaagcggaaggacagccggggacgcgccaagagaagcggatctggcgtgaagcagaccctgaatttcgacctgctgaagctggctggcgacgtggaatccaacccaggcccttctagaggccatatgaccgagtacaagcccacggtgcgcctcgccacccgcgacgacgtccccagggccgtacgcaccctcgccgccgcgttcgccgactaccccgccacgcgccacaccgtcgatccggaccgccacatcgagcgggtcaccgagctgcaagaactcttcctcacgcgcgtcgggctcgacatcggcaaggtgtgggtcgcggacgacggcgccgcggtggcggtctggaccacgccggagagcgtcgaagcgggggcggtgttcgccgagatcggcccgcgcatggccgagttgagcggttcccggctggccgcgcagcaacagatggaaggcctcctggcgccgcaccggcccaaggagcccgcgtggttcctggccaccgtcggcgtctcgcccgaccaccagggcaagggtctgggcagcgccgtcgtgctccccggagtggaggcggccgagcgcgccggggtgcccgccttcctggagacctccgcgccccgcaacctccccttctacgagcggctcggcttcaccgtcaccgccgacgtcgaggtgcccgaaggaccgcgcacctggtgcatgacccgcaagcccggtgcctga

SEQ ID NO: 17878 - DNA, 2928 bp, synthetic construct
  source 1..2928: mol_type = other DNA
atggccttaccagtgaccgccttgctcctgccgctggccttgctgctccacgccgccaggccgctcgagatccagaaccctgatcctgccgtgtaccagctgcgggatagcaagagcagcgacaagagcgtgtgtctgttcaccgacttcgacagccagaccaacgtgtcccagagcaaggactccgacgtgtacatcaccgataagtgcgtgctggacatgcggagcatggacttcaagagcaactccgccgtggcctggtccaacaagtccgatttcgcctgcgccaacgccttcaacaacagcattatccccgaggacacattcttcccaagccccgagagcagcgactccaccgaccacgtgaagcccaaagagacagagaacaccaagcagcccagcaagagctgccacaagcccaaggccatcgtgcacaccgagaaagtgaacatgatgagcctgaccgtgctgggcctgcggatgctgttcgccaaaaccgtggccgtgaacttcctgctgaccgccaagctgttcttcctcctcaccgccagggccaagcgatctggatctggagcaacaaacttctcactactcaaacaagcaggtgacgtggaggagaatcccgggcctactagcaccatggccttaccagtgaccgccttgctcctgccgctggccttgctgctccacgccgccaggccggacgagatcgtgctgacacagagccccgccaccctgtcactgtctccaggcgaaagagccaccctgagctgtagcgccagcagcagcgtgtcctacatgcactggtatcagcagaagcccggccaggcccccagactgctgatctacgataccagcaagctggcctccggcatccccgccagattttctggcagcggctccggcaccgacttcaccctgacaatcagcagcctggaacccgaggacgtggccgtgtactactgttttcaaggcagcgtgtaccccttcaccttcggccagggcaccaagctggaaatcaagagaggtggcggtggctcgggcggtggtgggtcgggtggcggcggatctcaggtgcagctccaggaatctggccctggcctcgtgaagcctagccagaccctgagcctgacctgtaccgtgtctggcggcagcatcagcacaagcggcatgggcgtgggctggatcagacagcaccctggcaagggcctggaatggatcggccacatttggtgggacgacgacaagcggtacaaccccgccctgaagtccagagtgaccatcagcgtggacaccagcaagaaccagttcagcctgaagctgagcagcgtgacagccgccgataccgccgtgtattattgcgcccggatggaactgtggtcctactacttcgactactggggccagggaaccctcgtgaccgtgtctagtacgcgtgaggacctgaagaacgtgttcccacctgaggtggccgtgttcgagcctagcgaggccgagatcagccacacccagaaagccaccctcgtgtgcctggctaccggcttctaccccgaccatgtggaactgtcttggtgggtcaacggcaaagaggtgcacagcggcgtgtgtaccgacccccagccactgaaagaacagcccgccctgaacgacagccggtactgcctgagcagcagactgagagtgtccgccaccttctggcagaacccccggaaccacttcagatgccaggtgcagttctacggcctgagcgagaacgacgagtggacccaggacagagccaagcccgtgacccagatcgtgtctgccgaagcctggggcagagccgatgatgtgattaagatccactggcaggaaaagaagtccaacaccatcctgggcagccaggaaggcaacaccatgaagaccaacgacacctacatgaagttcagctggctgaccgtgcccgagaagtccctggacaaagaacacagatgcatcgtgcggcacgaaaacaacaagaacggcgtggaccaggaaatcatcttcccacccatcaagaccgatgtgattacaatggaccccaaggacaactgctccaaggacgccaacgataccctgctgctccagctgaccaacaccagcgcctactacatgtacttgttgctgctgctgaagtccgtggtgtacttcgccatcatcacatgctgcctgctgatggctatggtcaagcggaaggacagccggggacgcgccaagagaagcggatctggcgtgaagcagaccctgaatttcgacctgctgaagctggctggcgacgtggaatccaacccaggcccttctagaggccatatgaccgagtacaagcccacggtgcgcctcgccacccgcgacgacgtccccagggccgtacgcaccctcgccgccgcgttcgccgactaccccgccacgcgccacaccgtcgatccggaccgccacatcgagcgggtcaccgagctgcaagaactcttcctcacgcgcgtcgggctcgacatcggcaaggtgtgggtcgcggacgacggcgccgcggtggcggtctggaccacgccggagagcgtcgaagcgggggcggtgttcgccgagatcggcccgcgcatggccgagttgagcggttcccggctggccgcgcagcaacagatggaaggcctcctggcgccgcaccggcccaaggagcccgcgtggttcctggccaccgtcggcgtctcgcccgaccaccagggcaagggtctgggcagcgccgtcgtgctccccggagtggaggcggccgagcgcgccggggtgcccgccttcctggagacctccgcgccccgcaacctccccttctacgagcggctcggcttcaccgtcaccgccgacgtcgaggtgcccgaaggaccgcgcacctggtgcatgacccgcaagcccggtgcctga

SEQ ID NO: 17879 - DNA, 2916 bp, synthetic construct
  source 1..2916: mol_type = other DNA
atggccttaccagtgaccgccttgctcctgccgctggccttgctgctccacgccgccaggccgctcgagatccagaaccctgatcctgccgtgtaccagctgcgggatagcaagagcagcgacaagagcgtgtgtctgttcaccgacttcgacagccagaccaacgtgtcccagagcaaggactccgacgtgtacatcaccgataagtgcgtgctggacatgcggagcatggacttcaagagcaactccgccgtggcctggtccaacaagtccgatttcgcctgcgccaacgccttcaacaacagcattatccccgaggacacattcttcccaagccccgagagcagcgactccaccgaccacgtgaagcccaaagagacagagaacaccaagcagcccagcaagagctgccacaagcccaaggccatcgtgcacaccgagaaagtgaacatgatgagcctgaccgtgctgggcctgcggatgctgttcgccaaaaccgtggccgtgaacttcctgctgaccgccaagctgttcttcctcctcaccgccagggccaagcgatctggatctggagcaacaaacttctcactactcaaacaagcaggtgacgtggaggagaatcccgggcctactagcatggccttaccagtgaccgccttgctcctgccgctggccttgctgctccacgccgccaggccggacatccagatgacacagagccctagcagcctgtctgccagcgtgggagacagagtgaccatcacctgtagagccagccaggacatcagcaactacctgaactggtatcagcagaagcccggcaaggcccctaagctgctgatctactacaccagcagactgcacagcggcgtgcccagcagattttctggctctggcagcggcaccgacttcaccctgacaatatctagcctccagcctgaggacttcgccacctactattgccagcagggcaacaccctgccttacacatttggacagggcaccaaggtggaaatcaagagaggcggaggcggaagtggaggcggaggatctggcggcggaggctctgaagtgcagctggttgaatcaggtggcggcctggttcaacctggcggatctctgagactgagctgtgccgccagcggcttcaccttcagcgactactttatgagctgggtccgacaggcccctggcaaaggacttgaatgggtcgccaccatcagcaatggcggcacctacacttactaccccgacagcgtgaagggcagattcaccatctccagagacaacagcaagaacaccctgtacctccagatgaactccctgagagccgaggacaccgccgtgtactactgcgccagattcgacggctacatcttcgactattggggccagggcaccctggtcacagtctcttctacgcgtgaggacctgaagaacgtgttcccacctgaggtggccgtgttcgagcctagcgaggccgagatcagccacacccagaaagccaccctcgtgtgcctggctaccggcttctaccccgaccatgtggaactgtcttggtgggtcaacggcaaagaggtgcacagcggcgtgtgtaccgacccccagccactgaaagaacagcccgccctgaacgacagccggtactgcctgagcagcagactgagagtgtccgccaccttctggcagaacccccggaaccacttcagatgccaggtgcagttctacggcctgagcgagaacgacgagtggacccaggacagagccaagcccgtgacccagatcgtgtctgccgaagcctggggcagagccgatgatgtgattaagatccactggcaggaaaagaagtccaacaccatcctgggcagccaggaaggcaacaccatgaagaccaacgacacctacatgaagttcagctggctgaccgtgcccgagaagtccctggacaaagaacacagatgcatcgtgcggcacgaaaacaacaagaacggcgtggaccaggaaatcatcttcccacccatcaagaccgatgtgattacaatggaccccaaggacaactgctccaaggacgccaacgataccctgctgctccagctgaccaacaccagcgcctactacatgtacttgttgctgctgctgaagtccgtggtgtacttcgccatcatcacatgctgcctgctgatggctatggtcaagcggaaggacagccggggacgcgccaagagaagcggatctggcgtgaagcagaccctgaatttcgacctgctgaagctggctggcgacgtggaatccaacccaggcccttctagaggccatatgaccgagtacaagcccacggtgcgcctcgccacccgcgacgacgtccccagggccgtacgcaccctcgccgccgcgttcgccgactaccccgccacgcgccacaccgtcgatccggaccgccacatcgagcgggtcaccgagctgcaagaactcttcctcacgcgcgtcgggctcgacatcggcaaggtgtgggtcgcggacgacggcgccgcggtggcggtctggaccacgccggagagcgtcgaagcgggggcggtgttcgccgagatcggcccgcgcatggccgagttgagcggttcccggctggccgcgcagcaacagatggaaggcctcctggcgccgcaccggcccaaggagcccgcgtggttcctggccaccgtcggcgtctcgcccgaccaccagggcaagggtctgggcagcgccgtcgtgctccccggagtggaggcggccgagcgcgccggggtgcccgccttcctggagacctccgcgccccgcaacctccccttctacgagcggctcggcttcaccgtcaccgccgacgtcgaggtgcccgaaggaccgcgcacctggtgcatgacccgcaagcccggtgcctga

SEQ ID NO: 17880 - DNA, 2928 bp, synthetic construct
  source 1..2928: mol_type = other DNA
atggccttaccagtgaccgccttgctcctgccgctggccttgctgctccacgccgccaggccgctcgagatccagaaccctgatcctgccgtgtaccagctgcgggatagcaagagcagcgacaagagcgtgtgtctgttcaccgacttcgacagccagaccaacgtgtcccagagcaaggactccgacgtgtacatcaccgataagtgcgtgctggacatgcggagcatggacttcaagagcaactccgccgtggcctggtccaacaagtccgatttcgcctgcgccaacgccttcaacaacagcattatccccgaggacacattcttcccaagccccgagagcagcgactccaccgaccacgtgaagcccaaagagacagagaacaccaagcagcccagcaagagctgccacaagcccaaggccatcgtgcacaccgagaaagtgaacatgatgagcctgaccgtgctgggcctgcggatgctgttcgccaaaaccgtggccgtgaacttcctgctgaccgccaagctgttcttcctcctcaccgccagggccaagcgatctggatctggagcaacaaacttctcactactcaaacaagcaggtgacgtggaggagaatcccgggcctactagcatggccttaccagtgaccgccttgctcctgccgctggccttgctgctccacgccgccaggccggacatccagatgacacagagccctagcagcctgtctgccagcgtgggagacagagtgaccatcacatgcaaggccagcgaccacatcaacaactggctggcctggtatcagcagaagcctggacaggcccctaagctgctgatctacggcgctaccacactggaaacaggcgtgcccagcagattttctggcagcggctctggcaccgactacaccctgacaatatccagcctccagcctgaggacttcgccacctactactgtcagcagagctggaacaccccttggacattcggccagggcaccaagctggaaatcaagagaggcggaggcggaagtggaggcggaggatctggcggcggaggctctcaagttcagcttcaacagcctggcgctgagctggtcaaacctggcgcttctgtgaagatgagctgcaaagccagcggctacgccttcagcagctactggatcaactggatgaagcagaaacccggccagggactcgaatggatcggccaaatctatcccggcgacggcgacaccaactacaacggcaagttcaagggcagagccacactgaccgccgatacctctagcagcacagcctacatgcagctgagcagcctgaccagcgaagatagcgccgtgtacttctgtgcccggtccatcacaacagtcgtgggctgcgctatggactattggggccagggaacaagcgtgaccgtgtctagtacgcgtgaggacctgaagaacgtgttcccacctgaggtggccgtgttcgagcctagcgaggccgagatcagccacacccagaaagccaccctcgtgtgcctggctaccggcttctaccccgaccatgtggaactgtcttggtgggtcaacggcaaagaggtgcacagcggcgtgtgtaccgacccccagccactgaaagaacagcccgccctgaacgacagccggtactgcctgagcagcagactgagagtgtccgccaccttctggcagaacccccggaaccacttcagatgccaggtgcagttctacggcctgagcgagaacgacgagtggacccaggacagagccaagcccgtgacccagatcgtgtctgccgaagcctggggcagagccgatgatgtgattaagatccactggcaggaaaagaagtccaacaccatcctgggcagccaggaaggcaacaccatgaagaccaacgacacctacatgaagttcagctggctgaccgtgcccgagaagtccctggacaaagaacacagatgcatcgtgcggcacgaaaacaacaagaacggcgtggaccaggaaatcatcttcccacccatcaagaccgatgtgattacaatggaccccaaggacaactgctccaaggacgccaacgataccctgctgctccagctgaccaacaccagcgcctactacatgtacttgttgctgctgctgaagtccgtggtgtacttcgccatcatcacatgctgcctgctgatggctatggtcaagcggaaggacagccggggacgcgccaagagaagcggatctggcgtgaagcagaccctgaatttcgacctgctgaagctggctggcgacgtggaatccaacccaggcccttctagaggccatatgaccgagtacaagcccacggtgcgcctcgccacccgcgacgacgtccccagggccgtacgcaccctcgccgccgcgttcgccgactaccccgccacgcgccacaccgtcgatccggaccgccacatcgagcgggtcaccgagctgcaagaactcttcctcacgcgcgtcgggctcgacatcggcaaggtgtgggtcgcggacgacggcgccgcggtggcggtctggaccacgccggagagcgtcgaagcgggggcggtgttcgccgagatcggcccgcgcatggccgagttgagcggttcccggctggccgcgcagcaacagatggaaggcctcctggcgccgcaccggcccaaggagcccgcgtggttcctggccaccgtcggcgtctcgcccgaccaccagggcaagggtctgggcagcgccgtcgtgctccccggagtggaggcggccgagcgcgccggggtgcccgccttcctggagacctccgcgccccgcaacctccccttctacgagcggctcggcttcaccgtcaccgccgacgtcgaggtgcccgaaggaccgcgcacctggtgcatgacccgcaagcccggtgcctga

SEQ ID NO: 17881 - DNA, 2934 bp, synthetic construct
  source 1..2934: mol_type = other DNA
atggccttaccagtgaccgccttgctcctgccgctggccttgctgctccacgccgccaggccgctcgagatccagaaccctgatcctgccgtgtaccagctgcgggatagcaagagcagcgacaagagcgtgtgtctgttcaccgacttcgacagccagaccaacgtgtcccagagcaaggactccgacgtgtacatcaccgataagtgcgtgctggacatgcggagcatggacttcaagagcaactccgccgtggcctggtccaacaagtccgatttcgcctgcgccaacgccttcaacaacagcattatccccgaggacacattcttcccaagccccgagagcagcgactccaccgaccacgtgaagcccaaagagacagagaacaccaagcagcccagcaagagctgccacaagcccaaggccatcgtgcacaccgagaaagtgaacatgatgagcctgaccgtgctgggcctgcggatgctgttcgccaaaaccgtggccgtgaacttcctgctgaccgccaagctgttcttcctcctcaccgccagggccaagcgatctggatctggagcaacaaacttctcactactcaaacaagcaggtgacgtggaggagaatcccgggcctactagcatggccttaccagtgaccgccttgctcctgccgctggccttgctgctccacgccgccaggccgcagatcgtgctgtctcagtctcctgccatcctgagcgcttccccaggcgagaaagtgaccatgacctgtagagccagcagcagcgtgtcctacatgcactggtatcagcagaagcccggcagcagccctaagccttggatctacgccaccagcaatctggcctctggcgtgccagccagattttctggctctggcagcggcaccagctacagcttcacaatcagcagagtggaagccgaggacgccgccacctactattgtcagcagtggaccttcaatcctcctaccttcggcggaggcacccggctggaaatcaaaagaacagtggctgctggcggaggcggaagtggaggcggaggatctggcggcggaggctctcaggcttatctgcaacagagcggagccgaactcgtcagacctggcgcttctgtgaagatgagctgcaaggccagcggctacaccttcaccagctataatatgcactgggtcaagcagacccctcggcagggactcgaatggatcggcggaatctatcccggcaacggcgacacctcctacaaccagaagttcaagggcaaagccacactgaccgtgggcaagagcagcagcaccgcctatatgcagctcagcagcctgaccagcgaggacagcgccgtgtacttctgcgccagatacgactacaactacgctatggactactggggccagggcaccagcgtgacagttagctctgccagcacgcgtgaggacctgaagaacgtgttcccacctgaggtggccgtgttcgagcctagcgaggccgagatcagccacacccagaaagccaccctcgtgtgcctggctaccggcttctaccccgaccatgtggaactgtcttggtgggtcaacggcaaagaggtgcacagcggcgtgtgtaccgacccccagccactgaaagaacagcccgccctgaacgacagccggtactgcctgagcagcagactgagagtgtccgccaccttctggcagaacccccggaaccacttcagatgccaggtgcagttctacggcctgagcgagaacgacgagtggacccaggacagagccaagcccgtgacccagatcgtgtctgccgaagcctggggcagagccgatgatgtgattaagatccactggcaggaaaagaagtccaacaccatcctgggcagccaggaaggcaacaccatgaagaccaacgacacctacatgaagttcagctggctgaccgtgcccgagaagtccctggacaaagaacacagatgcatcgtgcggcacgaaaacaacaagaacggcgtggaccaggaaatcatcttcccacccatcaagaccgatgtgattacaatggaccccaaggacaactgctccaaggacgccaacgataccctgctgctccagctgaccaacaccagcgcctactacatgtacttgttgctgctgctgaagtccgtggtgtacttcgccatcatcacatgctgcctgctgatggctatggtcaagcggaaggacagccggggacgcgccaagagaagcggatctggcgtgaagcagaccctgaatttcgacctgctgaagctggctggcgacgtggaatccaacccaggcccttctagaggccatatgaccgagtacaagcccacggtgcgcctcgccacccgcgacgacgtccccagggccgtacgcaccctcgccgccgcgttcgccgactaccccgccacgcgccacaccgtcgatccggaccgccacatcgagcgggtcaccgagctgcaagaactcttcctcacgcgcgtcgggctcgacatcggcaaggtgtgggtcgcggacgacggcgccgcggtggcggtctggaccacgccggagagcgtcgaagcgggggcggtgttcgccgagatcggcccgcgcatggccgagttgagcggttcccggctggccgcgcagcaacagatggaaggcctcctggcgccgcaccggcccaaggagcccgcgtggttcctggccaccgtcggcgtctcgcccgaccaccagggcaagggtctgggcagcgccgtcgtgctccccggagtggaggcggccgagcgcgccggggtgcccgccttcctggagacctccgcgccccgcaacctccccttctacgagcggctcggcttcaccgtcaccgccgacgtcgaggtgcccgaaggaccgcgcacctggtgcatgacccgcaagcccggtgcctga

SEQ ID NO: 17882 - DNA, 2928 bp, synthetic construct
  source 1..2928: mol_type = other DNA
atggccttaccagtgaccgccttgctcctgccgctggccttgctgctccacgccgccaggccgctcgagatccagaaccctgatcctgccgtgtaccagctgcgggatagcaagagcagcgacaagagcgtgtgtctgttcaccgacttcgacagccagaccaacgtgtcccagagcaaggactccgacgtgtacatcaccgataagtgcgtgctggacatgcggagcatggacttcaagagcaactccgccgtggcctggtccaacaagtccgatttcgcctgcgccaacgccttcaacaacagcattatccccgaggacacattcttcccaagccccgagagcagcgactccaccgaccacgtgaagcccaaagagacagagaacaccaagcagcccagcaagagctgccacaagcccaaggccatcgtgcacaccgagaaagtgaacatgatgagcctgaccgtgctgggcctgcggatgctgttcgccaaaaccgtggccgtgaacttcctgctgaccgccaagctgttcttcctcctcaccgccagggccaagcgatctggatctggagcaacaaacttctcactactcaaacaagcaggtgacgtggaggagaatcccgggcctactagcatggccttaccagtgaccgccttgctcctgccgctggccttgctgctccacgccgccaggccggagatcgtgctgacacagagccctgccaccctgtctctgagccctggcgaaagagccaccctgagctgtagagccagccagagcgtgtccagctacctggcctggtatcagcagaagcccggccaggctccccggctgctgatctacgatgccagcaatagagccaccggcatccccgccagattttccggctctggcagcggcaccgacttcaccctgaccatcagctccctggaacccgaggacttcgccgtgtactactgccagcagcggagcaactggcccatcacattcggccagggcacccggctggaaatcaaaggcggaggcggaagtggaggcggaggatctggcggcggaggctctgaggtgcagcttgttgagtctggcggaggactggtgcagcccgatagaagcctgagactgtcttgtgccgccagcggcttcaccttccacgattatgccatgcactgggtccgacaggcccctggcaaaggacttgaatgggtgtccaccatctcttggaacagcggcacaatcggctacgccgactctgtgaagggcagattcaccatcagccgggacaacgccaagaacagcctgtacctccagatgaactccctgagagccgaggacacagccctgtactactgcgccaaggacatccagtacggcaactactactacggcatggacgtgtggggccagggcacaacagtgacagtctcttctacgcgtgaggacctgaagaacgtgttcccacctgaggtggccgtgttcgagcctagcgaggccgagatcagccacacccagaaagccaccctcgtgtgcctggctaccggcttctaccccgaccatgtggaactgtcttggtgggtcaacggcaaagaggtgcacagcggcgtgtgtaccgacccccagccactgaaagaacagcccgccctgaacgacagccggtactgcctgagcagcagactgagagtgtccgccaccttctggcagaacccccggaaccacttcagatgccaggtgcagttctacggcctgagcgagaacgacgagtggacccaggacagagccaagcccgtgacccagatcgtgtctgccgaagcctggggcagagccgatgatgtgattaagatccactggcaggaaaagaagtccaacaccatcctgggcagccaggaaggcaacaccatgaagaccaacgacacctacatgaagttcagctggctgaccgtgcccgagaagtccctggacaaagaacacagatgcatcgtgcggcacgaaaacaacaagaacggcgtggaccaggaaatcatcttcccacccatcaagaccgatgtgattacaatggaccccaaggacaactgctccaaggacgccaacgataccctgctgctccagctgaccaacaccagcgcctactacatgtacttgttgctgctgctgaagtccgtggtgtacttcgccatcatcacatgctgcctgctgatggctatggtcaagcggaaggacagccggggacgcgccaagagaagcggatctggcgtgaagcagaccctgaatttcgacctgctgaagctggctggcgacgtggaatccaacccaggcccttctagaggccatatgaccgagtacaagcccacggtgcgcctcgccacccgcgacgacgtccccagggccgtacgcaccctcgccgccgcgttcgccgactaccccgccacgcgccacaccgtcgatccggaccgccacatcgagcgggtcaccgagctgcaagaactcttcctcacgcgcgtcgggctcgacatcggcaaggtgtgggtcgcggacgacggcgccgcggtggcggtctggaccacgccggagagcgtcgaagcgggggcggtgttcgccgagatcggcccgcgcatggccgagttgagcggttcccggctggccgcgcagcaacagatggaaggcctcctggcgccgcaccggcccaaggagcccgcgtggttcctggccaccgtcggcgtctcgcccgaccaccagggcaagggtctgggcagcgccgtcgtgctccccggagtggaggcggccgagcgcgccggggtgcccgccttcctggagacctccgcgccccgcaacctccccttctacgagcggctcggcttcaccgtcaccgccgacgtcgaggtgcccgaaggaccgcgcacctggtgcatgacccgcaagcccggtgcctga

SEQ ID NO: 17883 - DNA, 2922 bp, synthetic construct
  source 1..2922: mol_type = other DNA
atggccttaccagtgaccgccttgctcctgccgctggccttgctgctccacgccgccaggccgctcgagatccagaaccctgatcctgccgtgtaccagctgcgggatagcaagagcagcgacaagagcgtgtgtctgttcaccgacttcgacagccagaccaacgtgtcccagagcaaggactccgacgtgtacatcaccgataagtgcgtgctggacatgcggagcatggacttcaagagcaactccgccgtggcctggtccaacaagtccgatttcgcctgcgccaacgccttcaacaacagcattatccccgaggacacattcttcccaagccccgagagcagcgactccaccgaccacgtgaagcccaaagagacagagaacaccaagcagcccagcaagagctgccacaagcccaaggccatcgtgcacaccgagaaagtgaacatgatgagcctgaccgtgctgggcctgcggatgctgttcgccaaaaccgtggccgtgaacttcctgctgaccgccaagctgttcttcctcctcaccgccagggccaagcgatctggatctggagcaacaaacttctcactactcaaacaagcaggtgacgtggaggagaatcccgggcctactagcatggccttaccagtgaccgccttgctcctgccgctggccttgctgctccacgccgccaggccggacatccagatgacccagagccccagcagcctgtctgccagcgtgggcgacagagtgaccatcacctgtagagccagccaggacgtgaacaccgccgtggcctggtatcagcagaagcctggcaaggcccccaagctgctgatctacagcgccagcttcctggaaagcggcgtgcccagcagattcagcggaagcagaagcggcaccgacttcaccctgaccatcagctccctccagcccgaggacttcgccacctactactgccagcagcactacaccacccctcccaccttcggccagaccaaggtggaaatcaagagaggcggaggcggaagtggaggcggaggatctggcggcggaggctctgaagtgcaactggtggaatctggcggcggactggtgcagcctggcggatctctgagactgagctgtgccgccagcggcttcaacatcaaggacacctacatccactgggtgcgccaggcccctggaaagggactggaatgggtggcccggatctaccccaccaacggctacaccagatacgccgacagcgtgaagggccggttcaccatcagcgccgacaccagcaagaataccgcctacctccagatgaacagcctgcgggccgaggataccgccgtgtactactgctcaagatggggaggcgacggcttctacgctatggacgtgtggggccagggcacccttgtgaccgtgtcatctacgcgtgaggacctgaagaacgtgttcccacctgaggtggccgtgttcgagcctagcgaggccgagatcagccacacccagaaagccaccctcgtgtgcctggctaccggcttctaccccgaccatgtggaactgtcttggtgggtcaacggcaaagaggtgcacagcggcgtgtgtaccgacccccagccactgaaagaacagcccgccctgaacgacagccggtactgcctgagcagcagactgagagtgtccgccaccttctggcagaacccccggaaccacttcagatgccaggtgcagttctacggcctgagcgagaacgacgagtggacccaggacagagccaagcccgtgacccagatcgtgtctgccgaagcctggggcagagccgatgatgtgattaagatccactggcaggaaaagaagtccaacaccatcctgggcagccaggaaggcaacaccatgaagaccaacgacacctacatgaagttcagctggctgaccgtgcccgagaagtccctggacaaagaacacagatgcatcgtgcggcacgaaaacaacaagaacggcgtggaccaggaaatcatcttcccacccatcaagaccgatgtgattacaatggaccccaaggacaactgctccaaggacgccaacgataccctgctgctccagctgaccaacaccagcgcctactacatgtacttgttgctgctgctgaagtccgtggtgtacttcgccatcatcacatgctgcctgctgatggctatggtcaagcggaaggacagccggggacgcgccaagagaagcggatctggcgtgaagcagaccctgaatttcgacctgctgaagctggctggcgacgtggaatccaacccaggcccttctagaggccatatgaccgagtacaagcccacggtgcgcctcgccacccgcgacgacgtccccagggccgtacgcaccctcgccgccgcgttcgccgactaccccgccacgcgccacaccgtcgatccggaccgccacatcgagcgggtcaccgagctgcaagaactcttcctcacgcgcgtcgggctcgacatcggcaaggtgtgggtcgcggacgacggcgccgcggtggcggtctggaccacgccggagagcgtcgaagcgggggcggtgttcgccgagatcggcccgcgcatggccgagttgagcggttcccggctggccgcgcagcaacagatggaaggcctcctggcgccgcaccggcccaaggagcccgcgtggttcctggccaccgtcggcgtctcgcccgaccaccagggcaagggtctgggcagcgccgtcgtgctccccggagtggaggcggccgagcgcgccggggtgcccgccttcctggagacctccgcgccccgcaacctccccttctacgagcggctcggcttcaccgtcaccgccgacgtcgaggtgcccgaaggaccgcgcacctggtgcatgacccgcaagcccggtgcctga

SEQ ID NO: 17884 - DNA, 2559 bp, synthetic construct
  source 1..2559: mol_type = other DNA
atggccttaccagtgaccgccttgctcctgccgctggccttgctgctccacgccgccaggccgctcgagatccagaaccctgatcctgccgtgtaccagctgcgggatagcaagagcagcgacaagagcgtgtgtctgttcaccgacttcgacagccagaccaacgtgtcccagagcaaggactccgacgtgtacatcaccgataagtgcgtgctggacatgcggagcatggacttcaagagcaactccgccgtggcctggtccaacaagtccgatttcgcctgcgccaacgccttcaacaacagcattatccccgaggacacattcttcccaagccccgagagcagcgactccaccgaccacgtgaagcccaaagagacagagaacaccaagcagcccagcaagagctgccacaagcccaaggccatcgtgcacaccgagaaagtgaacatgatgagcctgaccgtgctgggcctgcggatgctgttcgccaaaaccgtggccgtgaacttcctgctgaccgccaagctgttcttcctcctcaccgccagggccaagcgatctggatctggagcaacaaacttctcactactcaaacaagcaggtgacgtggaggagaatcccgggcctactagcatggccctgcccgtgacagccctgctgctgcctctggctctgctgctgcacgccgccagacccgatgaattcgaggtgcaactggtggaaagcggcggaggcctggtgcaggctggcggatctctgagactgagctgtgccgccagcggcatcaccttcagcatcaacacaatgggctggtacagacaggcccctggcaagcagagggaactggtggccctgatctccagcatcggcgacacctactacgccgacagcgtgaagggccggttcaccatcagccgggacaacgccaagaacaccgtgtacctccagatgaacagcctgaagcccgaggacaccgccgtgtactactgcaagcggttcagaacagccgcccagggcaccgattattggggccagggaacacaagtgaccgtgtcctctacgcgtgaggacctgaagaacgtgttcccacctgaggtggccgtgttcgagcctagcgaggccgagatcagccacacccagaaagccaccctcgtgtgcctggctaccggcttctaccccgaccatgtggaactgtcttggtgggtcaacggcaaagaggtgcacagcggcgtgtgtaccgacccccagccactgaaagaacagcccgccctgaacgacagccggtactgcctgagcagcagactgagagtgtccgccaccttctggcagaacccccggaaccacttcagatgccaggtgcagttctacggcctgagcgagaacgacgagtggacccaggacagagccaagcccgtgacccagatcgtgtctgccgaagcctggggcagagccgatgatgtgattaagatccactggcaggaaaagaagtccaacaccatcctgggcagccaggaaggcaacaccatgaagaccaacgacacctacatgaagttcagctggctgaccgtgcccgagaagtccctggacaaagaacacagatgcatcgtgcggcacgaaaacaacaagaacggcgtggaccaggaaatcatcttcccacccatcaagaccgatgtgattacaatggaccccaaggacaactgctccaaggacgccaacgataccctgctgctccagctgaccaacaccagcgcctactacatgtacttgttgctgctgctgaagtccgtggtgtacttcgccatcatcacatgctgcctgctgatggctatggtcaagcggaaggacagccggggacgcgccaagagaagcggatctggcgtgaagcagaccctgaatttcgacctgctgaagctggctggcgacgtggaatccaacccaggcccttctagaggccatatgaccgagtacaagcccacggtgcgcctcgccacccgcgacgacgtccccagggccgtacgcaccctcgccgccgcgttcgccgactaccccgccacgcgccacaccgtcgatccggaccgccacatcgagcgggtcaccgagctgcaagaactcttcctcacgcgcgtcgggctcgacatcggcaaggtgtgggtcgcggacgacggcgccgcggtggcggtctggaccacgccggagagcgtcgaagcgggggcggtgttcgccgagatcggcccgcgcatggccgagttgagcggttcccggctggccgcgcagcaacagatggaaggcctcctggcgccgcaccggcccaaggagcccgcgtggttcctggccaccgtcggcgtctcgcccgaccaccagggcaagggtctgggcagcgccgtcgtgctccccggagtggaggcggccgagcgcgccggggtgcccgccttcctggagacctccgcgccccgcaacctccccttctacgagcggctcggcttcaccgtcaccgccgacgtcgaggtgcccgaaggaccgcgcacctggtgcatgacccgcaagcccggtgcctga

SEQ ID NO: 17885 - DNA, 2559 bp, synthetic construct; identical to SEQ ID NO: 17884
  source 1..2559: mol_type = other DNA

SEQ ID NO: 17886 - DNA, 3354 bp, synthetic construct
  source 1..3354: mol_type = other DNA
atggccttaccagtgaccgccttgctcctgccgctggccttgctgctccacgccgccaggccgctcgagatccagaaccctgatcctgccgtgtaccagctgcgggatagcaagagcagcgacaagagcgtgtgtctgttcaccgacttcgacagccagaccaacgtgtcccagagcaaggactccgacgtgtacatcaccgataagtgcgtgctggacatgcggagcatggacttcaagagcaactccgccgtggcctggtccaacaagtccgatttcgcctgcgccaacgccttcaacaacagcattatccccgaggacacattcttcccaagccccgagagcagcgactccaccgaccacgtgaagcccaaagagacagagaacaccaagcagcccagcaagagctgccacaagcccaaggccatcgtgcacaccgagaaagtgaacatgatgagcctgaccgtgctgggcctgcggatgctgttcgccaaaaccgtggccgtgaacttcctgctgaccgccaagctgttcttcctcctcaccgccagggccaagcgatctggatctggagcaacaaacttctcactactcaaacaagcaggtgacgtggaggagaatcccgggcctactagcatggccttaccagtgaccgccttgctcctgccgctggccttgctgctccacgccgccaggccgcaggtccagctcgtcgagtccggcggcggcctcgtccaggccggcgactccgtcaccctctcctgcaccgcctccggccgcaccttctcctcctacgccctcgcctggttccgccagcgccccggcaaggagcgcgagttcgtcgccggcctccgctggggcggccccaccaactacgccgactccgtcaaggaccgcttcaccatctccggcgactccgccaagcacaccatgtacctccagatgaactccctcaagcccgaggacaccgccgtctactactgcggctacaaccccggcggctgggccgtcccctcccagtacgagtacgactcctggggccagggcacccaggtcaccgtctcctccggtaccggcggaggcggatctggcggcggaggtagcggtggcggaggatctgaattcgacatccagatgacacagagccctagcagcctgtctgccagcgtgggagacagagtgaccatcacatgcaaggccagcgaccacatcaacaactggctggcctggtatcagcagaagcctggacaggcccctaagctgctgatctacggcgctaccacactggaaacaggcgtgcccagcagattttctggcagcggctctggcaccgactacaccctgacaatatccagcctccagcctgaggacttcgccacctactactgtcagcagagctggaacaccccttggacattcggccagggcaccaagctggaaatcaagagaggcggaggcggaagtggaggcggaggatctggcggcggaggctctcaagttcagcttcaacagcctggcgctgagctggtcaaacctggcgcttctgtgaagatgagctgcaaagccagcggctacgccttcagcagctactggatcaactggatgaagcagaaacccggccagggactcgaatggatcggccaaatctatcccggcgacggcgacaccaactacaacggcaagttcaagggcagagccacactgaccgccgatacctctagcagcacagcctacatgcagctgagcagcctgaccagcgaagatagcgccgtgtacttctgtgcccggtccatcacaacagtcgtgggctgcgctatggactattggggccagggaacaagcgtgaccgtgtctagtacgcgtgaggacctgaagaacgtgttcccacctgaggtggccgtgttcgagcctagcgaggccgagatcagccacacccagaaagccaccctcgtgtgcctggctaccggcttctaccccgaccatgtggaactgtcttggtgggtcaacggcaaagaggtgcacagcggcgtgtgtaccgacccccagccactgaaagaacagcccgccctgaacgacagccggtactgcctgagcagcagactgagagtgtccgccaccttctggcagaacccccggaaccacttcagatgccaggtgcagttctacggcctgagcgagaacgacgagtggacccaggacagagccaagcccgtgacccagatcgtgtctgccgaagcctggggcagagccgatgatgtgattaagatccactggcaggaaaagaagtccaacaccatcctgggcagccaggaaggcaacaccatgaagaccaacgacacctacatgaagttcagctggctgaccgtgcccgagaagtccctggacaaagaacacagatgcatcgtgcggcacgaaaacaacaagaacggcgtggaccaggaaatcatcttcccacccatcaagaccgatgtgattacaatggaccccaaggacaactgctccaaggacgccaacgataccctgctgctccagctgaccaacaccagcgcctactacatgtacttgttgctgctgctgaagtccgtggtgtacttcgccatcatcacatgctgcctgctgatggctatggtcaagcggaaggacagccggggacgcgccaagagaagcggatctggcgtgaagcagaccctgaatttcgacctgctgaagctggctggcgacgtggaatccaacccaggcccttctagaggccatatgaccgagtacaagcccacggtgcgcctcgccacccgcgacgacgtccccagggccgtacgcaccctcgccgccgcgttcgccgactaccccgccacgcgccacaccgtcgatccggaccgccacatcgagcgggtcaccgagctgcaagaactcttcctcacgcgcgtcgggctcgacatcggcaaggtgtgggtcgcggacgacggcgccgcggtggcggtctggaccacgccggagagcgtcgaagcgggggcggtgttcgccgagatcggcccgcgcatggccgagttgagcggttcccggctggccgcgcagcaacagatggaaggcctcctggcgccgcaccggcccaaggagcccgcgtggttcctggccaccgtcggcgtctcgcccgaccaccagggcaagggtctgggcagcgccgtcgtgctccccggagtggaggcggccgagcgcgccggggtgcccgccttcctggagacctccgcgccccgcaacctccccttctacgagcggctcggcttcaccgtcaccgccgacgtcgaggtgcccgaaggaccgcgcacctggtgcatgacccgcaagcccggtgcctga

SEQ ID NO: 17887 - DNA, 3741 bp, synthetic construct
  source 1..3741: mol_type = other DNA
atggccttaccagtgaccgccttgctcctgccgctggccttgctgctccacgccgccaggccgctcgagatccagaaccctgatcctgccgtgtaccagctgcgggatagcaagagcagcgacaagagcgtgtgtctgttcaccgacttcgacagccagaccaacgtgtcccagagcaaggactccgacgtgtacatcaccgataagtgcgtgctggacatgcggagcatggacttcaagagcaactccgccgtggcctggtccaacaagtccgatttcgcctgcgccaacgccttcaacaacagcattatccccgaggacacattcttcccaagccccgagagcagcgactccaccgaccacgtgaagcccaaagagacagagaacaccaagcagcccagcaagagctgccacaagcccaaggccatcgtgcacaccgagaaagtgaacatgatgagcctgaccgtgctgggcctgcggatgctgttcgccaaaaccgtggccgtgaacttcctgctgaccgccaagctgttcttcctcctcaccgccagggccaagcgatctggatctggagcaacaaacttctcactactcaaacaagcaggtgacgtggaggagaatcccgggcctactagcatggccttaccagtgaccgccttgctcctgccgctggccttgctgctccacgccgccaggccggaggttcagctgcttgagtctggcggaggactggttcaacctggcggaagcctgagactgtcttgtgccgccagcggcttcacctttagcagctacgccatgagctgggtccgacaggctcctggcaaaggactggaatgggtgtccagcatcagcggcagcggcgactacatctactacgccgatagcgtgaagggcagattcaccatcagccgggacatcagcaagaacaccctgtacctccagatgaacagcctgagagccgaggacaccgccgtgtactactgtgccaaagaaggcaccggcgctaacagcagcctggccgattatagaggccagggcacactggtcaccgtgtctagtggcggaggaagcggcggaggatctcaggtccagctcgtcgagtccggcggcggcctcgtccaggccggcgactccgtcaccctctcctgcaccgcctccggccgcaccttctcctcctacgccctcgcctggttccgccagcgccccggcaaggagcgcgagttcgtcgccggcctccgctggggcggccccaccaactacgccgactccgtcaaggaccgcttcaccatctccggcgactccgccaagcacaccatgtacctccagatgaactccctcaagcccgaggacaccgccgtctactactgcggctacaaccccggcggctgggccgtcccctcccagtacgagtacgactcctggggccagggcacccaggtcaccgtctcctccggtaccggcggaggcggatctggcggcggaggtagcggtggcggaggatctgaattcgacatccagatgacacagagccctagcagcctgtctgccagcgtgggagacagagtgaccatcacatgcaaggccagcgaccacatcaacaactggctggcctggtatcagcagaagcctggacaggcccctaagctgctgatctacggcgctaccacactggaaacaggcgtgcccagcagattttctggcagcggctctggcaccgactacaccctgacaatatccagcctccagcctgaggacttcgccacctactactgtcagcagagctggaacaccccttggacattcggccagggcaccaagctggaaatcaagagaggcggaggcggaagtggaggcggaggatctggcggcggaggctctcaagttcagcttcaacagcctggcgctgagctggtcaaacctggcgcttctgtgaagatgagctgcaaagccagcggctacgccttcagcagctactggatcaactggatgaagcagaaacccggccagggactcgaatggatcggccaaatctatcccggcgacggcgacaccaactacaacggcaagttcaagggcagagccacactgaccgccgatacctctagcagcacagcctacatgcagctgagcagcctgaccagcgaagatagcgccgtgtacttctgtgcccggtccatcacaacagtcgtgggctgcgctatggactattggggccagggaacaagcgtgaccgtgtctagtacgcgtgaggacctgaagaacgtgttcccacctgaggtggccgtgttcgagcctagcgaggccgagatcagccacacccagaaagccaccctcgtgtgcctggctaccggcttctaccccgaccatgtggaactgtcttggtgggtcaacggcaaagaggtgcacagcggcgtgtgtaccgacccccagccactgaaagaacagcccgccctgaacgacagccggtactgcctgagcagcagactgagagtgtccgccaccttctggcagaacccccggaaccacttcagatgccaggtgcagttctacggcctgagcgagaacgacgagtggacccaggacagagccaagcccgtgacccagatcgtgtctgccgaagcctggggcagagccgatgatgtgattaagatccactggcaggaaaagaagtccaacaccatcctgggcagccaggaaggcaacaccatgaagaccaacgacacctacatgaagttcagctggctgaccgtgcccgagaagtccctggacaaagaacacagatgcatcgtgcggcacgaaaacaacaagaacggcgtggaccaggaaatcatcttcccacccatcaagaccgatgtgattacaatggaccccaaggacaactgctccaaggacgccaacgataccctgctgctccagctgaccaacaccagcgcctactacatgtacttgttgctgctgctgaagtccgtggtgtacttcgccatcatcacatgctgcctgctgatggctatggtcaagcggaaggacagccggggacgcgccaagagaagcggatctggcgtgaagcagaccctgaatttcgacctgctgaagctggctggcgacgtggaatccaacccaggcccttctagaggccatatgaccgagtacaagcccacggtgcgcctcgccacccgcgacgacgtccccagggccgtacgcaccctcgccgccgcgttcgccgactaccccgccacgcgccacaccgtcgatccggaccgccacatcgagcgggtcaccgagctgcaagaactcttcctcacgcgcgtcgggctcgacatcggcaaggtgtgggtcgcggacgacggcgccgcggtggcggtctggaccacgccggagagcgtcgaagcgggggcggtgttcgccgagatcggcccgcgcatggccgagttgagcggttcccggctggccgcgcagcaacagatggaaggcctcctggcgccgcaccggcccaaggagcccgcgtggttcctggccaccgtcggcgtctcgcccgaccaccagggcaagggtctgggcagcgccgtcgtgctccccggagtggaggcggccgagcgcgccggggtgcccgccttcctggagacctccgcgccccgcaacctccccttctacgagcggctcggcttcaccgtcaccgccgacgtcgaggtgcccgaaggaccgcgcacctggtgcatgacccgcaagcccggtgcctga

SEQ ID NO: 17888 - DNA, 3735 bp, synthetic construct
  source 1..3735: mol_type = other DNA
atggccttaccagtgaccgccttgctcctgccgctggccttgctgctccacgccgccaggccgctcgagatccagaaccctgatcctgccgtgtaccagctgcgggatagcaagagcagcgacaagagcgtgtgtctgttcaccgacttcgacagccagaccaacgtgtcccagagcaaggactccgacgtgtacatcaccgataagtgcgtgctggacatgcggagcatggacttcaagagcaactccgccgtggcctggtccaacaagtccgatttcgcctgcgccaacgccttcaacaacagcattatccccgaggacacattcttcccaagccccgagagcagcgactccaccgaccacgtgaagcccaaagagacagagaacaccaagcagcccagcaagagctgccacaagcccaaggccatcgtgcacaccgagaaagtgaacatgatgagcctgaccgtgctgggcctgcggatgctgttcgccaaaaccgtggccgtgaacttcctgctgaccgccaagctgttcttcctcctcaccgccagggccaagcgatctggatctggagcaacaaacttctcactactcaaacaagcaggtgacgtggaggagaatcccgggcctactagcatggccttaccagtgaccgccttgctcctgccgctggccttgctgctccacgccgccaggccgggcgtgacacagagccccacacacctgattaagaccagaggccagcaggccacactgagatgcagccctatcagcggccacaccagcgtgtactggtatcagcaggctctcggactgggcctccagttcctgctttggtacgacgagggcgaagagagaaaccggggcaacttccctcctcggttttccggcagacagttccccaactacagcagcgagctgaacgtgaacgccctggaactggaagatagcgccctgtacctgtgtgcctcttctcttggtggacctcgcggactggctggactgagaggggatgagcagtttttcggccctggcaccagactgaccgtgctggaaggcggaggaagcggcggaggatctcaggtccagctcgtcgagtccggcggcggcctcgtccaggccggcgactccgtcaccctctcctgcaccgcctccggccgcaccttctcctcctacgccctcgcctggttccgccagcgccccggcaaggagcgcgagttcgtcgccggcctccgctggggcggccccaccaactacgccgactccgtcaaggaccgcttcaccatctccggcgactccgccaagcacaccatgtacctccagatgaactccctcaagcccgaggacaccgccgtctactactgcggctacaaccccggcggctgggccgtcccctcccagtacgagtacgactcctggggccagggcacccaggtcaccgtctcctccggtaccggcggaggcggatctggcggcggaggtagcggtggcggaggatctgaattcgacatccagatgacacagagccctagcagcctgtctgccagcgtgggagacagagtgaccatcacatgcaaggccagcgaccacatcaacaactggctggcctggtatcagcagaagcctggacaggcccctaagctgctgatctacggcgctaccacactggaaacaggcgtgcccagcagattttctggcagcggctctggcaccgactacaccctgacaatatccagcctccagcctgaggacttcgccacctactactgtcagcagagctggaacaccccttggacattcggccagggcaccaagctggaaatcaagagaggcggaggcggaagtggaggcggaggatctggcggcggaggctctcaagttcagcttcaacagcctggcgctgagctggtcaaacctggcgcttctgtgaagatgagctgcaaagccagcggctacgccttcagcagctactggatcaactggatgaagcagaaacccggccagggactcgaatggatcggccaaatctatcccggcgacggcgacaccaactacaacggcaagttcaagggcagagccacactgaccgccgatacctctagcagcacagcctacatgcagctgagcagcctgaccagcgaagatagcgccgtgtacttctgtgcccggtccatcacaacagtcgtgggctgcgctatggactattggggccagggaacaagcgtgaccgtgtctagtacgcgtgaggacctgaagaacgtgttcccacctgaggtggccgtgttcgagcctagcgaggccgagatcagccacacccagaaagccaccctcgtgtgcctggctaccggcttctaccccgaccatgtggaactgtcttggtgggtcaacggcaaagaggtgcacagcggcgtgtgtaccgacccccagccactgaaagaacagcccgccctgaacgacagccggtactgcctgagcagcagactgagagtgtccgccaccttctggcagaacccccggaaccacttcagatgccaggtgcagttctacggcctgagcgagaacgacgagtggacccaggacagagccaagcccgtgacccagatcgtgtctgccgaagcctggggcagagccgatgatgtgattaagatccactggcaggaaaagaagtccaacaccatcctgggcagccaggaaggcaacaccatgaagaccaacgacacctacatgaagttcagctggctgaccgtgcccgagaagtccctggacaaagaacacagatgcatcgtgcggcacgaaaacaacaagaacggcgtggaccaggaaatcatcttcccacccatcaagaccgatgtgattacaatggaccccaaggacaactgctccaaggacgccaacgataccctgctgctccagctgaccaacaccagcgcctactacatgtacttgttgctgctgctgaagtccgtggtgtacttcgccatcatcacatgctgcctgctgatggctatggtcaagcggaaggacagccggggacgcgccaagagaagcggatctggcgtgaagcagaccctgaatttcgacctgctgaagctggctggcgacgtggaatccaacccaggcccttctagaggccatatgaccgagtacaagcccacggtgcgcctcgccacccgcgacgacgtccccagggccgtacgcaccctcgccgccgcgttcgccgactaccccgccacgcgccacaccgtcgatccggaccgccacatcgagcgggtcaccgagctgcaagaactcttcctcacgcgcgtcgggctcgacatcggcaaggtgtgggtcgcggacgacggcgccgcggtggcggtctggaccacgccggagagcgtcgaagcgggggcggtgttcgccgagatcggcccgcgcatggccgagttgagcggttcccggctggccgcgcagcaacagatggaaggcctcctggcgccgcaccggcccaaggagcccgcgtggttcctggccaccgtcggcgtctcgcccgaccaccagggcaagggtctgggcagcgccgtcgtgctccccggagtggaggcggccgagcgcgccggggtgcccgccttcctggagacctccgcgccccgcaacctccccttctacgagcggctcggcttcaccgtcaccgccgacgtcgaggtgcccgaaggaccgcgcacctggtgcatgacccgcaagcccggtgcctga

SEQ ID NO: 17889 - DNA, 3015 bp, synthetic construct
  source 1..3015: mol_type = other DNA
atggccttaccagtgaccgccttgctcctgccgctggccttgctgctccacgccgccaggccgctcgagatccagaaccctgatcctgccgtgtaccagctgcgggatagcaagagcagcgacaagagcgtgtgtctgttcaccgacttcgacagccagaccaacgtgtcccagagcaaggactccgacgtgtacatcaccgataagtgcgtgctggacatgcggagcatggacttcaagagcaactccgccgtggcctggtccaacaagtccgatttcgcctgcgccaacgccttcaacaacagcattatccccgaggacacattcttcccaagccccgagagcagcgactccaccgaccacgtgaagcccaaagagacagagaacaccaagcagcccagcaagagctgccacaagcccaaggccatcgtgcacaccgagaaagtgaacatgatgagcctgaccgtgctgggcctgcggatgctgttcgccaaaaccgtggccgtgaacttcctgctgaccgccaagctgttcttcctcctcaccgccagggccaagcgatctggatctggagcaacaaacttctcactactcaaacaagcaggtgacgtggaggagaatcccgggcctactagcatggccttaccagtgaccgccttgctcctgccgctggccttgctgctccacgccgccaggccgggcgtgacacagagccccacacacctgattaagaccagaggccagcaggccacactgagatgcagccctatcagcggccacaccagcgtgtactggtatcagcaggctctcggactgggcctccagttcctgctttggtacgacgagggcgaagagagaaaccggggcaacttccctcctcggttttccggcagacagttccccaactacagcagcgagctgaacgtgaacgccctggaactggaagatagcgccctgtacctgtgtgcctcttctcttggtggacctcgcggactggctggactgagaggggatgagcagtttttcggccctggcaccagactgaccgtgctggaaggcggaggaagcggcggaggatctggcgtgacacagagccccacacacctgattaagaccagaggccagcaggccacactgagatgcagccctatcagcggccacaccagcgtgtactggtatcagcaggctctcggactgggcctccagttcctgctttggtacgacgagggcgaagagagaaaccggggcaacttccctcctcggttttccggcagacagttccccaactacagcagcgagctgaacgtgaacgccctggaactggaagatagcgccctgtacctgtgtgccagctctctcggcggagatgaactgggagccgatggcaacgagcagttctttggccctggcaccagactgaccgtgctggaaggtaccggcggaggcggatctggcggcggaggtagcggtggcggaggatctgaattcgacatccagatgacacagagccctagcagcctgtctgccagcgtgggagacagagtgaccatcacatgcaaggccagcgaccacatcaacaactggctggcctggtatcagcagaagcctggacaggcccctaagctgctgatctacggcgctaccacactggaaacaggcgtgcccagcagattttctggcagcggctctggcaccgactacaccctgacaatatccagcctccagcctgaggacttcgccacctactactgtcagcagagctggaacaccccttggacattcggccagggcaccaagctggaaatcaagagaggcggaggcggaagtggaggcggaggatctggcggcggaggctctcaagttcagcttcaacagcctggcgctgagctggtcaaacctggcgcttctgtgaagatgagctgcaaagccagcggctacgccttcagcagctactggatcaactggatgaagcagaaacccggccagggactcgaatggatcggccaaatctatcccggcgacggcgacaccaactacaacggcaagttcaagggcagagccacactgaccgccgatacctctagcagcacagcctacatgcagctgagcagcctgaccagcgaagatagcgccgtgtacttctgtgcccggtccatcacaacagtcgtgggctgcgctatggactattggggccagggaacaagcgtgaccgtgtctagtacgcgtgaggacctgaagaacgtgttcccacctgaggtggccgtgttcgagcctagcgaggccgagatcagccacacccagaaagccaccctcgtgtgcctggctaccggcttctaccccgaccatgtggaactgtcttggtgggtcaacggcaaagaggtgcacagcggcgtgtgtaccgacccccagccactgaaagaacagcccgccctgaacgacagccggtactgcctgagcagcagactgagagtgtccgccaccttctggcagaacccccggaaccacttcagatgccaggtgcagttctacggcctgagcgagaacgacgagtggacccaggacagagccaagcccgtgacccagatcgtgtctgccgaagcctggggcagagccgatgatgtgattaagatccactggcaggaaaagaagtccaacaccatcctgggcagccaggaaggcaacaccatgaagaccaacgacacctacatgaagttcagctggctgaccgtgcccgagaagtccctggacaaagaacacagatgcatcgtgcggcacgaaaacaacaagaacggcgtggaccaggaaatcatcttcccacccatcaagaccgatgtgattacaatggaccccaaggacaactgctccaaggacgccaacgataccctgctgctccagctgaccaacaccagcgcctactacatgtacttgttgctgctgctgaagtccgtggtgtacttcgccatcatcacatgctgcctgctgatggctatggtcaagcggaaggacagccgggga

SEQ ID NO: 17890 - DNA, 2577 bp, synthetic construct
  source 1..2577: mol_type = other DNA
atggccttaccagtgaccgccttgctcctgccgctggccttgctgctccacgccgccaggccgctcgagatccagaaccctgatcctgccgtgtaccagctgcgggatagcaagagcagcgacaagagcgtgtgtctgttcaccgacttcgacagccagaccaacgtgtcccagagcaaggactccgacgtgtacatcaccgataagtgcgtgctggacatgcggagcatggacttcaagagcaactccgccgtggcctggtccaacaagtccgatttcgcctgcgccaacgccttcaacaacagcattatccccgaggacacattcttcccaagccccgagagcagcgactccaccgaccacgtgaagcccaaagagacagagaacaccaagcagcccagcaagagctgccacaagcccaaggccatcgtgcacaccgagaaagtgaacatgatgagcctgaccgtgctgggcctgcggatgctgttcgccaaaaccgtggccgtgaacttcctgctgaccgccaagctgttcttcctcctcaccgccagggccaagcgatctggatctggagcaacaaacttctcactactcaaacaagcaggtgacgtggaggagaatcccgggcctactagcatggccctgcccgtgacagccctgctgctgcctctggctctgctgctgcacgccgccagacccgatgaattcggctctgacctgggcatcaagctgctgttcgccgctgccaagggccaggacgacgaagtgcggattctgctggctgctggggccgacgtgaacgccaaggatttcgagggctacacccccctgcacgtggccgcctatgatggacacctggaaatcgtggaagtgctgctgaaggctggcgctgatgtgaatgccaaagacagccagggccggacccctctgcatgaagccgcctacagcggccatctggaaattgtggaagtgctgctgaaagccggggcagacgtgaacgctcaggacgacgctggcgagacaccagccgatctggctgcagcttggggccacgaagatatcgccgaggtgctgcagaagacgcgtgaggacctgaagaacgtgttcccacctgaggtggccgtgttcgagcctagcgaggccgagatcagccacacccagaaagccaccctcgtgtgcctggctaccggcttctaccccgaccatgtggaactgtcttggtgggtcaacggcaaagaggtgcacagcggcgtgtgtaccgacccccagccactgaaagaacagcccgccctgaacgacagccggtactgcctgagcagcagactgagagtgtccgccaccttctggcagaacccccggaaccacttcagatgccaggtgcagttctacggcctgagcgagaacgacgagtggacccaggacagagccaagcccgtgacccagatcgtgtctgccgaagcctggggcagagccgatgatgtgattaagatccactggcaggaaaagaagtccaacaccatcctgggcagccaggaaggcaacaccatgaagaccaacgacacctacatgaagttcagctggctgaccgtgcccgagaagtccctggacaaagaacacagatgcatcgtgcggcacgaaaacaacaagaacggcgtggaccaggaaatcatcttcccacccatcaagaccgatgtgattacaatggaccccaaggacaactgctccaaggacgccaacgataccctgctgctccagctgaccaacaccagcgcctactacatgtacttgttgctgctgctgaagtccgtggtgtacttcgccatcatcacatgctgcctgctgatggctatggtcaagcggaaggacagccggggacgcgccaagagaagcggatctggcgtgaagcagaccctgaatttcgacctgctgaagctggctggcgacgtggaatccaacccaggcccttctagaggccatatgaccgagtacaagcccacggtgcgcctcgccacccgcgacgacgtccccagggccgtacgcaccctcgccgccgcgttcgccgactaccccgccacgcgccacaccgtcgatccggaccgccacatcgagcgggtcaccgagctgcaagaactcttcctcacgcgcgtcgggctcgacatcggcaaggtgtgggtcgcggacgacggcgccgcggtggcggtctggaccacgccggagagcgtcgaagcgggggcggtgttcgccgagatcggcccgcgcatggccgagttgagcggttcccggctggccgcgcagcaacagatggaaggcctcctggcgccgcaccggcccaaggagcccgcgtggttcctggccaccgtcggcgtctcgcccgaccaccagggcaagggtctgggcagcgccgtcgtgctccccggagtggaggcggccgagcgcgccggggtgcccgccttcctggagacctccgcgccccgcaacctccccttctacgagcggctcggcttcaccgtcaccgccgacgtcgaggtgcccgaaggaccgcgcacctggtgcatgacccgcaagcccggtgcctga

SEQ ID NO: 17891 - DNA, 2364 bp, synthetic construct
  source 1..2364: mol_type = other DNA
atggccttaccagtgaccgccttgctcctgccgctggccttgctgctccacgccgccaggccgctcgagatccagaaccctgatcctgccgtgtaccagctgcgggatagcaagagcagcgacaagagcgtgtgtctgttcaccgacttcgacagccagaccaacgtgtcccagagcaaggactccgacgtgtacatcaccgataagtgcgtgctggacatgcggagcatggacttcaagagcaactccgccgtggcctggtccaacaagtccgatttcgcctgcgccaacgccttcaacaacagcattatccccgaggacacattcttcccaagccccgagagcagcgactccaccgaccacgtgaagcccaaagagacagagaacaccaagcagcccagcaagagctgccacaagcccaaggccatcgtgcacaccgagaaagtgaacatgatgagcctgaccgtgctgggcctgcggatgctgttcgccaaaaccgtggccgtgaacttcctgctgaccgccaagctgttcttcctcctcaccgccagggccaagcgatctggatctggagcaacaaacttctcactactcaaacaagcaggtgacgtggaggagaatcccgggcctactagcatggactggatttggcgcatccttttccttgtcggcgctgctaccggcgcccattccttcgaaggcagcggattcgaatacgccaaagagatgcggaacgcctactgggagatcgccctgctgcccaatctgaccaaccagcagaagagagcccccatcagaaagctgtacgacgacccctcccagagcagcgagctgctgtctgaggctaaaaaactgaacgatagccagacgcgtgaggacctgaagaacgtgttcccacctgaggtggccgtgttcgagcctagcgaggccgagatcagccacacccagaaagccaccctcgtgtgcctggctaccggcttctaccccgaccatgtggaactgtcttggtgggtcaacggcaaagaggtgcacagcggcgtgtgtaccgacccccagccactgaaagaacagcccgccctgaacgacagccggtactgcctgagcagcagactgagagtgtccgccaccttctggcagaacccccggaaccacttcagatgccaggtgcagttctacggcctgagcgagaacgacgagtggacccaggacagagccaagcccgtgacccagatcgtgtctgccgaagcctggggcagagccgatgatgtgattaagatccactggcaggaaaagaagtccaacaccatcctgggcagccaggaaggcaacaccatgaagaccaacgacacctacatgaagttcagctggctgaccgtgcccgagaagtccctggacaaagaacacagatgcatcgtgcggcacgaaaacaacaagaacggcgtggaccaggaaatcatcttcccacccatcaagaccgatgtgattacaatggaccccaaggacaactgctccaaggacgccaacgataccctgctgctccagctgaccaacaccagcgcctactacatgtacttgttgctgctgctgaagtccgtggtgtacttcgccatcatcacatgctgcctgctgatggctatggtcaagcggaaggacagccggggacgcgccaagagaagcggatctggcgtgaagcagaccctgaatttcgacctgctgaagctggctggcgacgtggaatccaacccaggcccttctagaggccatatgaccgagtacaagcccacggtgcgcctcgccacccgcgacgacgtccccagggccgtacgcaccctcgccgccgcgttcgccgactaccccgccacgcgccacaccgtcgatccggaccgccacatcgagcgggtcaccgagctgcaagaactcttcctcacgcgcgtcgggctcgacatcggcaaggtgtgggtcgcggacgacggcgccgcggtggcggtctggaccacgccggagagcgtcgaagcgggggcggtgttcgccgagatcggcccgcgcatggccgagttgagcggttcccggctggccgcgcagcaacagatggaaggcctcctggcgccgcaccggcccaaggagcccgcgtggttcctggccaccgtcggcgtctcgcccgaccaccagggcaagggtctgggcagcgccgtcgtgctccccggagtggaggcggccgagcgcgccggggtgcccgccttcctggagacctccgcgccccgcaacctccccttctacgagcggctcggcttcaccgtcaccgccgacgtcgaggtgcccgaaggaccgcgcacctggtgcatgacccgcaagcccggtgcctga

SEQ ID NO: 17892 - DNA, 3030 bp, synthetic construct
  source 1..3030: mol_type = other DNA
atggccttaccagtgaccgccttgctcctgccgctggccttgctgctccacgccgccaggccgctcgagatccagaaccctgatcctgccgtgtaccagctgcgggatagcaagagcagcgacaagagcgtgtgtctgttcaccgacttcgacagccagaccaacgtgtcccagagcaaggactccgacgtgtacatcaccgataagtgcgtgctggacatgcggagcatggacttcaagagcaactccgccgtggcctggtccaacaagtccgatttcgcctgcgccaacgccttcaacaacagcattatccccgaggacacattcttcccaagccccgagagcagcgactccaccgaccacgtgaagcccaaagagacagagaacaccaagcagcccagcaagagctgccacaagcccaaggccatcgtgcacaccgagaaagtgaacatgatgagcctgaccgtgctgggcctgcggatgctgttcgccaaaaccgtggccgtgaacttcctgctgaccgccaagctgttcttcctcctcaccgccagggccaagcgatctggatctggagcaacaaacttctcactactcaaacaagcaggtgacgtggaggagaatcccgggcctactagcatggccctgcccgtgacagccctgctgctgcctctggctctgctgctgcacgccgccagacccgatgaattcgaggtgcaactggtggaaagcggcggaggcctggtgcaggctggcggatctctgagactgagctgtgccgccagcggcatcaccttcagcatcaacacaatgggctggtacagacaggcccctggcaagcagagggaactggtggccctgatctccagcatcggcgacacctactacgccgacagcgtgaagggccggttcaccatcagccgggacaacgccaagaacaccgtgtacctccagatgaacagcctgaagcccgaggacaccgccgtgtactactgcaagcggttcagaacagccgcccagggcaccgattattggggccagggaacacaagtgaccgtgtcctctctcgagggaggaggcggctccgggggaggcggaagtggaggcggaggatctgggtctggaggaagcggatctggaggctcagggtcagggggctcaggcagtggaggctctttcgaagtgcaactggtggaatctgggggcggactggtgcagccaggcggaagtctgaggctgtcttgtgccgcctccggcagcatcttcggcttcaacgacatggcctggtatcggcaggctcccggaaaacagcgcgagctggtggctctgattagcagagtgggcgtgaccagcagcgccgactctgtgaagggcagattcacaatctccagagtgaacgccaaggatacagtgtacctccagatgaactctctgaaacctgaggatacagcagtgtactattgctacatggaccagcggctggacggcagcacactggcctactggggacagggaactcaagtgacagtgtctagcacgcgtgaggacctgaagaacgtgttcccacctgaggtggccgtgttcgagcctagcgaggccgagatcagccacacccagaaagccaccctcgtgtgcctggctaccggcttctaccccgaccatgtggaactgtcttggtgggtcaacggcaaagaggtgcacagcggcgtgtgtaccgacccccagccactgaaagaacagcccgccctgaacgacagccggtactgcctgagcagcagactgagagtgtccgccaccttctggcagaacccccggaaccacttcagatgccaggtgcagttctacggcctgagcgagaacgacgagtggacccaggacagagccaagcccgtgacccagatcgtgtctgccgaagcctggggcagagccgatgatgtgattaagatccactggcaggaaaagaagtccaacaccatcctgggcagccaggaaggcaacaccatgaagaccaacgacacctacatgaagttcagctggctgaccgtgcccgagaagtccctggacaaagaacacagatgcatcgtgcggcacgaaaacaacaagaacggcgtggaccaggaaatcatcttcccacccatcaagaccgatgtgattacaatggaccccaaggacaactgctccaaggacgccaacgataccctgctgctccagctgaccaacaccagcgcctactacatgtacttgttgctgctgctgaagtccgtggtgtacttcgccatcatcacatgctgcctgctgatggctatggtcaagcggaaggacagccggggacgcgccaagagaagcggatctggcgtgaagcagaccctgaatttcgacctgctgaagctggctggcgacgtggaatccaacccaggcccttctagaggccatatgaccgagtacaagcccacggtgcgcctcgccacccgcgacgacgtccccagggccgtacgcaccctcgccgccgcgttcgccgactaccccgccacgcgccacaccgtcgatccggaccgccacatcgagcgggtcaccgagctgcaagaactcttcctcacgcgcgtcgggctcgacatcggcaaggtgtgggtcgcggacgacggcgccgcggtggcggtctggaccacgccggagagcgtcgaagcgggggcggtgttcgccgagatcggcccgcgcatggccgagttgagcggttcccggctggccgcgcagcaacagatggaaggcctcctggcgccgcaccggcccaaggagcccgcgtggttcctggccaccgtcggcgtctcgcccgaccaccagggcaagggtctgggcagcgccgtcgtgctccccggagtggaggcggccgagcgcgccggggtgcccgccttcctggagacctccgcgccccgcaacctccccttctacgagcggctcggcttcaccgtcaccgccgacgtcgaggtgcccgaaggaccgcgcacctggtgcatgacccgcaagcccggtgcctga

SEQ ID NO: 17893 - DNA, 2772 bp, synthetic construct
  source 1..2772: mol_type = other DNA
atggccttaccagtgaccgccttgctcctgccgctggccttgctgctccacgccgccaggccgctcgagatccagaaccctgatcctgccgtgtaccagctgcgggatagcaagagcagcgacaagagcgtgtgtctgttcaccgacttcgacagccagaccaacgtgtcccagagcaaggactccgacgtgtacatcaccgataagtgcgtgctggacatgcggagcatggacttcaagagcaactccgccgtggcctggtccaacaagtccgatttcgcctgcgccaacgccttcaacaacagcattatccccgaggacacattcttcccaagccccgagagcagcgactccaccgaccacgtgaagcccaaagagacagagaacaccaagcagcccagcaagagctgccacaagcccaaggccatcgtgcacaccgagaaagtgaacatgatgagcctgaccgtgctgggcctgcggatgctgttcgccaaaaccgtggccgtgaacttcctgctgaccgccaagctgttcttcctcctcaccgccagggccaagcgatctggatctggagcaacaaacttctcactactcaaacaagcaggtgacgtggaggagaatcccgggcctactagcatggcccttccagtcactgccttgctgttgcctctggcgctcctgctccacgccgctagaccgggcatgagaaccgaggacctgcctaaggccgtggtgttcctggaaccccagtggtacagagtgctggaaaaggacagcgtgaccctgaagtgccagggcgcctacagccccgaggacaatagcacccagtggttccacaacgagagcctgatctccagccaggccagcagctacttcatcgacgccgccaccgtggacgacagcggcgagtatagatgccagaccaacctgagcaccctgagcgaccccgtgcagctggaagtgcacatcggatggctgctgctgcaggcccccagatgggtgttcaaagaagaggaccccatccacctgagatgccactcttggaagaacaccgccctgcacaaagtgacctacctgcagaacggcaagggcagaaagtacttccaccacaacagcgacttctacatccccaaggccaccctgaaggactccggctcctacttctgcagaggcctcgtgggcagcaagaacgtgtccagcgagacagtgaacatcaccatcacccagggcctggccgtgtctaccatcagcagctttttcccacccggctaccagacgcgtgaggacctgaagaacgtgttcccacctgaggtggccgtgttcgagcctagcgaggccgagatcagccacacccagaaagccaccctcgtgtgcctggctaccggcttctaccccgaccatgtggaactgtcttggtgggtcaacggcaaagaggtgcacagcggcgtgtgtaccgacccccagccactgaaagaacagcccgccctgaacgacagccggtactgcctgagcagcagactgagagtgtccgccaccttctggcagaacccccggaaccacttcagatgccaggtgcagttctacggcctgagcgagaacgacgagtggacccaggacagagccaagcccgtgacccagatcgtgtctgccgaagcctggggcagagccgatgatgtgattaagatccactggcaggaaaagaagtccaacaccatcctgggcagccaggaaggcaacaccatgaagaccaacgacacctacatgaagttcagctggctgaccgtgcccgagaagtccctggacaaagaacacagatgcatcgtgcggcacgaaaacaacaagaacggcgtggaccaggaaatcatcttcccacccatcaagaccgatgtgattacaatggaccccaaggacaactgctccaaggacgccaacgataccctgctgctccagctgaccaacaccagcgcctactacatgtacttgttgctgctgctgaagtccgtggtgtacttcgccatcatcacatgctgcctgctgatggctatggtcaagcggaaggacagccggggacgcgccaagagaagcggatctggcgtgaagcagaccctgaatttcgacctgctgaagctggctggcgacgtggaatccaacccaggcccttctagaggccatatgaccgagtacaagcccacggtgcgcctcgccacccgcgacgacgtccccagggccgtacgcaccctcgccgccgcgttcgccgactaccccgccacgcgccacaccgtcgatccggaccgccacatcgagcgggtcaccgagctgcaagaactcttcctcacgcgcgtcgggctcgacatcggcaaggtgtgggtcgcggacgacggcgccgcggtggcggtctggaccacgccggagagcgtcgaagcgggggcggtgttcgccgagatcggcccgcgcatggccgagttgagcggttcccggctggccgcgcagcaacagatggaaggcctcctggcgccgcaccggcccaaggagcccgcgtggttcctggccaccgtcggcgtctcgcccgaccaccagggcaagggtctgggcagcgccgtcgtgctccccggagtggaggcggccgagcgcgccggggtgcccgccttcctggagacctccgcgccccgcaacctccccttctacgagcggctcggcttcaccgtcaccgccgacgtcgaggtgcccgaaggaccgcgcacctggtgcatgacccgcaagcccggtgcctga

SEQ ID NO: 17894 - DNA, 1653 bp, synthetic construct
  source 1..1653: mol_type = other DNA
atggccttaccagtgaccgccttgctcctgccgctggccttgctgctccacgccgccaggccgctcgagatccagaaccctgatcctgccgtgtaccagctgcgggatagcaagagcagcgacaagagcgtgtgtctgttcaccgacttcgacagccagaccaacgtgtcccagagcaaggactccgacgtgtacatcaccgataagtgcgtgctggacatgcggagcatggacttcaagagcaactccgccgtggcctggtccaacaagtccgatttcgcctgcgccaacgccttcaacaacagcattatccccgaggacacattcttcccaagccccgagagcagcgactccaccgaccacgtgaagcccaaagagacagagaacaccaagcagcccagcaagagctgccacaagcccaaggccatcgtgcacaccgagaaagtgaacatgatgagcctgaccgtgctgggcctgcggatgctgttcgccaaaaccgtggccgtgaacttcctgctgaccgccaagctgttcttcctcctcaccgccagggccaagcgatctggatctggagcaacaaacttctcactactcaaacaagcaggtgacgtggaggagaatcccgggcctactagcgccaccatggccttaccagtgaccgccttgctcctgccgctggccttgctgctccacgccgccaggccgatggaccccgacctggaaatcagagccgccttcctgcggcagagaaacacagccctgagaacagaggtggccgagctggaacaagaggtgcagcggctggaaaacgaggtgtcccagtacgagacaagatacggccctctcggaggcggaaaaacgcgtgaggacctgaagaacgtgttcccacctgaggtggccgtgttcgagcctagcgaggccgagatcagccacacccagaaagccaccctcgtgtgcctggctaccggcttctaccccgaccatgtggaactgtcttggtgggtcaacggcaaagaggtgcacagcggcgtgtgtaccgacccccagccactgaaagaacagcccgccctgaacgacagccggtactgcctgagcagcagactgagagtgtccgccaccttctggcagaacccccggaaccacttcagatgccaggtgcagttctacggcctgagcgagaacgacgagtggacccaggacagagccaagcccgtgacccagatcgtgtctgccgaagcctggggcagagccgatgatgtgattaagatccactggcaggaaaagaagtccaacaccatcctgggcagccaggaaggcaacaccatgaagaccaacgacacctacatgaagttcagctggctgaccgtgcccgagaagtccctggacaaagaacacagatgcatcgtgcggcacgaaaacaacaagaacggcgtggaccaggaaatcatcttcccacccatcaagaccgatgtgattacaatggaccccaaggacaactgctccaaggacgccaacgataccctgctgctccagctgaccaacaccagcgcctactacatgtacttgttgctgctgctgaagtccgtggtgtacttcgccatcatcacatgctgcctgctgatggctatggtcaagcggaaggacagccgggga

SEQ ID NO: 17895 - DNA, 1653 bp, synthetic construct
  source 1..1653: mol_type = other DNA
atggccttaccagtgaccgccttgctcctgccgctggccttgctgctccacgccgccaggccgctcgagatccagaaccctgatcctgccgtgtaccagctgcgggatagcaagagcagcgacaagagcgtgtgtctgttcaccgacttcgacagccagaccaacgtgtcccagagcaaggactccgacgtgtacatcaccgataagtgcgtgctggacatgcggagcatggacttcaagagcaactccgccgtggcctggtccaacaagtccgatttcgcctgcgccaacgccttcaacaacagcattatccccgaggacacattcttcccaagccccgagagcagcgactccaccgaccacgtgaagcccaaagagacagagaacaccaagcagcccagcaagagctgccacaagcccaaggccatcgtgcacaccgagaaagtgaacatgatgagcctgaccgtgctgggcctgcggatgctgttcgccaaaaccgtggccgtgaacttcctgctgaccgccaagctgttcttcctcctcaccgccagggccaagcgatctggatctggagcaacaaacttctcactactcaaacaagcaggtgacgtggaggagaatcccgggcctactagcgccaccatggccttaccagtgaccgccttgctcctgccgctggccttgctgctccacgccgccaggccgatggaccctgatctcgaaattgaggccgcctttctggaacgcgagaacactgccctggaaaccagggtcgcagagctgagacagagagtgcagagactgcggaacagagtgtctcagtaccgcaccagatatggcccactcggcggaggtaaaacgcgtgaggacctgaagaacgtgttcccacctgaggtggccgtgttcgagcctagcgaggccgagatcagccacacccagaaagccaccctcgtgtgcctggctaccggcttctaccccgaccatgtggaactgtcttggtgggtcaacggcaaagaggtgcacagcggcgtgtgtaccgacccccagccactgaaagaacagcccgccctgaacgacagccggtactgcctgagcagcagactgagagtgtccgccaccttctggcagaacccccggaaccacttcagatgccaggtgcagttctacggcctgagcgagaacgacgagtggacccaggacagagccaagcccgtgacccagatcgtgtctgccgaagcctggggcagagccgatgatgtgattaagatccactggcaggaaaagaagtccaacaccatcctgggcagccaggaaggcaacaccatgaagaccaacgacacctacatgaagttcagctggctgaccgtgcccgagaagtccctggacaaagaacacagatgcatcgtgcggcacgaaaacaacaagaacggcgtggaccaggaaatcatcttcccacccatcaagaccgatgtgattacaatggaccccaaggacaactgctccaaggacgccaacgataccctgctgctccagctgaccaacaccagcgcctactacatgtacttgttgctgctgctgaagtccgtggtgtacttcgccatcatcacatgctgcctgctgatggctatggtcaagcggaaggacagccgggga

SEQ ID NO: 17896 - DNA, 2358 bp, synthetic construct
  source 1..2358: mol_type = other DNA
atggccttaccagtgaccgccttgctcctgccgctggccttgctgctccacgccgccaggccgctcgagatccagaaccctgatcctgccgtgtaccagctgcgggatagcaagagcagcgacaagagcgtgtgtctgttcaccgacttcgacagccagaccaacgtgtcccagagcaaggactccgacgtgtacatcaccgataagtgcgtgctggacatgcggagcatggacttcaagagcaactccgccgtggcctggtccaacaagtccgatttcgcctgcgccaacgccttcaacaacagcattatccccgaggacacattcttcccaagccccgagagcagcgactccaccgaccacgtgaagcccaaagagacagagaacaccaagcagcccagcaagagctgccacaagcccaaggccatcgtgcacaccgagaaagtgaacatgatgagcctgaccgtgctgggcctgcggatgctgttcgccaaaaccgtggccgtgaacttcctgctgaccgccaagctgttcttcctcctcaccgccagggccaagcgatctggatctggagcaacaaacttctcactactcaaacaagcaggtgacgtggaggagaatcccgggcctactagcgccaccatggccttaccagtgaccgccttgctcctgccgctggccttgctgctccacgccgccaggccgctgttcaatcaagaggtgcagatccctctgaccgagagctactgtggcccctgtcctaagaactggatctgctacaagaacaactgctaccagttcttcgacgagagcaagaattggtacgagagccaggccagctgcatgagccagaatgccagcctgctgaaggtgtacagcaaagaggaccaggacctgctgaaactggtcaagagcgcccactggatgggccttgtgcacatccccaccaatggctcttggcagtgggaggacggcagcattctgagccctaacctgctgaccatcatcgagatgcagaagggcgactgcgccctgtacgccagcagctttaagggctacatcgagaattgcagcaccccgaacacctacatctgtatgcagagaaccgtttctggcggaggcggctctggaggaggcggaagtggcggcggaggcgacctctttaatcaagaagtccagattccactcaccgaatcctactgcggaccttgtccaaaaaattggatttgttataagaacaactgttatcaattctttgatgagtctaaaaattggtatgagtcccaggcttcctgcatgtctcagaacgcttctctgctgaaagtctactctaaagaagatcaggatctcctgaagctcgtcaagtctgcccattggatggggctcgtccacattcctaccaacggaagctggcaatgggaagatggctccatcctgtctccaaatctgctcacgattattgaaatgcagaaaggggattgtgctctctacgccagctccttcaagggatatattgagaactgtagcacgcccaatacttatatctgtatgcaacggaccgtgacgcgtgaggacctgaagaacgtgttcccacctgaggtggccgtgttcgagcctagcgaggccgagatcagccacacccagaaagccaccctcgtgtgcctggctaccggcttctaccccgaccatgtggaactgtcttggtgggtcaacggcaaagaggtgcacagcggcgtgtgtaccgacccccagccactgaaagaacagcccgccctgaacgacagccggtactgcctgagcagcagactgagagtgtccgccaccttctggcagaacccccggaaccacttcagatgccaggtgcagttctacggcctgagcgagaacgacgagtggacccaggacagagccaagcccgtgacccagatcgtgtctgccgaagcctggggcagagccgatgatgtgattaagatccactggcaggaaaagaagtccaacaccatcctgggcagccaggaaggcaacaccatgaagaccaacgacacctacatgaagttcagctggctgaccgtgcccgagaagtccctggacaaagaacacagatgcatcgtgcggcacgaaaacaacaagaacggcgtggaccaggaaatcatcttcccacccatcaagaccgatgtgattacaatggaccccaaggacaactgctccaaggacgccaacgataccctgctgctccagctgaccaacaccagcgcctactacatgtacttgttgctgctgctgaagtccgtggtgtacttcgccatcatcacatgctgcctgctgatggctatggtcaagcggaaggacagccgggga

SEQ ID NO: 17897 - DNA, 2358 bp, synthetic construct
  source 1..2358: mol_type = other DNA
atggccttaccagtgaccgccttgctcctgccgctggccttgctgctccacgccgccaggccgctcgagatccagaaccctgatcctgccgtgtaccagctgcgggatagcaagagcagcgacaagagcgtgtgtctgttcaccgacttcgacagccagaccaacgtgtcccagagcaaggactccgacgtgtacatcaccgataagtgcgtgctggacatgcggagcatggacttcaagagcaactccgccgtggcctggtccaacaagtccgatttcgcctgcgccaacgccttcaacaacagcattatccccgaggacacattcttcccaagccccgagagcagcgactccaccgaccacgtgaagcccaaagagacagagaacaccaagcagcccagcaagagctgccacaagcccaaggccatcgtgcacaccgagaaagtgaacatgatgagcctgaccgtgctgggcctgcggatgctgttcgccaaaaccgtggccgtgaacttcctgctgaccgccaagctgttcttcctcctcaccgccagggccaagcgatctggatctggagcaacaaacttctcactactcaaacaagcaggtgacgtggaggagaatcccgggcctactagcgccaccatggccttaccagtgaccgccttgctcctgccgctggccttgctgctccacgccgccaggccgctgttcaatcaagaggtgcagatccctctgaccgagagctactgtggcccctgtcctaagaactggatctgctacaagaacaactgctaccagttcttcgacgagagcaagaattggtacgagagccaggccagctgcatgagccagaatgccagcctgctgaaggtgtacagcaaagaggaccaggacctgctgaaactggtcaagagcgcccactggatgggccttgtgcacatccccaccaatggctcttggcagtgggaggacggcagcattctgagccctaacctgctgaccatcatcgagatgcagaagggcgactgcgccctgtacgccagcagctttaagggcttcatcgagaattgcagcaccccgaacacctacatctgtatgcagagaaccgttggcggaggcggaagtggaggcggaggatctggcggcggaggctctgacctctttaatcaagaagtccagattccactcaccgaatcctactgcggaccttgtccaaaaaattggatttgttataagaacaactgttatcaattctttgatgagtctaaaaattggtatgagtcccaggcttcctgcatgtctcagaacgcttctctgctgaaagtctactctaaagaagatcaggatctcctgaagctcgtcaagtctgcccattggatggggctcgtccacattcctaccaacggaagctggcaatgggaagatggctccatcctgtctccaaatctgctcacgattattgaaatgcagaaaggggattgtgctctctacgccagctccttcaagggatttattgagaactgtagcacgcccaatacttatatctgtatgcaacggaccgtgacgcgtgaggacctgaagaacgtgttcccacctgaggtggccgtgttcgagcctagcgaggccgagatcagccacacccagaaagccaccctcgtgtgcctggctaccggcttctaccccgaccatgtggaactgtcttggtgggtcaacggcaaagaggtgcacagcggcgtgtgtaccgacccccagccactgaaagaacagcccgccctgaacgacagccggtactgcctgagcagcagactgagagtgtccgccaccttctggcagaacccccggaaccacttcagatgccaggtgcagttctacggcctgagcgagaacgacgagtggacccaggacagagccaagcccgtgacccagatcgtgtctgccgaagcctggggcagagccgatgatgtgattaagatccactggcaggaaaagaagtccaacaccatcctgggcagccaggaaggcaacaccatgaagaccaacgacacctacatgaagttcagctggctgaccgtgcccgagaagtccctggacaaagaacacagatgcatcgtgcggcacgaaaacaacaagaacggcgtggaccaggaaatcatcttcccacccatcaagaccgatgtgattacaatggaccccaaggacaactgctccaaggacgccaacgataccctgctgctccagctgaccaacaccagcgcctactacatgtacttgttgctgctgctgaagtccgtggtgtacttcgccatcatcacatgctgcctgctgatggctatggtcaagcggaaggacagccgggga

SEQ ID NO: 17898 - DNA, 2436 bp, synthetic construct
  source 1..2436: mol_type = other DNA
atggccttaccagtgaccgccttgctcctgccgctggccttgctgctccacgccgccaggccgctcgagatccagaaccctgatcctgccgtgtaccagctgcgggatagcaagagcagcgacaagagcgtgtgtctgttcaccgacttcgacagccagaccaacgtgtcccagagcaaggactccgacgtgtacatcaccgataagtgcgtgctggacatgcggagcatggacttcaagagcaactccgccgtggcctggtccaacaagtccgatttcgcctgcgccaacgccttcaacaacagcattatccccgaggacacattcttcccaagccccgagagcagcgactccaccgaccacgtgaagcccaaagagacagagaacaccaagcagcccagcaagagctgccacaagcccaaggccatcgtgcacaccgagaaagtgaacatgatgagcctgaccgtgctgggcctgcggatgctgttcgccaaaaccgtggccgtgaacttcctgctgaccgccaagctgttcttcctcctcaccgccagggccaagcgatctggatctggagcaacaaacttctcactactcaaacaagcaggtgacgtggaggagaatcccgggcctactagcatggccttaccagtgaccgccttgctcctgccgctggccttgctgctccacgccgccaggccgatggaccccgacctggaaatcagagccgccttcctgcggcagagaaacacagccctgagaacagaggtggccgagctggaacaagaggtgcagcggctggaaaacgaggtgtcccagtacgagacaagatacggccctctcggaggcggaaaaggtaccggcggaggcggatctggcggcggaggtagcggtggcggaggatctgaattcgacatccagatgacacagagccctagcagcctgtctgccagcgtgggagacagagtgaccatcacatgcaaggccagcgaccacatcaacaactggctggcctggtatcagcagaagcctggacaggcccctaagctgctgatctacggcgctaccacactggaaacaggcgtgcccagcagattttctggcagcggctctggcaccgactacaccctgacaatatccagcctccagcctgaggacttcgccacctactactgtcagcagagctggaacaccccttggacattcggccagggcaccaagctggaaatcaagagaggcggaggcggaagtggaggcggaggatctggcggcggaggctctcaagttcagcttcaacagcctggcgctgagctggtcaaacctggcgcttctgtgaagatgagctgcaaagccagcggctacgccttcagcagctactggatcaactggatgaagcagaaacccggccagggactcgaatggatcggccaaatctatcccggcgacggcgacaccaactacaacggcaagttcaagggcagagccacactgaccgccgatacctctagcagcacagcctacatgcagctgagcagcctgaccagcgaagatagcgccgtgtacttctgtgcccggtccatcacaacagtcgtgggctgcgctatggactattggggccagggaacaagcgtgaccgtgtctagtacgcgtgaggacctgaagaacgtgttcccacctgaggtggccgtgttcgagcctagcgaggccgagatcagccacacccagaaagccaccctcgtgtgcctggctaccggcttctaccccgaccatgtggaactgtcttggtgggtcaacggcaaagaggtgcacagcggcgtgtgtaccgacccccagccactgaaagaacagcccgccctgaacgacagccggtactgcctgagcagcagactgagagtgtccgccaccttctggcagaacccccggaaccacttcagatgccaggtgcagttctacggcctgagcgagaacgacgagtggacccaggacagagccaagcccgtgacccagatcgtgtctgccgaagcctggggcagagccgatgatgtgattaagatccactggcaggaaaagaagtccaacaccatcctgggcagccaggaaggcaacaccatgaagaccaacgacacctacatgaagttcagctggctgaccgtgcccgagaagtccctggacaaagaacacagatgcatcgtgcggcacgaaaacaacaagaacggcgtggaccaggaaatcatcttcccacccatcaagaccgatgtgattacaatggaccccaaggacaactgctccaaggacgccaacgataccctgctgctccagctgaccaacaccagcgcctactacatgtacttgttgctgctgctgaagtccgtggtgtacttcgccatcatcacatgctgcctgctgatggctatggtcaagcggaaggacagccgggga

SEQ ID NO: 17899 - DNA, 3141 bp, synthetic construct
  source 1..3141: mol_type = other DNA
atggccttaccagtgaccgccttgctcctgccgctggccttgctgctccacgccgccaggccgctcgagatccagaaccctgatcctgccgtgtaccagctgcgggatagcaagagcagcgacaagagcgtgtgtctgttcaccgacttcgacagccagaccaacgtgtcccagagcaaggactccgacgtgtacatcaccgataagtgcgtgctggacatgcggagcatggacttcaagagcaactccgccgtggcctggtccaacaagtccgatttcgcctgcgccaacgccttcaacaacagcattatccccgaggacacattcttcccaagccccgagagcagcgactccaccgaccacgtgaagcccaaagagacagagaacaccaagcagcccagcaagagctgccacaagcccaaggccatcgtgcacaccgagaaagtgaacatgatgagcctgaccgtgctgggcctgcggatgctgttcgccaaaaccgtggccgtgaacttcctgctgaccgccaagctgttcttcctcctcaccgccagggccaagcgatctggatctggagcaacaaacttctcactactcaaacaagcaggtgacgtggaggagaatcccgggcctactagcatggccttaccagtgaccgccttgctcctgccgctggccttgctgctccacgccgccaggccgctgttcaatcaagaggtgcagatccctctgaccgagagctactgtggcccctgtcctaagaactggatctgctacaagaacaactgctaccagttcttcgacgagagcaagaattggtacgagagccaggccagctgcatgagccagaatgccagcctgctgaaggtgtacagcaaagaggaccaggacctgctgaaactggtcaagagcgcccactggatgggccttgtgcacatccccaccaatggctcttggcagtgggaggacggcagcattctgagccctaacctgctgaccatcatcgagatgcagaagggcgactgcgccctgtacgccagcagctttaagggcttcatcgagaattgcagcaccccgaacacctacatctgtatgcagagaaccgttggcggaggcggaagtggaggcggaggatctggcggcggaggctctgacctctttaatcaagaagtccagattccactcaccgaatcctactgcggaccttgtccaaaaaattggatttgttataagaacaactgttatcaattctttgatgagtctaaaaattggtatgagtcccaggcttcctgcatgtctcagaacgcttctctgctgaaagtctactctaaagaagatcaggatctcctgaagctcgtcaagtctgcccattggatggggctcgtccacattcctaccaacggaagctggcaatgggaagatggctccatcctgtctccaaatctgctcacgattattgaaatgcagaaaggggattgtgctctctacgccagctccttcaagggatttattgagaactgtagcacgcccaatacttatatctgtatgcaacggaccgtgggtaccggcggaggcggatctggcggcggaggtagcggtggcggaggatctgaattcgacatccagatgacacagagccctagcagcctgtctgccagcgtgggagacagagtgaccatcacatgcaaggccagcgaccacatcaacaactggctggcctggtatcagcagaagcctggacaggcccctaagctgctgatctacggcgctaccacactggaaacaggcgtgcccagcagattttctggcagcggctctggcaccgactacaccctgacaatatccagcctccagcctgaggacttcgccacctactactgtcagcagagctggaacaccccttggacattcggccagggcaccaagctggaaatcaagagaggcggaggcggaagtggaggcggaggatctggcggcggaggctctcaagttcagcttcaacagcctggcgctgagctggtcaaacctggcgcttctgtgaagatgagctgcaaagccagcggctacgccttcagcagctactggatcaactggatgaagcagaaacccggccagggactcgaatggatcggccaaatctatcccggcgacggcgacaccaactacaacggcaagttcaagggcagagccacactgaccgccgatacctctagcagcacagcctacatgcagctgagcagcctgaccagcgaagatagcgccgtgtacttctgtgcccggtccatcacaacagtcgtgggctgcgctatggactattggggccagggaacaagcgtgaccgtgtctagtacgcgtgaggacctgaagaacgtgttcccacctgaggtggccgtgttcgagcctagcgaggccgagatcagccacacccagaaagccaccctcgtgtgcctggctaccggcttctaccccgaccatgtggaactgtcttggtgggtcaacggcaaagaggtgcacagcggcgtgtgtaccgacccccagccactgaaagaacagcccgccctgaacgacagccggtactgcctgagcagcagactgagagtgtccgccaccttctggcagaacccccggaaccacttcagatgccaggtgcagttctacggcctgagcgagaacgacgagtggacccaggacagagccaagcccgtgacccagatcgtgtctgccgaagcctggggcagagccgatgatgtgattaagatccactggcaggaaaagaagtccaacaccatcctgggcagccaggaaggcaacaccatgaagaccaacgacacctacatgaagttcagctggctgaccgtgcccgagaagtccctggacaaagaacacagatgcatcgtgcggcacgaaaacaacaagaacggcgtggaccaggaaatcatcttcccacccatcaagaccgatgtgattacaatggaccccaaggacaactgctccaaggacgccaacgataccctgctgctccagctgaccaacaccagcgcctactacatgtacttgttgctgctgctgaagtccgtggtgtacttcgccatcatcacatgctgcctgctgatggctatggtcaagcggaaggacagccgggga

SEQ ID NO: 17900 - DNA, 2256 bp, synthetic construct
  source 1..2256: mol_type = other DNA
atggccttaccagtgaccgccttgctcctgccgctggccttgctgctccacgccgccaggccgctcgagatccagaaccctgatcctgccgtgtaccagctgcgggatagcaagagcagcgacaagagcgtgtgtctgttcaccgacttcgacagccagaccaacgtgtcccagagcaaggactccgacgtgtacatcaccgataagtgcgtgctggacatgcggagcatggacttcaagagcaactccgccgtggcctggtccaacaagtccgatttcgcctgcgccaacgccttcaacaacagcattatccccgaggacacattcttcccaagccccgagagcagcgactccaccgaccacgtgaagcccaaagagacagagaacaccaagcagcccagcaagagctgccacaagcccaaggccatcgtgcacaccgagaaagtgaacatgatgagcctgaccgtgctgggcctgcggatgctgttcgccaaaaccgtggccgtgaacttcctgctgaccgccaagctgttcttcctcctcaccgccagggccaagcgatctggatctggagcaacaaacttctcactactcaaacaagcaggtgacgtggaggagaatcccgggcctactagcatggccttaccagtgaccgccttgctcctgccgctggccttgctgctccacgccgccaggccgcagtctgtgctgacacagcctcctagtgtgtctggcgctcctggacagagagtgaccatctcttgtaccggcagcagcagcaatatcggagccggctatgacgtgcactggtatcagcagctccctggcacagcccctaaactgctgatcttcggcaacagcaacagacccagcggcgtgcccgatagattcagcggctttaagagcggcacaagcgccagcctggctatcactggactgcaagccgaggacgaggccgactacttctgccagagctacgatagcagcctgagcggcagcggagtgtttggcacaggcaccaaagtgacagtgcttggcggcggaggcggaagtggaggcggaggatctggcggcggaggctctcaaatgcaactggttcaaagcggcggtggcctggtgcaacctggaagaagtctgagactgagctgtgccgccagcggcttcaccttcgatgattacgccatgcactgggtccgacaggcccctggaaaaggactggaatgggtgtccggcatctcctggaatagcggctctatcggctacgccgacagcgtgaagggcagattcaccatcagccgggacaacgccaagaacagcctgtacctccagatgaactccctgagagccgaggatacagccctgtactactgcgccaaggacatccacagcggcagctactacggcctgctgtactacgctatggacgtgtggggccagggcacaaccgtgacagtttcttctacgcgtgaggacctgaagaacgtgttcccacctgaggtggccgtgttcgagcctagcgaggccgagatcagccacacccagaaagccaccctcgtgtgcctggctaccggcttctaccccgaccatgtggaactgtcttggtgggtcaacggcaaagaggtgcacagcggcgtgtgtaccgacccccagccactgaaagaacagcccgccctgaacgacagccggtactgcctgagcagcagactgagagtgtccgccaccttctggcagaacccccggaaccacttcagatgccaggtgcagttctacggcctgagcgagaacgacgagtggacccaggacagagccaagcccgtgacccagatcgtgtctgccgaagcctggggcagagccgatgatgtgattaagatccactggcaggaaaagaagtccaacaccatcctgggcagccaggaaggcaacaccatgaagaccaacgacacctacatgaagttcagctggctgaccgtgcccgagaagtccctggacaaagaacacagatgcatcgtgcggcacgaaaacaacaagaacggcgtggaccaggaaatcatcttcccacccatcaagaccgatgtgattacaatggaccccaaggacaactgctccaaggacgccaacgataccctgctgctccagctgaccaacaccagcgcctactacatgtacttgttgctgctgctgaagtccgtggtgtacttcgccatcatcacatgctgcctgctgatggctatggtcaagcggaaggacagccgggga

SEQ ID NO: 17901 - DNA, 1767 bp, synthetic construct
  source 1..1767: mol_type = other DNA
atggccttaccagtgaccgccttgctcctgccgctggccttgctgctccacgccgccaggccgctcgagatccagaaccctgatcctgccgtgtaccagctgcgggatagcaagagcagcgacaagagcgtgtgtctgttcaccgacttcgacagccagaccaacgtgtcccagagcaaggactccgacgtgtacatcaccgataagtgcgtgctggacatgcggagcatggacttcaagagcaactccgccgtggcctggtccaacaagtccgatttcgcctgcgccaacgccttcaacaacagcattatccccgaggacacattcttcccaagccccgagagcagcgactccaccgaccacgtgaagcccaaagagacagagaacaccaagcagcccagcaagagctgccacaagcccaaggccatcgtgcacaccgagaaagtgaacatgatgagcctgaccgtgctgggcctgcggatgctgttcgccaaaaccgtggccgtgaacttcctgctgaccgccaagctgttcttcctcctcaccgccagggccaagcgatctggatctggagcaacaaacttctcactactcaaacaagcaggtgacgtggaggagaatcccgggcctactagcatggccttaccagtgaccgccttgctcctgccgctggccttgctgctccacgccgccaggccgatgtgtatgccctgcttcaccaccgaccatcagatggcccggaagtgcgacgattgctgtggcggaaaaggcagaggcaagtgctacggccctcagtgcttgtgtagactcgagggcggaggcggaagtggaggcggaggatctggcggcggaggctctttcgaagtgtgtatgccttgttttaccacggatcaacaaatggctcgcaagtgttctgactgctgcggaggcaaaggccggggaaagtgttatggcccacagtgtctgtgccggacgcgtgaggacctgaagaacgtgttcccacctgaggtggccgtgttcgagcctagcgaggccgagatcagccacacccagaaagccaccctcgtgtgcctggctaccggcttctaccccgaccatgtggaactgtcttggtgggtcaacggcaaagaggtgcacagcggcgtgtgtaccgacccccagccactgaaagaacagcccgccctgaacgacagccggtactgcctgagcagcagactgagagtgtccgccaccttctggcagaacccccggaaccacttcagatgccaggtgcagttctacggcctgagcgagaacgacgagtggacccaggacagagccaagcccgtgacccagatcgtgtctgccgaagcctggggcagagccgatgatgtgattaagatccactggcaggaaaagaagtccaacaccatcctgggcagccaggaaggcaacaccatgaagaccaacgacacctacatgaagttcagctggctgaccgtgcccgagaagtccctggacaaagaacacagatgcatcgtgcggcacgaaaacaacaagaacggcgtggaccaggaaatcatcttcccacccatcaagaccgatgtgattacaatggaccccaaggacaactgctccaaggacgccaacgataccctgctgctccagctgaccaacaccagcgcctactacatgtacttgttgctgctgctgaagtccgtggtgtacttcgccatcatcacatgctgcctgctgatggctatggtcaagcggaaggacagccgggga

SEQ ID NO: 17902 - DNA, 2397 bp, synthetic construct
  source 1..2397: mol_type = other DNA
atggccttaccagtgaccgccttgctcctgccgctggccttgctgctccacgccgccaggccgctcgagatccagaaccctgatcctgccgtgtaccagctgcgggatagcaagagcagcgacaagagcgtgtgtctgttcaccgacttcgacagccagaccaacgtgtcccagagcaaggactccgacgtgtacatcaccgataagtgcgtgctggacatgcggagcatggacttcaagagcaactccgccgtggcctggtccaacaagtccgatttcgcctgcgccaacgccttcaacaacagcattatccccgaggacacattcttcccaagccccgagagcagcgactccaccgaccacgtgaagcccaaagagacagagaacaccaagcagcccagcaagagctgccacaagcccaaggccatcgtgcacaccgagaaagtgaacatgatgagcctgaccgtgctgggcctgcggatgctgttcgccaaaaccgtggccgtgaacttcctgctgaccgccaagctgttcttcctcctcaccgccagggccaagcgatctggatctggagcaacaaacttctcactactcaaacaagcaggtgacgtggaggagaatcccgggcctactagcatggccttaccagtgaccgccttgctcctgccgctggccttgctgctccacgccgccaggccgttcgaagtgtgtatgccttgttttaccacggatcaacaaatggctcgcaagtgttctgactgctgcggaggcaaaggccggggaaagtgttatggcccacagtgtctgtgccggggtaccggcggaggcggatctggcggcggaggtagcggtggcggaggatctgaattcgacatccagatgacacagagccctagcagcctgtctgccagcgtgggagacagagtgaccatcacatgcaaggccagcgaccacatcaacaactggctggcctggtatcagcagaagcctggacaggcccctaagctgctgatctacggcgctaccacactggaaacaggcgtgcccagcagattttctggcagcggctctggcaccgactacaccctgacaatatccagcctccagcctgaggacttcgccacctactactgtcagcagagctggaacaccccttggacattcggccagggcaccaagctggaaatcaagagaggcggaggcggaagtggaggcggaggatctggcggcggaggctctcaagttcagcttcaacagcctggcgctgagctggtcaaacctggcgcttctgtgaagatgagctgcaaagccagcggctacgccttcagcagctactggatcaactggatgaagcagaaacccggccagggactcgaatggatcggccaaatctatcccggcgacggcgacaccaactacaacggcaagttcaagggcagagccacactgaccgccgatacctctagcagcacagcctacatgcagctgagcagcctgaccagcgaagatagcgccgtgtacttctgtgcccggtccatcacaacagtcgtgggctgcgctatggactattggggccagggaacaagcgtgaccgtgtctagtacgcgtgaggacctgaagaacgtgttcccacctgaggtggccgtgttcgagcctagcgaggccgagatcagccacacccagaaagccaccctcgtgtgcctggctaccggcttctaccccgaccatgtggaactgtcttggtgggtcaacggcaaagaggtgcacagcggcgtgtgtaccgacccccagccactgaaagaacagcccgccctgaacgacagccggtactgcctgagcagcagactgagagtgtccgccaccttctggcagaacccccggaaccacttcagatgccaggtgcagttctacggcctgagcgagaacgacgagtggacccaggacagagccaagcccgtgacccagatcgtgtctgccgaagcctggggcagagccgatgatgtgattaagatccactggcaggaaaagaagtccaacaccatcctgggcagccaggaaggcaacaccatgaagaccaacgacacctacatgaagttcagctggctgaccgtgcccgagaagtccctggacaaagaacacagatgcatcgtgcggcacgaaaacaacaagaacggcgtggaccaggaaatcatcttcccacccatcaagaccgatgtgattacaatggaccccaaggacaactgctccaaggacgccaacgataccctgctgctccagctgaccaacaccagcgcctactacatgtacttgttgctgctgctgaagtccgtggtgtacttcgccatcatcacatgctgcctgctgatggctatggtcaagcggaaggacagccgggga

SEQ ID NO: 17903 - DNA, 2787 bp, synthetic construct
  source 1..2787: mol_type = other DNA
atggccttaccagtgaccgccttgctcctgccgctggccttgctgctccacgccgccaggccgctcgagatccagaaccctgatcctgccgtgtaccagctgcgggatagcaagagcagcgacaagagcgtgtgtctgttcaccgacttcgacagccagaccaacgtgtcccagagcaaggactccgacgtgtacatcaccgataagtgcgtgctggacatgcggagcatggacttcaagagcaactccgccgtggcctggtccaacaagtccgatttcgcctgcgccaacgccttcaacaacagcattatccccgaggacacattcttcccaagccccgagagcagcgactccaccgaccacgtgaagcccaaagagacagagaacaccaagcagcccagcaagagctgccacaagcccaaggccatcgtgcacaccgagaaagtgaacatgatgagcctgaccgtgctgggcctgcggatgctgttcgccaaaaccgtggccgtgaacttcctgctgaccgccaagctgttcttcctcctcaccgccagggccaagcgatctggatctggagcaacaaacttctcactactcaaacaagcaggtgacgtggaggagaatcccgggcctactagcatggccttaccagtgaccgccttgctcctgccgctggccttgctgctccacgccgccaggccgttcgaaagccccgtagctcctgcctgtgaccccagactcctaaataaactgctgcgtgactcccacctccttcacagccgactgagtcagtgtcccgacgtggaccctttgtctatccctgttctgctgcctgctgtggactttagcctgggagaatggaaaacccagacggaacagagcaaggcacaggacattctaggggcagtgtcccttctactggagggagtgatggcagcacgaggacagttggaaccctcctgcctctcatccctcctgggacagctttctgggcaggttcgcctcctcttgggggccctgcagggcctcctaggaacccagcttcctctacagggcaggaccacagctcacaaggaccccaatgccctcttcttgagcttgcaacaactgcttcggggaaaggtgcgcttcctgcttctggtagaaggtcccaccctctgtgtcagacggaccctgccaaccacagctgtcccaagcagtacttctggtaccggcggaggcggatctggcggcggaggtagcggtggcggaggatctgaattcgacatccagatgacacagagccctagcagcctgtctgccagcgtgggagacagagtgaccatcacatgcaaggccagcgaccacatcaacaactggctggcctggtatcagcagaagcctggacaggcccctaagctgctgatctacggcgctaccacactggaaacaggcgtgcccagcagattttctggcagcggctctggcaccgactacaccctgacaatatccagcctccagcctgaggacttcgccacctactactgtcagcagagctggaacaccccttggacattcggccagggcaccaagctggaaatcaagagaggcggaggcggaagtggaggcggaggatctggcggcggaggctctcaagttcagcttcaacagcctggcgctgagctggtcaaacctggcgcttctgtgaagatgagctgcaaagccagcggctacgccttcagcagctactggatcaactggatgaagcagaaacccggccagggactcgaatggatcggccaaatctatcccggcgacggcgacaccaactacaacggcaagttcaagggcagagccacactgaccgccgatacctctagcagcacagcctacatgcagctgagcagcctgaccagcgaagatagcgccgtgtacttctgtgcccggtccatcacaacagtcgtgggctgcgctatggactattggggccagggaacaagcgtgaccgtgtctagtacgcgtgaggacctgaagaacgtgttcccacctgaggtggccgtgttcgagcctagcgaggccgagatcagccacacccagaaagccaccctcgtgtgcctggctaccggcttctaccccgaccatgtggaactgtcttggtgggtcaacggcaaagaggtgcacagcggcgtgtgtaccgacccccagccactgaaagaacagcccgccctgaacgacagccggtactgcctgagcagcagactgagagtgtccgccaccttctggcagaacccccggaaccacttcagatgccaggtgcagttctacggcctgagcgagaacgacgagtggacccaggacagagccaagcccgtgacccagatcgtgtctgccgaagcctggggcagagccgatgatgtgattaagatccactggcaggaaaagaagtccaacaccatcctgggcagccaggaaggcaacaccatgaagaccaacgacacctacatgaagttcagctggctgaccgtgcccgagaagtccctggacaaagaacacagatgcatcgtgcggcacgaaaacaacaagaacggcgtggaccaggaaatcatcttcccacccatcaagaccgatgtgattacaatggaccccaaggacaactgctccaaggacgccaacgataccctgctgctccagctgaccaacaccagcgcctactacatgtacttgttgctgctgctgaagtccgtggtgtacttcgccatcatcacatgctgcctgctgatggctatggtcaagcggaaggacagccgggga

SEQ ID NO: 17904 - DNA, 2508 bp, synthetic construct
  source 1..2508: mol_type = other DNA
atggccttaccagtgaccgccttgctcctgccgctggccttgctgctccacgccgccaggccgctcgagatccagaaccctgatcctgccgtgtaccagctgcgggatagcaagagcagcgacaagagcgtgtgtctgttcaccgacttcgacagccagaccaacgtgtcccagagcaaggactccgacgtgtacatcaccgataagtgcgtgctggacatgcggagcatggacttcaagagcaactccgccgtggcctggtccaacaagtccgatttcgcctgcgccaacgccttcaacaacagcattatccccgaggacacattcttcccaagccccgagagcagcgactccaccgaccacgtgaagcccaaagagacagagaacaccaagcagcccagcaagagctgccacaagcccaaggccatcgtgcacaccgagaaagtgaacatgatgagcctgaccgtgctgggcctgcggatgctgttcgccaaaaccgtggccgtgaacttcctgctgaccgccaagctgttcttcctcctcaccgccagggccaagcgatctggatctggagcaacaaacttctcactactcaaacaagcaggtgacgtggaggagaatcccgggcctactagcatggccttaccagtgaccgccttgctcctgccgctggccttgctgctccacgccgccaggccgttcgaaatgggcagctgggaagagttcgagctgagactgaacgccatcgaggaacggctgtatgccctcggaggatctgaagccgagctggcctacttcgagtacgtgatcgccgacttcgagggcaacctgcagcggtacaaaggcaagggcaaccctgaagtggaagccctgtacttcgaggccgacgccatcttcgaggaactggtggcctacagacacaacggtaccggcggaggcggatctggcggcggaggtagcggtggcggaggatctgaattcgacatccagatgacacagagccctagcagcctgtctgccagcgtgggagacagagtgaccatcacatgcaaggccagcgaccacatcaacaactggctggcctggtatcagcagaagcctggacaggcccctaagctgctgatctacggcgctaccacactggaaacaggcgtgcccagcagattttctggcagcggctctggcaccgactacaccctgacaatatccagcctccagcctgaggacttcgccacctactactgtcagcagagctggaacaccccttggacattcggccagggcaccaagctggaaatcaagagaggcggaggcggaagtggaggcggaggatctggcggcggaggctctcaagttcagcttcaacagcctggcgctgagctggtcaaacctggcgcttctgtgaagatgagctgcaaagccagcggctacgccttcagcagctactggatcaactggatgaagcagaaacccggccagggactcgaatggatcggccaaatctatcccggcgacggcgacaccaactacaacggcaagttcaagggcagagccacactgaccgccgatacctctagcagcacagcctacatgcagctgagcagcctgaccagcgaagatagcgccgtgtacttctgtgcccggtccatcacaacagtcgtgggctgcgctatggactattggggccagggaacaagcgtgaccgtgtctagtacgcgtgaggacctgaagaacgtgttcccacctgaggtggccgtgttcgagcctagcgaggccgagatcagccacacccagaaagccaccctcgtgtgcctggctaccggcttctaccccgaccatgtggaactgtcttggtgggtcaacggcaaagaggtgcacagcggcgtgtgtaccgacccccagccactgaaagaacagcccgccctgaacgacagccggtactgcctgagcagcagactgagagtgtccgccaccttctggcagaacccccggaaccacttcagatgccaggtgcagttctacggcctgagcgagaacgacgagtggacccaggacagagccaagcccgtgacccagatcgtgtctgccgaagcctggggcagagccgatgatgtgattaagatccactggcaggaaaagaagtccaacaccatcctgggcagccaggaaggcaacaccatgaagaccaacgacacctacatgaagttcagctggctgaccgtgcccgagaagtccctggacaaagaacacagatgcatcgtgcggcacgaaaacaacaagaacggcgtggaccaggaaatcatcttcccacccatcaagaccgatgtgattacaatggaccccaaggacaactgctccaaggacgccaacgataccctgctgctccagctgaccaacaccagcgcctactacatgtacttgttgctgctgctgaagtccgtggtgtacttcgccatcatcacatgctgcctgctgatggctatggtcaagcggaaggacagccgggga

SEQ ID NO: 17905 - DNA, 2919 bp, synthetic construct
  source 1..2919: mol_type = other DNA
atggccttaccagtgaccgccttgctcctgccgctggccttgctgctccacgccgccaggccgctcgaggaggaggacctgaagaacgtgttcccacctgaggtggccgtgttcgagcctagcgaggccgagatcagccacacccagaaagccaccctcgtgtgcctggctaccggcttctaccccgaccatgtggaactgtcttggtgggtcaacggcaaagaggtgcacagcggcgtgtctaccgacccccagccactgaaagaacagcccgccctgaacgacagccggtactgcctgagcagcagactgagagtgtccgccaccttctggcagaacccccggaaccacttcagatgccaggtgcagttctacggcctgagcgagaacgacgagtggacccaggacagagccaagcccgtgacccagatcgtgtctgccgaagcctggggcagagccgatgatgtgattaagatccactggcaggaaaagaagtccaacaccatcctgggcagccaggaaggcaacaccatgaagaccaacgacacctacatgaagttcagctggctgaccgtgcccgagaagtccctggacaaagaacacagatgcatcgtgcggcacgaaaacaacaagaacggcgtggaccaggaaatcatcttcccacccatcaagaccgatgtgattacaatggaccccaaggacaactgctccaaggacgccaacgataccctgctgctccagctgaccaacaccagcgcctactacatgtacttgttgctgctgctgaagtccgtggtgtacttcgccatcatcacatgctgcctgctgcggagaaccgccttctgctgcaacggcgagaagtctagggccaagcgatctggatctggagcaacaaacttctcactactcaaacaagcaggtgacgtggaggagaatcccgggcctactagcatggccttaccagtgaccgccttgctcctgccgctggccttgctgctccacgccgccaggccggacatccagatgacacagactacatcctccctgtctgcctctctgggagacagagtcaccatcagttgcagggcaagtcaggacattagtaaatatttaaattggtatcagcagaaaccagatggaactgttaaactcctgatctaccatacatcaagattacactcaggagtcccatcaaggttcagtggcagtgggtctggaacagattattctctcaccattagcaacctggagcaagaagatattgccacttacttttgccaacagggtaatacgcttccgtacacgttcggaggggggaccaagctggagatcacaggtggcggtggctcgggcggtggtgggtcgggtggcggcggatctgaggtgaaactgcaggagtcaggacctggcctggtggcgccctcacagagcctgtccgtcacatgcactgtctcaggggtctcattacccgactatggtgtaagctggattcgccagcctccacgaaagggtctggagtggctgggagtaatatggggtagtgaaaccacatactataattcagctctcaaatccagactgaccatcatcaaggacaactccaagagccaagttttcttaaaaatgaacagtctgcaaactgatgacacagccatttactactgtgccaaacattattactacggtggtagctatgctatggactactggggtcaaggaacctcagtcaccgtctcctcaacgcgtatccagaaccctgatcctgccgtgtaccagctgcgggatagcaagagcagcgacaagagcgtgtgtctgttcaccgacttcgacagccagaccaacgtgtcccagagcaaggactccgacgtgtacatcaccgataagaccgtgctggacatgcggagcatggacttcaagagcaactccgccgtggcctggtccaacaagtccgatttcgcctgcgccaacgccttcaacaacagcattatccccgaggacacattcttcccaagccccgagagcagcgactccaccgaccacgtgaagcccaaagagacagagaacaccaagcagcccagcaagagctgccacaagcccaaggccatcgtgcacaccgagaaagtgaacatgatgagcctgaccgtgctgggcctgcggatgctgttcgccaaaaccgtggccgtgaacttcctgctgaccgccaagctgttcttcctccgcgccaagagaagcggatctggcgtgaagcagaccctgaatttcgacctgctgaagctggctggcgacgtggaatccaacccaggcccttctagaggccatatgaccgagtacaagcccacggtgcgcctcgccacccgcgacgacgtccccagggccgtacgcaccctcgccgccgcgttcgccgactaccccgccacgcgccacaccgtcgatccggaccgccacatcgagcgggtcaccgagctgcaagaactcttcctcacgcgcgtcgggctcgacatcggcaaggtgtgggtcgcggacgacggcgccgcggtggcggtctggaccacgccggagagcgtcgaagcgggggcggtgttcgccgagatcggcccgcgcatggccgagttgagcggttcccggctggccgcgcagcaacagatggaaggcctcctggcgccgcaccggcccaaggagcccgcgtggttcctggccaccgtcggcgtctcgcccgaccaccagggcaagggtctgggcagcgccgtcgtgctccccggagtggaggcggccgagcgcgccggggtgcccgccttcctggagacctccgcgccccgcaacctccccttctacgagcggctcggcttcaccgtcaccgccgacgtcgaggtgcccgaaggaccgcgcacctggtgcatgacccgcaagcccggtgcctga

SEQ ID NO: 17906 - DNA, 2922 bp, synthetic construct
  source 1..2922: mol_type = other DNA
atggccttaccagtgaccgccttgctcctgccgctggccttgctgctccacgccgccaggccgctcgaggaggaggacctgaagaacgtgttcccacctgaggtggccgtgttcgagcctagcgaggccgagatcagccacacccagaaagccaccctcgtgtgcctggctaccggcttctaccccgaccatgtggaactgtcttggtgggtcaacggcaaagaggtgcacagcggcgtgtctaccgacccccagccactgaaagaacagcccgccctgaacgacagccggtactgcctgagcagcagactgagagtgtccgccaccttctggcagaacccccggaaccacttcagatgccaggtgcagttctacggcctgagcgagaacgacgagtggacccaggacagagccaagcccgtgacccagatcgtgtctgccgaagcctggggcagagccgatgatgtgattaagatccactggcaggaaaagaagtccaacaccatcctgggcagccaggaaggcaacaccatgaagaccaacgacacctacatgaagttcagctggctgaccgtgcccgagaagtccctggacaaagaacacagatgcatcgtgcggcacgaaaacaacaagaacggcgtggaccaggaaatcatcttcccacccatcaagaccgatgtgattacaatggaccccaaggacaactgctccaaggacgccaacgataccctgctgctccagctgaccaacaccagcgcctactacatgtacttgttgctgctgctgaagtccgtggtgtacttcgccatcatcacatgctgcctgctgcggagaaccgccttctgctgcaacggcgagaagtctagggccaagcgatctggatctggagcaacaaacttctcactactcaaacaagcaggtgacgtggaggagaatcccgggcctactagcaccatggccttaccagtgaccgccttgctcctgccgctggccttgctgctccacgccgccaggccggagatcgtgatgacccagagccctgccaccctgtctctgagccctggcgaaagagccaccctgagctgtagagccagccaggacatcagcaagtacctgaactggtatcagcagaagcccggccaggcccccagactgctgatctaccacaccagcagactgcacagcggcatccccgccagattttctggctctggcagcggcaccgactacaccctgacaatcagcagcctccagcccgaggacttcgccgtgtacttctgtcagcaaggcaacaccctgccctacaccttcggccagggcaccaagctggaaatcaagggcggaggcggaagtggaggcggaggatctggcggcggaggctctcaggtgcaactccaggaatctggccctggcctcgtgaagcccagcgagacactgagcctgacctgtaccgtgtccggcgtgtccctgcctgactatggcgtgtcctggatcagacagccccctggcaagggcctggaatggatcggagtgatttggggcagcgaaaccacctactacaacagctccctgaagtccagagtgaccatctccaaggacaactccaagaaccaggtgtccctgaagctgagcagcgtgacagccgccgacaccgccgtgtattactgcgccaagcactactactacggcggcagctacgctatggactactggggccagggaaccctcgtgaccgtgtctagtacgcgtatccagaaccctgatcctgccgtgtaccagctgcgggatagcaagagcagcgacaagagcgtgtgtctgttcaccgacttcgacagccagaccaacgtgtcccagagcaaggactccgacgtgtacatcaccgataagaccgtgctggacatgcggagcatggacttcaagagcaactccgccgtggcctggtccaacaagtccgatttcgcctgcgccaacgccttcaacaacagcattatccccgaggacacattcttcccaagccccgagagcagcgactccaccgaccacgtgaagcccaaagagacagagaacaccaagcagcccagcaagagctgccacaagcccaaggccatcgtgcacaccgagaaagtgaacatgatgagcctgaccgtgctgggcctgcggatgctgttcgccaaaaccgtggccgtgaacttcctgctgaccgccaagctgttcttcctccgcgccaagagaagcggatctggcgtgaagcagaccctgaatttcgacctgctgaagctggctggcgacgtggaatccaacccaggcccttctagaggccatatgaccgagtacaagcccacggtgcgcctcgccacccgcgacgacgtccccagggccgtacgcaccctcgccgccgcgttcgccgactaccccgccacgcgccacaccgtcgatccggaccgccacatcgagcgggtcaccgagctgcaagaactcttcctcacgcgcgtcgggctcgacatcggcaaggtgtgggtcgcggacgacggcgccgcggtggcggtctggaccacgccggagagcgtcgaagcgggggcggtgttcgccgagatcggcccgcgcatggccgagttgagcggttcccggctggccgcgcagcaacagatggaaggcctcctggcgccgcaccggcccaaggagcccgcgtggttcctggccaccgtcggcgtctcgcccgaccaccagggcaagggtctgggcagcgccgtcgtgctccccggagtggaggcggccgagcgcgccggggtgcccgccttcctggagacctccgcgccccgcaacctccccttctacgagcggctcggcttcaccgtcaccgccgacgtcgaggtgcccgaaggaccgcgcacctggtgcatgacccgcaagcccggtgcctga

SEQ ID NO: 17907 - DNA, 2925 bp, synthetic construct
  source 1..2925: mol_type = other DNA
atggccttaccagtgaccgccttgctcctgccgctggccttgctgctccacgccgccaggccgctcgaggaggaggacctgaagaacgtgttcccacctgaggtggccgtgttcgagcctagcgaggccgagatcagccacacccagaaagccaccctcgtgtgcctggctaccggcttctaccccgaccatgtggaactgtcttggtgggtcaacggcaaagaggtgcacagcggcgtgtctaccgacccccagccactgaaagaacagcccgccctgaacgacagccggtactgcctgagcagcagactgagagtgtccgccaccttctggcagaacccccggaaccacttcagatgccaggtgcagttctacggcctgagcgagaacgacgagtggacccaggacagagccaagcccgtgacccagatcgtgtctgccgaagcctggggcagagccgatgatgtgattaagatccactggcaggaaaagaagtccaacaccatcctgggcagccaggaaggcaacaccatgaagaccaacgacacctacatgaagttcagctggctgaccgtgcccgagaagtccctggacaaagaacacagatgcatcgtgcggcacgaaaacaacaagaacggcgtggaccaggaaatcatcttcccacccatcaagaccgatgtgattacaatggaccccaaggacaactgctccaaggacgccaacgataccctgctgctccagctgaccaacaccagcgcctactacatgtacttgttgctgctgctgaagtccgtggtgtacttcgccatcatcacatgctgcctgctgcggagaaccgccttctgctgcaacggcgagaagtctagggccaagcgatctggatctggagcaacaaacttctcactactcaaacaagcaggtgacgtggaggagaatcccgggcctactagcaccatggccttaccagtgaccgccttgctcctgccgctggccttgctgctccacgccgccaggccggacgagatcgtgctgacacagagccccgccaccctgtcactgtctccaggcgaaagagccaccctgagctgtagcgccagcagcagcgtgtcctacatgcactggtatcagcagaagcccggccaggcccccagactgctgatctacgataccagcaagctggcctccggcatccccgccagattttctggcagcggctccggcaccgacttcaccctgacaatcagcagcctggaacccgaggacgtggccgtgtactactgttttcaaggcagcgtgtaccccttcaccttcggccagggcaccaagctggaaatcaagagaggtggcggtggctcgggcggtggtgggtcgggtggcggcggatctcaggtgcagctccaggaatctggccctggcctcgtgaagcctagccagaccctgagcctgacctgtaccgtgtctggcggcagcatcagcacaagcggcatgggcgtgggctggatcagacagcaccctggcaagggcctggaatggatcggccacatttggtgggacgacgacaagcggtacaaccccgccctgaagtccagagtgaccatcagcgtggacaccagcaagaaccagttcagcctgaagctgagcagcgtgacagccgccgataccgccgtgtattattgcgcccggatggaactgtggtcctactacttcgactactggggccagggaaccctcgtgaccgtgtctagtacgcgtatccagaaccctgatcctgccgtgtaccagctgcgggatagcaagagcagcgacaagagcgtgtgtctgttcaccgacttcgacagccagaccaacgtgtcccagagcaaggactccgacgtgtacatcaccgataagaccgtgctggacatgcggagcatggacttcaagagcaactccgccgtggcctggtccaacaagtccgatttcgcctgcgccaacgccttcaacaacagcattatccccgaggacacattcttcccaagccccgagagcagcgactccaccgaccacgtgaagcccaaagagacagagaacaccaagcagcccagcaagagctgccacaagcccaaggccatcgtgcacaccgagaaagtgaacatgatgagcctgaccgtgctgggcctgcggatgctgttcgccaaaaccgtggccgtgaacttcctgctgaccgccaagctgttcttcctccgcgccaagagaagcggatctggcgtgaagcagaccctgaatttcgacctgctgaagctggctggcgacgtggaatccaacccaggcccttctagaggccatatgaccgagtacaagcccacggtgcgcctcgccacccgcgacgacgtccccagggccgtacgcaccctcgccgccgcgttcgccgactaccccgccacgcgccacaccgtcgatccggaccgccacatcgagcgggtcaccgagctgcaagaactcttcctcacgcgcgtcgggctcgacatcggcaaggtgtgggtcgcggacgacggcgccgcggtggcggtctggaccacgccggagagcgtcgaagcgggggcggtgttcgccgagatcggcccgcgcatggccgagttgagcggttcccggctggccgcgcagcaacagatggaaggcctcctggcgccgcaccggcccaaggagcccgcgtggttcctggccaccgtcggcgtctcgcccgaccaccagggcaagggtctgggcagcgccgtcgtgctccccggagtggaggcggccgagcgcgccggggtgcccgccttcctggagacctccgcgccccgcaacctccccttctacgagcggctcggcttcaccgtcaccgccgacgtcgaggtgcccgaaggaccgcgcacctggtgcatgacccgcaagcccggtgcctga

SEQ ID NO: 17908 - DNA, 2913 bp, synthetic construct
  source 1..2913: mol_type = other DNA
atggccttaccagtgaccgccttgctcctgccgctggccttgctgctccacgccgccaggccgctcgaggaggaggacctgaagaacgtgttcccacctgaggtggccgtgttcgagcctagcgaggccgagatcagccacacccagaaagccaccctcgtgtgcctggctaccggcttctaccccgaccatgtggaactgtcttggtgggtcaacggcaaagaggtgcacagcggcgtgtctaccgacccccagccactgaaagaacagcccgccctgaacgacagccggtactgcctgagcagcagactgagagtgtccgccaccttctggcagaacccccggaaccacttcagatgccaggtgcagttctacggcctgagcgagaacgacgagtggacccaggacagagccaagcccgtgacccagatcgtgtctgccgaagcctggggcagagccgatgatgtgattaagatccactggcaggaaaagaagtccaacaccatcctgggcagccaggaaggcaacaccatgaagaccaacgacacctacatgaagttcagctggctgaccgtgcccgagaagtccctggacaaagaacacagatgcatcgtgcggcacgaaaacaacaagaacggcgtggaccaggaaatcatcttcccacccatcaagaccgatgtgattacaatggaccccaaggacaactgctccaaggacgccaacgataccctgctgctccagctgaccaacaccagcgcctactacatgtacttgttgctgctgctgaagtccgtggtgtacttcgccatcatcacatgctgcctgctgcggagaaccgccttctgctgcaacggcgagaagtctagggccaagcgatctggatctggagcaacaaacttctcactactcaaacaagcaggtgacgtggaggagaatcccgggcctactagcatggccttaccagtgaccgccttgctcctgccgctggccttgctgctccacgccgccaggccggacatccagatgacacagagccctagcagcctgtctgccagcgtgggagacagagtgaccatcacctgtagagccagccaggacatcagcaactacctgaactggtatcagcagaagcccggcaaggcccctaagctgctgatctactacaccagcagactgcacagcggcgtgcccagcagattttctggctctggcagcggcaccgacttcaccctgacaatatctagcctccagcctgaggacttcgccacctactattgccagcagggcaacaccctgccttacacatttggacagggcaccaaggtggaaatcaagagaggcggaggcggaagtggaggcggaggatctggcggcggaggctctgaagtgcagctggttgaatcaggtggcggcctggttcaacctggcggatctctgagactgagctgtgccgccagcggcttcaccttcagcgactactttatgagctgggtccgacaggcccctggcaaaggacttgaatgggtcgccaccatcagcaatggcggcacctacacttactaccccgacagcgtgaagggcagattcaccatctccagagacaacagcaagaacaccctgtacctccagatgaactccctgagagccgaggacaccgccgtgtactactgcgccagattcgacggctacatcttcgactattggggccagggcaccctggtcacagtctcttctacgcgtatccagaaccctgatcctgccgtgtaccagctgcgggatagcaagagcagcgacaagagcgtgtgtctgttcaccgacttcgacagccagaccaacgtgtcccagagcaaggactccgacgtgtacatcaccgataagaccgtgctggacatgcggagcatggacttcaagagcaactccgccgtggcctggtccaacaagtccgatttcgcctgcgccaacgccttcaacaacagcattatccccgaggacacattcttcccaagccccgagagcagcgactccaccgaccacgtgaagcccaaagagacagagaacaccaagcagcccagcaagagctgccacaagcccaaggccatcgtgcacaccgagaaagtgaacatgatgagcctgaccgtgctgggcctgcggatgctgttcgccaaaaccgtggccgtgaacttcctgctgaccgccaagctgttcttcctccgcgccaagagaagcggatctggcgtgaagcagaccctgaatttcgacctgctgaagctggctggcgacgtggaatccaacccaggcccttctagaggccatatgaccgagtacaagcccacggtgcgcctcgccacccgcgacgacgtccccagggccgtacgcaccctcgccgccgcgttcgccgactaccccgccacgcgccacaccgtcgatccggaccgccacatcgagcgggtcaccgagctgcaagaactcttcctcacgcgcgtcgggctcgacatcggcaaggtgtgggtcgcggacgacggcgccgcggtggcggtctggaccacgccggagagcgtcgaagcgggggcggtgttcgccgagatcggcccgcgcatggccgagttgagcggttcccggctggccgcgcagcaacagatggaaggcctcctggcgccgcaccggcccaaggagcccgcgtggttcctggccaccgtcggcgtctcgcccgaccaccagggcaagggtctgggcagcgccgtcgtgctccccggagtggaggcggccgagcgcgccggggtgcccgccttcctggagacctccgcgccccgcaacctccccttctacgagcggctcggcttcaccgtcaccgccgacgtcgaggtgcccgaaggaccgcgcacctggtgcatgacccgcaagcccggtgcctga

SEQ ID NO: 17909 - DNA, 2925 bp, synthetic construct
  source 1..2925: mol_type = other DNA
atggccttaccagtgaccgccttgctcctgccgctggccttgctgctccacgccgccaggccgctcgaggaggaggacctgaagaacgtgttcccacctgaggtggccgtgttcgagcctagcgaggccgagatcagccacacccagaaagccaccctcgtgtgcctggctaccggcttctaccccgaccatgtggaactgtcttggtgggtcaacggcaaagaggtgcacagcggcgtgtctaccgacccccagccactgaaagaacagcccgccctgaacgacagccggtactgcctgagcagcagactgagagtgtccgccaccttctggcagaacccccggaaccacttcagatgccaggtgcagttctacggcctgagcgagaacgacgagtggacccaggacagagccaagcccgtgacccagatcgtgtctgccgaagcctggggcagagccgatgatgtgattaagatccactggcaggaaaagaagtccaacaccatcctgggcagccaggaaggcaacaccatgaagaccaacgacacctacatgaagttcagctggctgaccgtgcccgagaagtccctggacaaagaacacagatgcatcgtgcggcacgaaaacaacaagaacggcgtggaccaggaaatcatcttcccacccatcaagaccgatgtgattacaatggaccccaaggacaactgctccaaggacgccaacgataccctgctgctccagctgaccaacaccagcgcctactacatgtacttgttgctgctgctgaagtccgtggtgtacttcgccatcatcacatgctgcctgctgcggagaaccgccttctgctgcaacggcgagaagtctagggccaagcgatctggatctggagcaacaaacttctcactactcaaacaagcaggtgacgtggaggagaatcccgggcctactagcatggccttaccagtgaccgccttgctcctgccgctggccttgctgctccacgccgccaggccggacatccagatgacacagagccctagcagcctgtctgccagcgtgggagacagagtgaccatcacatgcaaggccagcgaccacatcaacaactggctggcctggtatcagcagaagcctggacaggcccctaagctgctgatctacggcgctaccacactggaaacaggcgtgcccagcagattttctggcagcggctctggcaccgactacaccctgacaatatccagcctccagcctgaggacttcgccacctactactgtcagcagagctggaacaccccttggacattcggccagggcaccaagctggaaatcaagagaggcggaggcggaagtggaggcggaggatctggcggcggaggctctcaagttcagcttcaacagcctggcgctgagctggtcaaacctggcgcttctgtgaagatgagctgcaaagccagcggctacgccttcagcagctactggatcaactggatgaagcagaaacccggccagggactcgaatggatcggccaaatctatcccggcgacggcgacaccaactacaacggcaagttcaagggcagagccacactgaccgccgatacctctagcagcacagcctacatgcagctgagcagcctgaccagcgaagatagcgccgtgtacttctgtgcccggtccatcacaacagtcgtgggctgcgctatggactattggggccagggaacaagcgtgaccgtgtctagtacgcgtatccagaaccctgatcctgccgtgtaccagctgcgggatagcaagagcagcgacaagagcgtgtgtctgttcaccgacttcgacagccagaccaacgtgtcccagagcaaggactccgacgtgtacatcaccgataagaccgtgctggacatgcggagcatggacttcaagagcaactccgccgtggcctggtccaacaagtccgatttcgcctgcgccaacgccttcaacaacagcattatccccgaggacacattcttcccaagccccgagagcagcgactccaccgaccacgtgaagcccaaagagacagagaacaccaagcagcccagcaagagctgccacaagcccaaggccatcgtgcacaccgagaaagtgaacatgatgagcctgaccgtgctgggcctgcggatgctgttcgccaaaaccgtggccgtgaacttcctgctgaccgccaagctgttcttcctccgcgccaagagaagcggatctggcgtgaagcagaccctgaatttcgacctgctgaagctggctggcgacgtggaatccaacccaggcccttctagaggccatatgaccgagtacaagcccacggtgcgcctcgccacccgcgacgacgtccccagggccgtacgcaccctcgccgccgcgttcgccgactaccccgccacgcgccacaccgtcgatccggaccgccacatcgagcgggtcaccgagctgcaagaactcttcctcacgcgcgtcgggctcgacatcggcaaggtgtgggtcgcggacgacggcgccgcggtggcggtctggaccacgccggagagcgtcgaagcgggggcggtgttcgccgagatcggcccgcgcatggccgagttgagcggttcccggctggccgcgcagcaacagatggaaggcctcctggcgccgcaccggcccaaggagcccgcgtggttcctggccaccgtcggcgtctcgcccgaccaccagggcaagggtctgggcagcgccgtcgtgctccccggagtggaggcggccgagcgcgccggggtgcccgccttcctggagacctccgcgccccgcaacctccccttctacgagcggctcggcttcaccgtcaccgccgacgtcgaggtgcccgaaggaccgcgcacctggtgcatgacccgcaagcccggtgcctga

SEQ ID NO: 17910 - DNA, 2931 bp, synthetic construct
  source 1..2931: mol_type = other DNA
atggccttaccagtgaccgccttgctcctgccgctggccttgctgctccacgccgccaggccgctcgaggaggaggacctgaagaacgtgttcccacctgaggtggccgtgttcgagcctagcgaggccgagatcagccacacccagaaagccaccctcgtgtgcctggctaccggcttctaccccgaccatgtggaactgtcttggtgggtcaacggcaaagaggtgcacagcggcgtgtctaccgacccccagccactgaaagaacagcccgccctgaacgacagccggtactgcctgagcagcagactgagagtgtccgccaccttctggcagaacccccggaaccacttcagatgccaggtgcagttctacggcctgagcgagaacgacgagtggacccaggacagagccaagcccgtgacccagatcgtgtctgccgaagcctggggcagagccgatgatgtgattaagatccactggcaggaaaagaagtccaacaccatcctgggcagccaggaaggcaacaccatgaagaccaacgacacctacatgaagttcagctggctgaccgtgcccgagaagtccctggacaaagaacacagatgcatcgtgcggcacgaaaacaacaagaacggcgtggaccaggaaatcatcttcccacccatcaagaccgatgtgattacaatggaccccaaggacaactgctccaaggacgccaacgataccctgctgctccagctgaccaacaccagcgcctactacatgtacttgttgctgctgctgaagtccgtggtgtacttcgccatcatcacatgctgcctgctgcggagaaccgccttctgctgcaacggcgagaagtctagggccaagcgatctggatctggagcaacaaacttctcactactcaaacaagcaggtgacgtggaggagaatcccgggcctactagcatggccttaccagtgaccgccttgctcctgccgctggccttgctgctccacgccgccaggccgcagatcgtgctgtctcagtctcctgccatcctgagcgcttccccaggcgagaaagtgaccatgacctgtagagccagcagcagcgtgtcctacatgcactggtatcagcagaagcccggcagcagccctaagccttggatctacgccaccagcaatctggcctctggcgtgccagccagattttctggctctggcagcggcaccagctacagcttcacaatcagcagagtggaagccgaggacgccgccacctactattgtcagcagtggaccttcaatcctcctaccttcggcggaggcacccggctggaaatcaaaagaacagtggctgctggcggaggcggaagtggaggcggaggatctggcggcggaggctctcaggcttatctgcaacagagcggagccgaactcgtcagacctggcgcttctgtgaagatgagctgcaaggccagcggctacaccttcaccagctataatatgcactgggtcaagcagacccctcggcagggactcgaatggatcggcggaatctatcccggcaacggcgacacctcctacaaccagaagttcaagggcaaagccacactgaccgtgggcaagagcagcagcaccgcctatatgcagctcagcagcctgaccagcgaggacagcgccgtgtacttctgcgccagatacgactacaactacgctatggactactggggccagggcaccagcgtgacagttagctctgccagcacgcgtatccagaaccctgatcctgccgtgtaccagctgcgggatagcaagagcagcgacaagagcgtgtgtctgttcaccgacttcgacagccagaccaacgtgtcccagagcaaggactccgacgtgtacatcaccgataagaccgtgctggacatgcggagcatggacttcaagagcaactccgccgtggcctggtccaacaagtccgatttcgcctgcgccaacgccttcaacaacagcattatccccgaggacacattcttcccaagccccgagagcagcgactccaccgaccacgtgaagcccaaagagacagagaacaccaagcagcccagcaagagctgccacaagcccaaggccatcgtgcacaccgagaaagtgaacatgatgagcctgaccgtgctgggcctgcggatgctgttcgccaaaaccgtggccgtgaacttcctgctgaccgccaagctgttcttcctccgcgccaagagaagcggatctggcgtgaagcagaccctgaatttcgacctgctgaagctggctggcgacgtggaatccaacccaggcccttctagaggccatatgaccgagtacaagcccacggtgcgcctcgccacccgcgacgacgtccccagggccgtacgcaccctcgccgccgcgttcgccgactaccccgccacgcgccacaccgtcgatccggaccgccacatcgagcgggtcaccgagctgcaagaactcttcctcacgcgcgtcgggctcgacatcggcaaggtgtgggtcgcggacgacggcgccgcggtggcggtctggaccacgccggagagcgtcgaagcgggggcggtgttcgccgagatcggcccgcgcatggccgagttgagcggttcccggctggccgcgcagcaacagatggaaggcctcctggcgccgcaccggcccaaggagcccgcgtggttcctggccaccgtcggcgtctcgcccgaccaccagggcaagggtctgggcagcgccgtcgtgctccccggagtggaggcggccgagcgcgccggggtgcccgccttcctggagacctccgcgccccgcaacctccccttctacgagcggctcggcttcaccgtcaccgccgacgtcgaggtgcccgaaggaccgcgcacctggtgcatgacccgcaagcccggtgcctga

SEQ ID NO: 17911 - DNA, 2925 bp, synthetic construct
  source 1..2925: mol_type = other DNA
atggccttaccagtgaccgccttgctcctgccgctggccttgctgctccacgccgccaggccgctcgaggaggaggacctgaagaacgtgttcccacctgaggtggccgtgttcgagcctagcgaggccgagatcagccacacccagaaagccaccctcgtgtgcctggctaccggcttctaccccgaccatgtggaactgtcttggtgggtcaacggcaaagaggtgcacagcggcgtgtctaccgacccccagccactgaaagaacagcccgccctgaacgacagccggtactgcctgagcagcagactgagagtgtccgccaccttctggcagaacccccggaaccacttcagatgccaggtgcagttctacggcctgagcgagaacgacgagtggacccaggacagagccaagcccgtgacccagatcgtgtctgccgaagcctggggcagagccgatgatgtgattaagatccactggcaggaaaagaagtccaacaccatcctgggcagccaggaaggcaacaccatgaagaccaacgacacctacatgaagttcagctggctgaccgtgcccgagaagtccctggacaaagaacacagatgcatcgtgcggcacgaaaacaacaagaacggcgtggaccaggaaatcatcttcccacccatcaagaccgatgtgattacaatggaccccaaggacaactgctccaaggacgccaacgataccctgctgctccagctgaccaacaccagcgcctactacatgtacttgttgctgctgctgaagtccgtggtgtacttcgccatcatcacatgctgcctgctgcggagaaccgccttctgctgcaacggcgagaagtctagggccaagcgatctggatctggagcaacaaacttctcactactcaaacaagcaggtgacgtggaggagaatcccgggcctactagcatggccttaccagtgaccgccttgctcctgccgctggccttgctgctccacgccgccaggccggagatcgtgctgacacagagccctgccaccctgtctctgagccctggcgaaagagccaccctgagctgtagagccagccagagcgtgtccagctacctggcctggtatcagcagaagcccggccaggctccccggctgctgatctacgatgccagcaatagagccaccggcatccccgccagattttccggctctggcagcggcaccgacttcaccctgaccatcagctccctggaacccgaggacttcgccgtgtactactgccagcagcggagcaactggcccatcacattcggccagggcacccggctggaaatcaaaggcggaggcggaagtggaggcggaggatctggcggcggaggctctgaggtgcagcttgttgagtctggcggaggactggtgcagcccgatagaagcctgagactgtcttgtgccgccagcggcttcaccttccacgattatgccatgcactgggtccgacaggcccctggcaaaggacttgaatgggtgtccaccatctcttggaacagcggcacaatcggctacgccgactctgtgaagggcagattcaccatcagccgggacaacgccaagaacagcctgtacctccagatgaactccctgagagccgaggacacagccctgtactactgcgccaaggacatccagtacggcaactactactacggcatggacgtgtggggccagggcacaacagtgacagtctcttctacgcgtatccagaaccctgatcctgccgtgtaccagctgcgggatagcaagagcagcgacaagagcgtgtgtctgttcaccgacttcgacagccagaccaacgtgtcccagagcaaggactccgacgtgtacatcaccgataagaccgtgctggacatgcggagcatggacttcaagagcaactccgccgtggcctggtccaacaagtccgatttcgcctgcgccaacgccttcaacaacagcattatccccgaggacacattcttcccaagccccgagagcagcgactccaccgaccacgtgaagcccaaagagacagagaacaccaagcagcccagcaagagctgccacaagcccaaggccatcgtgcacaccgagaaagtgaacatgatgagcctgaccgtgctgggcctgcggatgctgttcgccaaaaccgtggccgtgaacttcctgctgaccgccaagctgttcttcctccgcgccaagagaagcggatctggcgtgaagcagaccctgaatttcgacctgctgaagctggctggcgacgtggaatccaacccaggcccttctagaggccatatgaccgagtacaagcccacggtgcgcctcgccacccgcgacgacgtccccagggccgtacgcaccctcgccgccgcgttcgccgactaccccgccacgcgccacaccgtcgatccggaccgccacatcgagcgggtcaccgagctgcaagaactcttcctcacgcgcgtcgggctcgacatcggcaaggtgtgggtcgcggacgacggcgccgcggtggcggtctggaccacgccggagagcgtcgaagcgggggcggtgttcgccgagatcggcccgcgcatggccgagttgagcggttcccggctggccgcgcagcaacagatggaaggcctcctggcgccgcaccggcccaaggagcccgcgtggttcctggccaccgtcggcgtctcgcccgaccaccagggcaagggtctgggcagcgccgtcgtgctccccggagtggaggcggccgagcgcgccggggtgcccgccttcctggagacctccgcgccccgcaacctccccttctacgagcggctcggcttcaccgtcaccgccgacgtcgaggtgcccgaaggaccgcgcacctggtgcatgacccgcaagcccggtgcctga

SEQ ID NO: 17912 - DNA, 2919 bp, synthetic construct
  source 1..2919: mol_type = other DNA
atggccttaccagtgaccgccttgctcctgccgctggccttgctgctccacgccgccaggccgctcgaggaggaggacctgaagaacgtgttcccacctgaggtggccgtgttcgagcctagcgaggccgagatcagccacacccagaaagccaccctcgtgtgcctggctaccggcttctaccccgaccatgtggaactgtcttggtgggtcaacggcaaagaggtgcacagcggcgtgtctaccgacccccagccactgaaagaacagcccgccctgaacgacagccggtactgcctgagcagcagactgagagtgtccgccaccttctggcagaacccccggaaccacttcagatgccaggtgcagttctacggcctgagcgagaacgacgagtggacccaggacagagccaagcccgtgacccagatcgtgtctgccgaagcctggggcagagccgatgatgtgattaagatccactggcaggaaaagaagtccaacaccatcctgggcagccaggaaggcaacaccatgaagaccaacgacacctacatgaagttcagctggctgaccgtgcccgagaagtccctggacaaagaacacagatgcatcgtgcggcacgaaaacaacaagaacggcgtggaccaggaaatcatcttcccacccatcaagaccgatgtgattacaatggaccccaaggacaactgctccaaggacgccaacgataccctgctgctccagctgaccaacaccagcgcctactacatgtacttgttgctgctgctgaagtccgtggtgtacttcgccatcatcacatgctgcctgctgcggagaaccgccttctgctgcaacggcgagaagtctagggccaagcgatctggatctggagcaacaaacttctcactactcaaacaagcaggtgacgtggaggagaatcccgggcctactagcatggccttaccagtgaccgccttgctcctgccgctggccttgctgctccacgccgccaggccggacatccagatgacccagagccccagcagcctgtctgccagcgtgggcgacagagtgaccatcacctgtagagccagccaggacgtgaacaccgccgtggcctggtatcagcagaagcctggcaaggcccccaagctgctgatctacagcgccagcttcctggaaagcggcgtgcccagcagattcagcggaagcagaagcggcaccgacttcaccctgaccatcagctccctccagcccgaggacttcgccacctactactgccagcagcactacaccacccctcccaccttcggccagaccaaggtggaaatcaagagaggcggaggcggaagtggaggcggaggatctggcggcggaggctctgaagtgcaactggtggaatctggcggcggactggtgcagcctggcggatctctgagactgagctgtgccgccagcggcttcaacatcaaggacacctacatccactgggtgcgccaggcccctggaaagggactggaatgggtggcccggatctaccccaccaacggctacaccagatacgccgacagcgtgaagggccggttcaccatcagcgccgacaccagcaagaataccgcctacctccagatgaacagcctgcgggccgaggataccgccgtgtactactgctcaagatggggaggcgacggcttctacgctatggacgtgtggggccagggcacccttgtgaccgtgtcatctacgcgtatccagaaccctgatcctgccgtgtaccagctgcgggatagcaagagcagcgacaagagcgtgtgtctgttcaccgacttcgacagccagaccaacgtgtcccagagcaaggactccgacgtgtacatcaccgataagaccgtgctggacatgcggagcatggacttcaagagcaactccgccgtggcctggtccaacaagtccgatttcgcctgcgccaacgccttcaacaacagcattatccccgaggacacattcttcccaagccccgagagcagcgactccaccgaccacgtgaagcccaaagagacagagaacaccaagcagcccagcaagagctgccacaagcccaaggccatcgtgcacaccgagaaagtgaacatgatgagcctgaccgtgctgggcctgcggatgctgttcgccaaaaccgtggccgtgaacttcctgctgaccgccaagctgttcttcctccgcgccaagagaagcggatctggcgtgaagcagaccctgaatttcgacctgctgaagctggctggcgacgtggaatccaacccaggcccttctagaggccatatgaccgagtacaagcccacggtgcgcctcgccacccgcgacgacgtccccagggccgtacgcaccctcgccgccgcgttcgccgactaccccgccacgcgccacaccgtcgatccggaccgccacatcgagcgggtcaccgagctgcaagaactcttcctcacgcgcgtcgggctcgacatcggcaaggtgtgggtcgcggacgacggcgccgcggtggcggtctggaccacgccggagagcgtcgaagcgggggcggtgttcgccgagatcggcccgcgcatggccgagttgagcggttcccggctggccgcgcagcaacagatggaaggcctcctggcgccgcaccggcccaaggagcccgcgtggttcctggccaccgtcggcgtctcgcccgaccaccagggcaagggtctgggcagcgccgtcgtgctccccggagtggaggcggccgagcgcgccggggtgcccgccttcctggagacctccgcgccccgcaacctccccttctacgagcggctcggcttcaccgtcaccgccgacgtcgaggtgcccgaaggaccgcgcacctggtgcatgacccgcaagcccggtgcctga

SEQ ID NO: 17913 - DNA, 2556 bp, synthetic construct
  source 1..2556: mol_type = other DNA
atggccttaccagtgaccgccttgctcctgccgctggccttgctgctccacgccgccaggccgctcgaggaggaggacctgaagaacgtgttcccacctgaggtggccgtgttcgagcctagcgaggccgagatcagccacacccagaaagccaccctcgtgtgcctggctaccggcttctaccccgaccatgtggaactgtcttggtgggtcaacggcaaagaggtgcacagcggcgtgtctaccgacccccagccactgaaagaacagcccgccctgaacgacagccggtactgcctgagcagcagactgagagtgtccgccaccttctggcagaacccccggaaccacttcagatgccaggtgcagttctacggcctgagcgagaacgacgagtggacccaggacagagccaagcccgtgacccagatcgtgtctgccgaagcctggggcagagccgatgatgtgattaagatccactggcaggaaaagaagtccaacaccatcctgggcagccaggaaggcaacaccatgaagaccaacgacacctacatgaagttcagctggctgaccgtgcccgagaagtccctggacaaagaacacagatgcatcgtgcggcacgaaaacaacaagaacggcgtggaccaggaaatcatcttcccacccatcaagaccgatgtgattacaatggaccccaaggacaactgctccaaggacgccaacgataccctgctgctccagctgaccaacaccagcgcctactacatgtacttgttgctgctgctgaagtccgtggtgtacttcgccatcatcacatgctgcctgctgcggagaaccgccttctgctgcaacggcgagaagtctagggccaagcgatctggatctggagcaacaaacttctcactactcaaacaagcaggtgacgtggaggagaatcccgggcctactagcatggccctgcccgtgacagccctgctgctgcctctggctctgctgctgcacgccgccagacccgatgaattcgaggtgcaactggtggaaagcggcggaggcctggtgcaggctggcggatctctgagactgagctgtgccgccagcggcatcaccttcagcatcaacacaatgggctggtacagacaggcccctggcaagcagagggaactggtggccctgatctccagcatcggcgacacctactacgccgacagcgtgaagggccggttcaccatcagccgggacaacgccaagaacaccgtgtacctccagatgaacagcctgaagcccgaggacaccgccgtgtactactgcaagcggttcagaacagccgcccagggcaccgattattggggccagggaacacaagtgaccgtgtcctctacgcgtatccagaaccctgatcctgccgtgtaccagctgcgggatagcaagagcagcgacaagagcgtgtgtctgttcaccgacttcgacagccagaccaacgtgtcccagagcaaggactccgacgtgtacatcaccgataagaccgtgctggacatgcggagcatggacttcaagagcaactccgccgtggcctggtccaacaagtccgatttcgcctgcgccaacgccttcaacaacagcattatccccgaggacacattcttcccaagccccgagagcagcgactccaccgaccacgtgaagcccaaagagacagagaacaccaagcagcccagcaagagctgccacaagcccaaggccatcgtgcacaccgagaaagtgaacatgatgagcctgaccgtgctgggcctgcggatgctgttcgccaaaaccgtggccgtgaacttcctgctgaccgccaagctgttcttcctccgcgccaagagaagcggatctggcgtgaagcagaccctgaatttcgacctgctgaagctggctggcgacgtggaatccaacccaggcccttctagaggccatatgaccgagtacaagcccacggtgcgcctcgccacccgcgacgacgtccccagggccgtacgcaccctcgccgccgcgttcgccgactaccccgccacgcgccacaccgtcgatccggaccgccacatcgagcgggtcaccgagctgcaagaactcttcctcacgcgcgtcgggctcgacatcggcaaggtgtgggtcgcggacgacggcgccgcggtggcggtctggaccacgccggagagcgtcgaagcgggggcggtgttcgccgagatcggcccgcgcatggccgagttgagcggttcccggctggccgcgcagcaacagatggaaggcctcctggcgccgcaccggcccaaggagcccgcgtggttcctggccaccgtcggcgtctcgcccgaccaccagggcaagggtctgggcagcgccgtcgtgctccccggagtggaggcggccgagcgcgccggggtgcccgccttcctggagacctccgcgccccgcaacctccccttctacgagcggctcggcttcaccgtcaccgccgacgtcgaggtgcccgaaggaccgcgcacctggtgcatgacccgcaagcccggtgcctga

SEQ ID NO: 17914 - DNA, 2556 bp, synthetic construct; identical to SEQ ID NO: 17913
  source 1..2556: mol_type = other DNA

SEQ ID NO: 17915 - DNA, 3351 bp, synthetic construct
  source 1..3351: mol_type = other DNA
atggccttaccagtgaccgccttgctcctgccgctggccttgctgctccacgccgccaggccgctcgaggaggaggacctgaagaacgtgttcccacctgaggtggccgtgttcgagcctagcgaggccgagatcagccacacccagaaagccaccctcgtgtgcctggctaccggcttctaccccgaccatgtggaactgtcttggtgggtcaacggcaaagaggtgcacagcggcgtgtctaccgacccccagccactgaaagaacagcccgccctgaacgacagccggtactgcctgagcagcagactgagagtgtccgccaccttctggcagaacccccggaaccacttcagatgccaggtgcagttctacggcctgagcgagaacgacgagtggacccaggacagagccaagcccgtgacccagatcgtgtctgccgaagcctggggcagagccgatgatgtgattaagatccactggcaggaaaagaagtccaacaccatcctgggcagccaggaaggcaacaccatgaagaccaacgacacctacatgaagttcagctggctgaccgtgcccgagaagtccctggacaaagaacacagatgcatcgtgcggcacgaaaacaacaagaacggcgtggaccaggaaatcatcttcccacccatcaagaccgatgtgattacaatggaccccaaggacaactgctccaaggacgccaacgataccctgctgctccagctgaccaacaccagcgcctactacatgtacttgttgctgctgctgaagtccgtggtgtacttcgccatcatcacatgctgcctgctgcggagaaccgccttctgctgcaacggcgagaagtctagggccaagcgatctggatctggagcaacaaacttctcactactcaaacaagcaggtgacgtggaggagaatcccgggcctactagcatggccttaccagtgaccgccttgctcctgccgctggccttgctgctccacgccgccaggccgcaggtccagctcgtcgagtccggcggcggcctcgtccaggccggcgactccgtcaccctctcctgcaccgcctccggccgcaccttctcctcctacgccctcgcctggttccgccagcgccccggcaaggagcgcgagttcgtcgccggcctccgctggggcggccccaccaactacgccgactccgtcaaggaccgcttcaccatctccggcgactccgccaagcacaccatgtacctccagatgaactccctcaagcccgaggacaccgccgtctactactgcggctacaaccccggcggctgggccgtcccctcccagtacgagtacgactcctggggccagggcacccaggtcaccgtctcctccggtaccggcggaggcggatctggcggcggaggtagcggtggcggaggatctgaattcgacatccagatgacacagagccctagcagcctgtctgccagcgtgggagacagagtgaccatcacatgcaaggccagcgaccacatcaacaactggctggcctggtatcagcagaagcctggacaggcccctaagctgctgatctacggcgctaccacactggaaacaggcgtgcccagcagattttctggcagcggctctggcaccgactacaccctgacaatatccagcctccagcctgaggacttcgccacctactactgtcagcagagctggaacaccccttggacattcggccagggcaccaagctggaaatcaagagaggcggaggcggaagtggaggcggaggatctggcggcggaggctctcaagttcagcttcaacagcctggcgctgagctggtcaaacctggcgcttctgtgaagatgagctgcaaagccagcggctacgccttcagcagctactggatcaactggatgaagcagaaacccggccagggactcgaatggatcggccaaatctatcccggcgacggcgacaccaactacaacggcaagttcaagggcagagccacactgaccgccgatacctctagcagcacagcctacatgcagctgagcagcctgaccagcgaagatagcgccgtgtacttctgtgcccggtccatcacaacagtcgtgggctgcgctatggactattggggccagggaacaagcgtgaccgtgtctagtacgcgtatccagaaccctgatcctgccgtgtaccagctgcgggatagcaagagcagcgacaagagcgtgtgtctgttcaccgacttcgacagccagaccaacgtgtcccagagcaaggactccgacgtgtacatcaccgataagaccgtgctggacatgcggagcatggacttcaagagcaactccgccgtggcctggtccaacaagtccgatttcgcctgcgccaacgccttcaacaacagcattatccccgaggacacattcttcccaagccccgagagcagcgactccaccgaccacgtgaagcccaaagagacagagaacaccaagcagcccagcaagagctgccacaagcccaaggccatcgtgcacaccgagaaagtgaacatgatgagcctgaccgtgctgggcctgcggatgctgttcgccaaaaccgtggccgtgaacttcctgctgaccgccaagctgttcttcctccgcgccaagagaagcggatctggcgtgaagcagaccctgaatttcgacctgctgaagctggctggcgacgtggaatccaacccaggcccttctagaggccatatgaccgagtacaagcccacggtgcgcctcgccacccgcgacgacgtccccagggccgtacgcaccctcgccgccgcgttcgccgactaccccgccacgcgccacaccgtcgatccggaccgccacatcgagcgggtcaccgagctgcaagaactcttcctcacgcgcgtcgggctcgacatcggcaaggtgtgggtcgcggacgacggcgccgcggtggcggtctggaccacgccggagagcgtcgaagcgggggcggtgttcgccgagatcggcccgcgcatggccgagttgagcggttcccggctggccgcgcagcaacagatggaaggcctcctggcgccgcaccggcccaaggagcccgcgtggttcctggccaccgtcggcgtctcgcccgaccaccagggcaagggtctgggcagcgccgtcgtgctccccggagtggaggcggccgagcgcgccggggtgcccgccttcctggagacctccgcgccccgcaacctccccttctacgagcggctcggcttcaccgtcaccgccgacgtcgaggtgcccgaaggaccgcgcacctggtgcatgacccgcaagcccggtgcctga

SEQ ID NO: 17916 - DNA, 3738 bp, synthetic construct
  source 1..3738: mol_type = other DNA
atggccttaccagtgaccgccttgctcctgccgctggccttgctgctccacgccgccaggccgctcgaggaggaggacctgaagaacgtgttcccacctgaggtggccgtgttcgagcctagcgaggccgagatcagccacacccagaaagccaccctcgtgtgcctggctaccggcttctaccccgaccatgtggaactgtcttggtgggtcaacggcaaagaggtgcacagcggcgtgtctaccgacccccagccactgaaagaacagcccgccctgaacgacagccggtactgcctgagcagcagactgagagtgtccgccaccttctggcagaacccccggaaccacttcagatgccaggtgcagttctacggcctgagcgagaacgacgagtggacccaggacagagccaagcccgtgacccagatcgtgtctgccgaagcctggggcagagccgatgatgtgattaagatccactggcaggaaaagaagtccaacaccatcctgggcagccaggaaggcaacaccatgaagaccaacgacacctacatgaagttcagctggctgaccgtgcccgagaagtccctggacaaagaacacagatgcatcgtgcggcacgaaaacaacaagaacggcgtggaccaggaaatcatcttcccacccatcaagaccgatgtgattacaatggaccccaaggacaactgctccaaggacgccaacgataccctgctgctccagctgaccaacaccagcgcctactacatgtacttgttgctgctgctgaagtccgtggtgtacttcgccatcatcacatgctgcctgctgcggagaaccgccttctgctgcaacggcgagaagtctagggccaagcgatctggatctggagcaacaaacttctcactactcaaacaagcaggtgacgtggaggagaatcccgggcctactagcatggccttaccagtgaccgccttgctcctgccgctggccttgctgctccacgccgccaggccggaggttcagctgcttgagtctggcggaggactggttcaacctggcggaagcctgagactgtcttgtgccgccagcggcttcacctttagcagctacgccatgagctgggtccgacaggctcctggcaaaggactggaatgggtgtccagcatcagcggcagcggcgactacatctactacgccgatagcgtgaagggcagattcaccatcagccgggacatcagcaagaacaccctgtacctccagatgaacagcctgagagccgaggacaccgccgtgtactactgtgccaaagaaggcaccggcgctaacagcagcctggccgattatagaggccagggcacactggtcaccgtgtctagtggcggaggaagcggcggaggatctcaggtccagctcgtcgagtccggcggcggcctcgtccaggccggcgactccgtcaccctctcctgcaccgcctccggccgcaccttctcctcctacgccctcgcctggttccgccagcgccccggcaaggagcgcgagttcgtcgccggcctccgctggggcggccccaccaactacgccgactccgtcaaggaccgcttcaccatctccggcgactccgccaagcacaccatgtacctccagatgaactccctcaagcccgaggacaccgccgtctactactgcggctacaaccccggcggctgggccgtcccctcccagtacgagtacgactcctggggccagggcacccaggtcaccgtctcctccggtaccggcggaggcggatctggcggcggaggtagcggtggcggaggatctgaattcgacatccagatgacacagagccctagcagcctgtctgccagcgtgggagacagagtgaccatcacatgcaaggccagcgaccacatcaacaactggctggcctggtatcagcagaagcctggacaggcccctaagctgctgatctacggcgctaccacactggaaacaggcgtgcccagcagattttctggcagcggctctggcaccgactacaccctgacaatatccagcctccagcctgaggacttcgccacctactactgtcagcagagctggaacaccccttggacattcggccagggcaccaagctggaaatcaagagaggcggaggcggaagtggaggcggaggatctggcggcggaggctctcaagttcagcttcaacagcctggcgctgagctggtcaaacctggcgcttctgtgaagatgagctgcaaagccagcggctacgccttcagcagctactggatcaactggatgaagcagaaacccggccagggactcgaatggatcggccaaatctatcccggcgacggcgacaccaactacaacggcaagttcaagggcagagccacactgaccgccgatacctctagcagcacagcctacatgcagctgagcagcctgaccagcgaagatagcgccgtgtacttctgtgcccggtccatcacaacagtcgtgggctgcgctatggactattggggccagggaacaagcgtgaccgtgtctagtacgcgtatccagaaccctgatcctgccgtgtaccagctgcgggatagcaagagcagcgacaagagcgtgtgtctgttcaccgacttcgacagccagaccaacgtgtcccagagcaaggactccgacgtgtacatcaccgataagaccgtgctggacatgcggagcatggacttcaagagcaactccgccgtggcctggtccaacaagtccgatttcgcctgcgccaacgccttcaacaacagcattatccccgaggacacattcttcccaagccccgagagcagcgactccaccgaccacgtgaagcccaaagagacagagaacaccaagcagcccagcaagagctgccacaagcccaaggccatcgtgcacaccgagaaagtgaacatgatgagcctgaccgtgctgggcctgcggatgctgttcgccaaaaccgtggccgtgaacttcctgctgaccgccaagctgttcttcctccgcgccaagagaagcggatctggcgtgaagcagaccctgaatttcgacctgctgaagctggctggcgacgtggaatccaacccaggcccttctagaggccatatgaccgagtacaagcccacggtgcgcctcgccacccgcgacgacgtccccagggccgtacgcaccctcgccgccgcgttcgccgactaccccgccacgcgccacaccgtcgatccggaccgccacatcgagcgggtcaccgagctgcaagaactcttcctcacgcgcgtcgggctcgacatcggcaaggtgtgggtcgcggacgacggcgccgcggtggcggtctggaccacgccggagagcgtcgaagcgggggcggtgttcgccgagatcggcccgcgcatggccgagttgagcggttcccggctggccgcgcagcaacagatggaaggcctcctggcgccgcaccggcccaaggagcccgcgtggttcctggccaccgtcggcgtctcgcccgaccaccagggcaagggtctgggcagcgccgtcgtgctccccggagtggaggcggccgagcgcgccggggtgcccgccttcctggagacctccgcgccccgcaacctccccttctacgagcggctcggcttcaccgtcaccgccgacgtcgaggtgcccgaaggaccgcgcacctggtgcatgacccgcaagcccggtgcctga

SEQ ID NO: 17917 - DNA, 3732 bp, synthetic construct
  source 1..3732: mol_type = other DNA
atggccttaccagtgaccgccttgctcctgccgctggccttgctgctccacgccgccaggccgctcgaggaggaggacctgaagaacgtgttcccacctgaggtggccgtgttcgagcctagcgaggccgagatcagccacacccagaaagccaccctcgtgtgcctggctaccggcttctaccccgaccatgtggaactgtcttggtgggtcaacggcaaagaggtgcacagcggcgtgtctaccgacccccagccactgaaagaacagcccgccctgaacgacagccggtactgcctgagcagcagactgagagtgtccgccaccttctggcagaacccccggaaccacttcagatgccaggtgcagttctacggcctgagcgagaacgacgagtggacccaggacagagccaagcccgtgacccagatcgtgtctgccgaagcctggggcagagccgatgatgtgattaagatccactggcaggaaaagaagtccaacaccatcctgggcagccaggaaggcaacaccatgaagaccaacgacacctacatgaagttcagctggctgaccgtgcccgagaagtccctggacaaagaacacagatgcatcgtgcggcacgaaaacaacaagaacggcgtggaccaggaaatcatcttcccacccatcaagaccgatgtgattacaatggaccccaaggacaactgctccaaggacgccaacgataccctgctgctccagctgaccaacaccagcgcctactacatgtacttgttgctgctgctgaagtccgtggtgtacttcgccatcatcacatgctgcctgctgcggagaaccgccttctgctgcaacggcgagaagtctagggccaagcgatctggatctggagcaacaaacttctcactactcaaacaagcaggtgacgtggaggagaatcccgggcctactagcatggccttaccagtgaccgccttgctcctgccgctggccttgctgctccacgccgccaggccgggcgtgacacagagccccacacacctgattaagaccagaggccagcaggccacactgagatgcagccctatcagcggccacaccagcgtgtactggtatcagcaggctctcggactgggcctccagttcctgctttggtacgacgagggcgaagagagaaaccggggcaacttccctcctcggttttccggcagacagttccccaactacagcagcgagctgaacgtgaacgccctggaactggaagatagcgccctgtacctgtgtgcctcttctcttggtggacctcgcggactggctggactgagaggggatgagcagtttttcggccctggcaccagactgaccgtgctggaaggcggaggaagcggcggaggatctcaggtccagctcgtcgagtccggcggcggcctcgtccaggccggcgactccgtcaccctctcctgcaccgcctccggccgcaccttctcctcctacgccctcgcctggttccgccagcgccccggcaaggagcgcgagttcgtcgccggcctccgctggggcggccccaccaactacgccgactccgtcaaggaccgcttcaccatctccggcgactccgccaagcacaccatgtacctccagatgaactccctcaagcccgaggacaccgccgtctactactgcggctacaaccccggcggctgggccgtcccctcccagtacgagtacgactcctggggccagggcacccaggtcaccgtctcctccggtaccggcggaggcggatctggcggcggaggtagcggtggcggaggatctgaattcgacatccagatgacacagagccctagcagcctgtctgccagcgtgggagacagagtgaccatcacatgcaaggccagcgaccacatcaacaactggctggcctggtatcagcagaagcctggacaggcccctaagctgctgatctacggcgctaccacactggaaacaggcgtgcccagcagattttctggcagcggctctggcaccgactacaccctgacaatatccagcctccagcctgaggacttcgccacctactactgtcagcagagctggaacaccccttggacattcggccagggcaccaagctggaaatcaagagaggcggaggcggaagtggaggcggaggatctggcggcggaggctctcaagttcagcttcaacagcctggcgctgagctggtcaaacctggcgcttctgtgaagatgagctgcaaagccagcggctacgccttcagcagctactggatcaactggatgaagcagaaacccggccagggactcgaatggatcggccaaatctatcccggcgacggcgacaccaactacaacggcaagttcaagggcagagccacactgaccgccgatacctctagcagcacagcctacatgcagctgagcagcctgaccagcgaagatagcgccgtgtacttctgtgcccggtccatcacaacagtcgtgggctgcgctatggactattggggccagggaacaagcgtgaccgtgtctagtacgcgtatccagaaccctgatcctgccgtgtaccagctgcgggatagcaagagcagcgacaagagcgtgtgtctgttcaccgacttcgacagccagaccaacgtgtcccagagcaaggactccgacgtgtacatcaccgataagaccgtgctggacatgcggagcatggacttcaagagcaactccgccgtggcctggtccaacaagtccgatttcgcctgcgccaacgccttcaacaacagcattatccccgaggacacattcttcccaagccccgagagcagcgactccaccgaccacgtgaagcccaaagagacagagaacaccaagcagcccagcaagagctgccacaagcccaaggccatcgtgcacaccgagaaagtgaacatgatgagcctgaccgtgctgggcctgcggatgctgttcgccaaaaccgtggccgtgaacttcctgctgaccgccaagctgttcttcctccgcgccaagagaagcggatctggcgtgaagcagaccctgaatttcgacctgctgaagctggctggcgacgtggaatccaacccaggcccttctagaggccatatgaccgagtacaagcccacggtgcgcctcgccacccgcgacgacgtccccagggccgtacgcaccctcgccgccgcgttcgccgactaccccgccacgcgccacaccgtcgatccggaccgccacatcgagcgggtcaccgagctgcaagaactcttcctcacgcgcgtcgggctcgacatcggcaaggtgtgggtcgcggacgacggcgccgcggtggcggtctggaccacgccggagagcgtcgaagcgggggcggtgttcgccgagatcggcccgcgcatggccgagttgagcggttcccggctggccgcgcagcaacagatggaaggcctcctggcgccgcaccggcccaaggagcccgcgtggttcctggccaccgtcggcgtctcgcccgaccaccagggcaagggtctgggcagcgccgtcgtgctccccggagtggaggcggccgagcgcgccggggtgcccgccttcctggagacctccgcgccccgcaacctccccttctacgagcggctcggcttcaccgtcaccgccgacgtcgaggtgcccgaaggaccgcgcacctggtgcatgacccgcaagcccggtgcctga

SEQ ID NO: 17918 - DNA, 3714 bp, synthetic construct
  source 1..3714: mol_type = other DNA
atggccttaccagtgaccgccttgctcctgccgctggccttgctgctccacgccgccaggccgctcgaggaggaggacctgaagaacgtgttcccacctgaggtggccgtgttcgagcctagcgaggccgagatcagccacacccagaaagccaccctcgtgtgcctggctaccggcttctaccccgaccatgtggaactgtcttggtgggtcaacggcaaagaggtgcacagcggcgtgtctaccgacccccagccactgaaagaacagcccgccctgaacgacagccggtactgcctgagcagcagactgagagtgtccgccaccttctggcagaacccccggaaccacttcagatgccaggtgcagttctacggcctgagcgagaacgacgagtggacccaggacagagccaagcccgtgacccagatcgtgtctgccgaagcctggggcagagccgatgatgtgattaagatccactggcaggaaaagaagtccaacaccatcctgggcagccaggaaggcaacaccatgaagaccaacgacacctacatgaagttcagctggctgaccgtgcccgagaagtccctggacaaagaacacagatgcatcgtgcggcacgaaaacaacaagaacggcgtggaccaggaaatcatcttcccacccatcaagaccgatgtgattacaatggaccccaaggacaactgctccaaggacgccaacgataccctgctgctccagctgaccaacaccagcgcctactacatgtacttgttgctgctgctgaagtccgtggtgtacttcgccatcatcacatgctgcctgctgcggagaaccgccttctgctgcaacggcgagaagtctagggccaagcgatctggatctggagcaacaaacttctcactactcaaacaagcaggtgacgtggaggagaatcccgggcctactagcatggccttaccagtgaccgccttgctcctgccgctggccttgctgctccacgccgccaggccgggcgtgacacagagccccacacacctgattaagaccagaggccagcaggccacactgagatgcagccctatcagcggccacaccagcgtgtactggtatcagcaggctctcggactgggcctccagttcctgctttggtacgacgagggcgaagagagaaaccggggcaacttccctcctcggttttccggcagacagttccccaactacagcagcgagctgaacgtgaacgccctggaactggaagatagcgccctgtacctgtgtgcctcttctcttggtggacctcgcggactggctggactgagaggggatgagcagtttttcggccctggcaccagactgaccgtgctggaaggcggaggaagcggcggaggatctggcgtgacacagagccccacacacctgattaagaccagaggccagcaggccacactgagatgcagccctatcagcggccacaccagcgtgtactggtatcagcaggctctcggactgggcctccagttcctgctttggtacgacgagggcgaagagagaaaccggggcaacttccctcctcggttttccggcagacagttccccaactacagcagcgagctgaacgtgaacgccctggaactggaagatagcgccctgtacctgtgtgccagctctctcggcggagatgaactgggagccgatggcaacgagcagttctttggccctggcaccagactgaccgtgctggaaggtaccggcggaggcggatctggcggcggaggtagcggtggcggaggatctgaattcgacatccagatgacacagagccctagcagcctgtctgccagcgtgggagacagagtgaccatcacatgcaaggccagcgaccacatcaacaactggctggcctggtatcagcagaagcctggacaggcccctaagctgctgatctacggcgctaccacactggaaacaggcgtgcccagcagattttctggcagcggctctggcaccgactacaccctgacaatatccagcctccagcctgaggacttcgccacctactactgtcagcagagctggaacaccccttggacattcggccagggcaccaagctggaaatcaagagaggcggaggcggaagtggaggcggaggatctggcggcggaggctctcaagttcagcttcaacagcctggcgctgagctggtcaaacctggcgcttctgtgaagatgagctgcaaagccagcggctacgccttcagcagctactggatcaactggatgaagcagaaacccggccagggactcgaatggatcggccaaatctatcccggcgacggcgacaccaactacaacggcaagttcaagggcagagccacactgaccgccgatacctctagcagcacagcctacatgcagctgagcagcctgaccagcgaagatagcgccgtgtacttctgtgcccggtccatcacaacagtcgtgggctgcgctatggactattggggccagggaacaagcgtgaccgtgtctagtacgcgtatccagaaccctgatcctgccgtgtaccagctgcgggatagcaagagcagcgacaagagcgtgtgtctgttcaccgacttcgacagccagaccaacgtgtcccagagcaaggactccgacgtgtacatcaccgataagaccgtgctggacatgcggagcatggacttcaagagcaactccgccgtggcctggtccaacaagtccgatttcgcctgcgccaacgccttcaacaacagcattatccccgaggacacattcttcccaagccccgagagcagcgactccaccgaccacgtgaagcccaaagagacagagaacaccaagcagcccagcaagagctgccacaagcccaaggccatcgtgcacaccgagaaagtgaacatgatgagcctgaccgtgctgggcctgcggatgctgttcgccaaaaccgtggccgtgaacttcctgctgaccgccaagctgttcttcctccgcgccaagagaagcggatctggcgtgaagcagaccctgaatttcgacctgctgaagctggctggcgacgtggaatccaacccaggcccttctagaggccatatgaccgagtacaagcccacggtgcgcctcgccacccgcgacgacgtccccagggccgtacgcaccctcgccgccgcgttcgccgactaccccgccacgcgccacaccgtcgatccggaccgccacatcgagcgggtcaccgagctgcaagaactcttcctcacgcgcgtcgggctcgacatcggcaaggtgtgggtcgcggacgacggcgccgcggtggcggtctggaccacgccggagagcgtcgaagcgggggcggtgttcgccgagatcggcccgcgcatggccgagttgagcggttcccggctggccgcgcagcaacagatggaaggcctcctggcgccgcaccggcccaaggagcccgcgtggttcctggccaccgtcggcgtctcgcccgaccaccagggcaagggtctgggcagcgccgtcgtgctccccggagtggaggcggccgagcgcgccggggtgcccgccttcctggagacctccgcgccccgcaacctccccttctacgagcggctcggcttcaccgtcaccgccgacgtcgaggtgcccgaaggaccgcgcacctggtgcatgacccgcaagcccggtgcctga

SEQ ID NO: 17919 - DNA, 2574 bp, synthetic construct
  source 1..2574: mol_type = other DNA
atggccttaccagtgaccgccttgctcctgccgctggccttgctgctccacgccgccaggccgctcgaggaggaggacctgaagaacgtgttcccacctgaggtggccgtgttcgagcctagcgaggccgagatcagccacacccagaaagccaccctcgtgtgcctggctaccggcttctaccccgaccatgtggaactgtcttggtgggtcaacggcaaagaggtgcacagcggcgtgtctaccgacccccagccactgaaagaacagcccgccctgaacgacagccggtactgcctgagcagcagactgagagtgtccgccaccttctggcagaacccccggaaccacttcagatgccaggtgcagttctacggcctgagcgagaacgacgagtggacccaggacagagccaagcccgtgacccagatcgtgtctgccgaagcctggggcagagccgatgatgtgattaagatccactggcaggaaaagaagtccaacaccatcctgggcagccaggaaggcaacaccatgaagaccaacgacacctacatgaagttcagctggctgaccgtgcccgagaagtccctggacaaagaacacagatgcatcgtgcggcacgaaaacaacaagaacggcgtggaccaggaaatcatcttcccacccatcaagaccgatgtgattacaatggaccccaaggacaactgctccaaggacgccaacgataccctgctgctccagctgaccaacaccagcgcctactacatgtacttgttgctgctgctgaagtccgtggtgtacttcgccatcatcacatgctgcctgctgcggagaaccgccttctgctgcaacggcgagaagtctagggccaagcgatctggatctggagcaacaaacttctcactactcaaacaagcaggtgacgtggaggagaatcccgggcctactagcatggccctgcccgtgacagccctgctgctgcctctggctctgctgctgcacgccgccagacccgatgaattcggctctgacctgggcatcaagctgctgttcgccgctgccaagggccaggacgacgaagtgcggattctgctggctgctggggccgacgtgaacgccaaggatttcgagggctacacccccctgcacgtggccgcctatgatggacacctggaaatcgtggaagtgctgctgaaggctggcgctgatgtgaatgccaaagacagccagggccggacccctctgcatgaagccgcctacagcggccatctggaaattgtggaagtgctgctgaaagccggggcagacgtgaacgctcaggacgacgctggcgagacaccagccgatctggctgcagcttggggccacgaagatatcgccgaggtgctgcagaagacgcgtatccagaaccctgatcctgccgtgtaccagctgcgggatagcaagagcagcgacaagagcgtgtgtctgttcaccgacttcgacagccagaccaacgtgtcccagagcaaggactccgacgtgtacatcaccgataagaccgtgctggacatgcggagcatggacttcaagagcaactccgccgtggcctggtccaacaagtccgatttcgcctgcgccaacgccttcaacaacagcattatccccgaggacacattcttcccaagccccgagagcagcgactccaccgaccacgtgaagcccaaagagacagagaacaccaagcagcccagcaagagctgccacaagcccaaggccatcgtgcacaccgagaaagtgaacatgatgagcctgaccgtgctgggcctgcggatgctgttcgccaaaaccgtggccgtgaacttcctgctgaccgccaagctgttcttcctccgcgccaagagaagcggatctggcgtgaagcagaccctgaatttcgacctgctgaagctggctggcgacgtggaatccaacccaggcccttctagaggccatatgaccgagtacaagcccacggtgcgcctcgccacccgcgacgacgtccccagggccgtacgcaccctcgccgccgcgttcgccgactaccccgccacgcgccacaccgtcgatccggaccgccacatcgagcgggtcaccgagctgcaagaactcttcctcacgcgcgtcgggctcgacatcggcaaggtgtgggtcgcggacgacggcgccgcggtggcggtctggaccacgccggagagcgtcgaagcgggggcggtgttcgccgagatcggcccgcgcatggccgagttgagcggttcccggctggccgcgcagcaacagatggaaggcctcctggcgccgcaccggcccaaggagcccgcgtggttcctggccaccgtcggcgtctcgcccgaccaccagggcaagggtctgggcagcgccgtcgtgctccccggagtggaggcggccgagcgcgccggggtgcccgccttcctggagacctccgcgccccgcaacctccccttctacgagcggctcggcttcaccgtcaccgccgacgtcgaggtgcccgaaggaccgcgcacctggtgcatgacccgcaagcccggtgcctga

SEQ ID NO: 17920 - DNA, 2361 bp, synthetic construct
  source 1..2361: mol_type = other DNA
atggccttaccagtgaccgccttgctcctgccgctggccttgctgctccacgccgccaggccgctcgaggaggaggacctgaagaacgtgttcccacctgaggtggccgtgttcgagcctagcgaggccgagatcagccacacccagaaagccaccctcgtgtgcctggctaccggcttctaccccgaccatgtggaactgtcttggtgggtcaacggcaaagaggtgcacagcggcgtgtctaccgacccccagccactgaaagaacagcccgccctgaacgacagccggtactgcctgagcagcagactgagagtgtccgccaccttctggcagaacccccggaaccacttcagatgccaggtgcagttctacggcctgagcgagaacgacgagtggacccaggacagagccaagcccgtgacccagatcgtgtctgccgaagcctggggcagagccgatgatgtgattaagatccactggcaggaaaagaagtccaacaccatcctgggcagccaggaaggcaacaccatgaagaccaacgacacctacatgaagttcagctggctgaccgtgcccgagaagtccctggacaaagaacacagatgcatcgtgcggcacgaaaacaacaagaacggcgtggaccaggaaatcatcttcccacccatcaagaccgatgtgattacaatggaccccaaggacaactgctccaaggacgccaacgataccctgctgctccagctgaccaacaccagcgcctactacatgtacttgttgctgctgctgaagtccgtggtgtacttcgccatcatcacatgctgcctgctgcggagaaccgccttctgctgcaacggcgagaagtctagggccaagcgatctggatctggagcaacaaacttctcactactcaaacaagcaggtgacgtggaggagaatcccgggcctactagcatggactggatttggcgcatccttttccttgtcggcgctgctaccggcgcccattccttcgaaggcagcggattcgaatacgccaaagagatgcggaacgcctactgggagatcgccctgctgcccaatctgaccaaccagcagaagagagcccccatcagaaagctgtacgacgacccctcccagagcagcgagctgctgtctgaggctaaaaaactgaacgatagccagacgcgtatccagaaccctgatcctgccgtgtaccagctgcgggatagcaagagcagcgacaagagcgtgtgtctgttcaccgacttcgacagccagaccaacgtgtcccagagcaaggactccgacgtgtacatcaccgataagaccgtgctggacatgcggagcatggacttcaagagcaactccgccgtggcctggtccaacaagtccgatttcgcctgcgccaacgccttcaacaacagcattatccccgaggacacattcttcccaagccccgagagcagcgactccaccgaccacgtgaagcccaaagagacagagaacaccaagcagcccagcaagagctgccacaagcccaaggccatcgtgcacaccgagaaagtgaacatgatgagcctgaccgtgctgggcctgcggatgctgttcgccaaaaccgtggccgtgaacttcctgctgaccgccaagctgttcttcctccgcgccaagagaagcggatctggcgtgaagcagaccctgaatttcgacctgctgaagctggctggcgacgtggaatccaacccaggcccttctagaggccatatgaccgagtacaagcccacggtgcgcctcgccacccgcgacgacgtccccagggccgtacgcaccctcgccgccgcgttcgccgactaccccgccacgcgccacaccgtcgatccggaccgccacatcgagcgggtcaccgagctgcaagaactcttcctcacgcgcgtcgggctcgacatcggcaaggtgtgggtcgcggacgacggcgccgcggtggcggtctggaccacgccggagagcgtcgaagcgggggcggtgttcgccgagatcggcccgcgcatggccgagttgagcggttcccggctggccgcgcagcaacagatggaaggcctcctggcgccgcaccggcccaaggagcccgcgtggttcctggccaccgtcggcgtctcgcccgaccaccagggcaagggtctgggcagcgccgtcgtgctccccggagtggaggcggccgagcgcgccggggtgcccgccttcctggagacctccgcgccccgcaacctccccttctacgagcggctcggcttcaccgtcaccgccgacgtcgaggtgcccgaaggaccgcgcacctggtgcatgacccgcaagcccggtgcctga

SEQ ID NO: 17921 - DNA, 3027 bp, synthetic construct
  source 1..3027: mol_type = other DNA
atggccttaccagtgaccgccttgctcctgccgctggccttgctgctccacgccgccaggccgctcgaggaggaggacctgaagaacgtgttcccacctgaggtggccgtgttcgagcctagcgaggccgagatcagccacacccagaaagccaccctcgtgtgcctggctaccggcttctaccccgaccatgtggaactgtcttggtgggtcaacggcaaagaggtgcacagcggcgtgtctaccgacccccagccactgaaagaacagcccgccctgaacgacagccggtactgcctgagcagcagactgagagtgtccgccaccttctggcagaacccccggaaccacttcagatgccaggtgcagttctacggcctgagcgagaacgacgagtggacccaggacagagccaagcccgtgacccagatcgtgtctgccgaagcctggggcagagccgatgatgtgattaagatccactggcaggaaaagaagtccaacaccatcctgggcagccaggaaggcaacaccatgaagaccaacgacacctacatgaagttcagctggctgaccgtgcccgagaagtccctggacaaagaacacagatgcatcgtgcggcacgaaaacaacaagaacggcgtggaccaggaaatcatcttcccacccatcaagaccgatgtgattacaatggaccccaaggacaactgctccaaggacgccaacgataccctgctgctccagctgaccaacaccagcgcctactacatgtacttgttgctgctgctgaagtccgtggtgtacttcgccatcatcacatgctgcctgctgcggagaaccgccttctgctgcaacggcgagaagtctagggccaagcgatctggatctggagcaacaaacttctcactactcaaacaagcaggtgacgtggaggagaatcccgggcctactagcatggccctgcccgtgacagccctgctgctgcctctggctctgctgctgcacgccgccagacccgatgaattcgaggtgcaactggtggaaagcggcggaggcctggtgcaggctggcggatctctgagactgagctgtgccgccagcggcatcaccttcagcatcaacacaatgggctggtacagacaggcccctggcaagcagagggaactggtggccctgatctccagcatcggcgacacctactacgccgacagcgtgaagggccggttcaccatcagccgggacaacgccaagaacaccgtgtacctccagatgaacagcctgaagcccgaggacaccgccgtgtactactgcaagcggttcagaacagccgcccagggcaccgattattggggccagggaacacaagtgaccgtgtcctctctcgagggaggaggcggctccgggggaggcggaagtggaggcggaggatctgggtctggaggaagcggatctggaggctcagggtcagggggctcaggcagtggaggctctttcgaagtgcaactggtggaatctgggggcggactggtgcagccaggcggaagtctgaggctgtcttgtgccgcctccggcagcatcttcggcttcaacgacatggcctggtatcggcaggctcccggaaaacagcgcgagctggtggctctgattagcagagtgggcgtgaccagcagcgccgactctgtgaagggcagattcacaatctccagagtgaacgccaaggatacagtgtacctccagatgaactctctgaaacctgaggatacagcagtgtactattgctacatggaccagcggctggacggcagcacactggcctactggggacagggaactcaagtgacagtgtctagcacgcgtatccagaaccctgatcctgccgtgtaccagctgcgggatagcaagagcagcgacaagagcgtgtgtctgttcaccgacttcgacagccagaccaacgtgtcccagagcaaggactccgacgtgtacatcaccgataagaccgtgctggacatgcggagcatggacttcaagagcaactccgccgtggcctggtccaacaagtccgatttcgcctgcgccaacgccttcaacaacagcattatccccgaggacacattcttcccaagccccgagagcagcgactccaccgaccacgtgaagcccaaagagacagagaacaccaagcagcccagcaagagctgccacaagcccaaggccatcgtgcacaccgagaaagtgaacatgatgagcctgaccgtgctgggcctgcggatgctgttcgccaaaaccgtggccgtgaacttcctgctgaccgccaagctgttcttcctccgcgccaagagaagcggatctggcgtgaagcagaccctgaatttcgacctgctgaagctggctggcgacgtggaatccaacccaggcccttctagaggccatatgaccgagtacaagcccacggtgcgcctcgccacccgcgacgacgtccccagggccgtacgcaccctcgccgccgcgttcgccgactaccccgccacgcgccacaccgtcgatccggaccgccacatcgagcgggtcaccgagctgcaagaactcttcctcacgcgcgtcgggctcgacatcggcaaggtgtgggtcgcggacgacggcgccgcggtggcggtctggaccacgccggagagcgtcgaagcgggggcggtgttcgccgagatcggcccgcgcatggccgagttgagcggttcccggctggccgcgcagcaacagatggaaggcctcctggcgccgcaccggcccaaggagcccgcgtggttcctggccaccgtcggcgtctcgcccgaccaccagggcaagggtctgggcagcgccgtcgtgctccccggagtggaggcggccgagcgcgccggggtgcccgccttcctggagacctccgcgccccgcaacctccccttctacgagcggctcggcttcaccgtcaccgccgacgtcgaggtgcccgaaggaccgcgcacctggtgcatgacccgcaagcccggtgcctga

SEQ ID NO: 17922 - DNA, 2769 bp, synthetic construct
  source 1..2769: mol_type = other DNA
atggccttaccagtgaccgccttgctcctgccgctggccttgctgctccacgccgccaggccgctcgaggaggaggacctgaagaacgtgttcccacctgaggtggccgtgttcgagcctagcgaggccgagatcagccacacccagaaagccaccctcgtgtgcctggctaccggcttctaccccgaccatgtggaactgtcttggtgggtcaacggcaaagaggtgcacagcggcgtgtctaccgacccccagccactgaaagaacagcccgccctgaacgacagccggtactgcctgagcagcagactgagagtgtccgccaccttctggcagaacccccggaaccacttcagatgccaggtgcagttctacggcctgagcgagaacgacgagtggacccaggacagagccaagcccgtgacccagatcgtgtctgccgaagcctggggcagagccgatgatgtgattaagatccactggcaggaaaagaagtccaacaccatcctgggcagccaggaaggcaacaccatgaagaccaacgacacctacatgaagttcagctggctgaccgtgcccgagaagtccctggacaaagaacacagatgcatcgtgcggcacgaaaacaacaagaacggcgtggaccaggaaatcatcttcccacccatcaagaccgatgtgattacaatggaccccaaggacaactgctccaaggacgccaacgataccctgctgctccagctgaccaacaccagcgcctactacatgtacttgttgctgctgctgaagtccgtggtgtacttcgccatcatcacatgctgcctgctgcggagaaccgccttctgctgcaacggcgagaagtctagggccaagcgatctggatctggagcaacaaacttctcactactcaaacaagcaggtgacgtggaggagaatcccgggcctactagcatggcccttccagtcactgccttgctgttgcctctggcgctcctgctccacgccgctagaccgggcatgagaaccgaggacctgcctaaggccgtggtgttcctggaaccccagtggtacagagtgctggaaaaggacagcgtgaccctgaagtgccagggcgcctacagccccgaggacaatagcacccagtggttccacaacgagagcctgatctccagccaggccagcagctacttcatcgacgccgccaccgtggacgacagcggcgagtatagatgccagaccaacctgagcaccctgagcgaccccgtgcagctggaagtgcacatcggatggctgctgctgcaggcccccagatgggtgttcaaagaagaggaccccatccacctgagatgccactcttggaagaacaccgccctgcacaaagtgacctacctgcagaacggcaagggcagaaagtacttccaccacaacagcgacttctacatccccaaggccaccctgaaggactccggctcctacttctgcagaggcctcgtgggcagcaagaacgtgtccagcgagacagtgaacatcaccatcacccagggcctggccgtgtctaccatcagcagctttttcccacccggctaccagacgcgtatccagaaccctgatcctgccgtgtaccagctgcgggatagcaagagcagcgacaagagcgtgtgtctgttcaccgacttcgacagccagaccaacgtgtcccagagcaaggactccgacgtgtacatcaccgataagaccgtgctggacatgcggagcatggacttcaagagcaactccgccgtggcctggtccaacaagtccgatttcgcctgcgccaacgccttcaacaacagcattatccccgaggacacattcttcccaagccccgagagcagcgactccaccgaccacgtgaagcccaaagagacagagaacaccaagcagcccagcaagagctgccacaagcccaaggccatcgtgcacaccgagaaagtgaacatgatgagcctgaccgtgctgggcctgcggatgctgttcgccaaaaccgtggccgtgaacttcctgctgaccgccaagctgttcttcctccgcgccaagagaagcggatctggcgtgaagcagaccctgaatttcgacctgctgaagctggctggcgacgtggaatccaacccaggcccttctagaggccatatgaccgagtacaagcccacggtgcgcctcgccacccgcgacgacgtccccagggccgtacgcaccctcgccgccgcgttcgccgactaccccgccacgcgccacaccgtcgatccggaccgccacatcgagcgggtcaccgagctgcaagaactcttcctcacgcgcgtcgggctcgacatcggcaaggtgtgggtcgcggacgacggcgccgcggtggcggtctggaccacgccggagagcgtcgaagcgggggcggtgttcgccgagatcggcccgcgcatggccgagttgagcggttcccggctggccgcgcagcaacagatggaaggcctcctggcgccgcaccggcccaaggagcccgcgtggttcctggccaccgtcggcgtctcgcccgaccaccagggcaagggtctgggcagcgccgtcgtgctccccggagtggaggcggccgagcgcgccggggtgcccgccttcctggagacctccgcgccccgcaacctccccttctacgagcggctcggcttcaccgtcaccgccgacgtcgaggtgcccgaaggaccgcgcacctggtgcatgacccgcaagcccggtgcctga

SEQ ID NO: 17923 - DNA, 1650 bp, synthetic construct
  source 1..1650: mol_type = other DNA
atggccttaccagtgaccgccttgctcctgccgctggccttgctgctccacgccgccaggccgctcgaggaggaggacctgaagaacgtgttcccacctgaggtggccgtgttcgagcctagcgaggccgagatcagccacacccagaaagccaccctcgtgtgcctggctaccggcttctaccccgaccatgtggaactgtcttggtgggtcaacggcaaagaggtgcacagcggcgtgtctaccgacccccagccactgaaagaacagcccgccctgaacgacagccggtactgcctgagcagcagactgagagtgtccgccaccttctggcagaacccccggaaccacttcagatgccaggtgcagttctacggcctgagcgagaacgacgagtggacccaggacagagccaagcccgtgacccagatcgtgtctgccgaagcctggggcagagccgatgatgtgattaagatccactggcaggaaaagaagtccaacaccatcctgggcagccaggaaggcaacaccatgaagaccaacgacacctacatgaagttcagctggctgaccgtgcccgagaagtccctggacaaagaacacagatgcatcgtgcggcacgaaaacaacaagaacggcgtggaccaggaaatcatcttcccacccatcaagaccgatgtgattacaatggaccccaaggacaactgctccaaggacgccaacgataccctgctgctccagctgaccaacaccagcgcctactacatgtacttgttgctgctgctgaagtccgtggtgtacttcgccatcatcacatgctgcctgctgcggagaaccgccttctgctgcaacggcgagaagtctagggccaagcgatctggatctggagcaacaaacttctcactactcaaacaagcaggtgacgtggaggagaatcccgggcctactagcgccaccatggccttaccagtgaccgccttgctcctgccgctggccttgctgctccacgccgccaggccgatggaccccgacctggaaatcagagccgccttcctgcggcagagaaacacagccctgagaacagaggtggccgagctggaacaagaggtgcagcggctggaaaacgaggtgtcccagtacgagacaagatacggccctctcggaggcggaaaaacgcgtatccagaaccctgatcctgccgtgtaccagctgcgggatagcaagagcagcgacaagagcgtgtgtctgttcaccgacttcgacagccagaccaacgtgtcccagagcaaggactccgacgtgtacatcaccgataagaccgtgctggacatgcggagcatggacttcaagagcaactccgccgtggcctggtccaacaagtccgatttcgcctgcgccaacgccttcaacaacagcattatccccgaggacacattcttcccaagccccgagagcagcgactccaccgaccacgtgaagcccaaagagacagagaacaccaagcagcccagcaagagctgccacaagcccaaggccatcgtgcacaccgagaaagtgaacatgatgagcctgaccgtgctgggcctgcggatgctgttcgccaaaaccgtggccgtgaacttcctgctgaccgccaagctgttcttcctc

SEQ ID NO: 17924 - DNA, 1650 bp, synthetic construct
  source 1..1650: mol_type = other DNA
atggccttaccagtgaccgccttgctcctgccgctggccttgctgctccacgccgccaggccgctcgaggaggaggacctgaagaacgtgttcccacctgaggtggccgtgttcgagcctagcgaggccgagatcagccacacccagaaagccaccctcgtgtgcctggctaccggcttctaccccgaccatgtggaactgtcttggtgggtcaacggcaaagaggtgcacagcggcgtgtctaccgacccccagccactgaaagaacagcccgccctgaacgacagccggtactgcctgagcagcagactgagagtgtccgccaccttctggcagaacccccggaaccacttcagatgccaggtgcagttctacggcctgagcgagaacgacgagtggacccaggacagagccaagcccgtgacccagatcgtgtctgccgaagcctggggcagagccgatgatgtgattaagatccactggcaggaaaagaagtccaacaccatcctgggcagccaggaaggcaacaccatgaagaccaacgacacctacatgaagttcagctggctgaccgtgcccgagaagtccctggacaaagaacacagatgcatcgtgcggcacgaaaacaacaagaacggcgtggaccaggaaatcatcttcccacccatcaagaccgatgtgattacaatggaccccaaggacaactgctccaaggacgccaacgataccctgctgctccagctgaccaacaccagcgcctactacatgtacttgttgctgctgctgaagtccgtggtgtacttcgccatcatcacatgctgcctgctgcggagaaccgccttctgctgcaacggcgagaagtctagggccaagcgatctggatctggagcaacaaacttctcactactcaaacaagcaggtgacgtggaggagaatcccgggcctactagcgccaccatggccttaccagtgaccgccttgctcctgccgctggccttgctgctccacgccgccaggccgatggaccctgatctcgaaattgaggccgcctttctggaacgcgagaacactgccctggaaaccagggtcgcagagctgagacagagagtgcagagactgcggaacagagtgtctcagtaccgcaccagatatggcccactcggcggaggtaaaacgcgtatccagaaccctgatcctgccgtgtaccagctgcgggatagcaagagcagcgacaagagcgtgtgtctgttcaccgacttcgacagccagaccaacgtgtcccagagcaaggactccgacgtgtacatcaccgataagaccgtgctggacatgcggagcatggacttcaagagcaactccgccgtggcctggtccaacaagtccgatttcgcctgcgccaacgccttcaacaacagcattatccccgaggacacattcttcccaagccccgagagcagcgactccaccgaccacgtgaagcccaaagagacagagaacaccaagcagcccagcaagagctgccacaagcccaaggccatcgtgcacaccgagaaagtgaacatgatgagcctgaccgtgctgggcctgcggatgctgttcgccaaaaccgtggccgtgaacttcctgctgaccgccaagctgttcttcctc

SEQ ID NO: 17925 - DNA, 1581 bp, synthetic construct
  source 1..1581: mol_type = other DNA
atggccttaccagtgaccgccttgctcctgccgctggccttgctgctccacgccgccaggccgctcgaggaggaggacctgaagaacgtgttcccacctgaggtggccgtgttcgagcctagcgaggccgagatcagccacacccagaaagccaccctcgtgtgcctggctaccggcttctaccccgaccatgtggaactgtcttggtgggtcaacggcaaagaggtgcacagcggcgtgtctaccgacccccagccactgaaagaacagcccgccctgaacgacagccggtactgcctgagcagcagactgagagtgtccgccaccttctggcagaacccccggaaccacttcagatgccaggtgcagttctacggcctgagcgagaacgacgagtggacccaggacagagccaagcccgtgacccagatcgtgtctgccgaagcctggggcagagccgatgatgtgattaagatccactggcaggaaaagaagtccaacaccatcctgggcagccaggaaggcaacaccatgaagaccaacgacacctacatgaagttcagctggctgaccgtgcccgagaagtccctggacaaagaacacagatgcatcgtgcggcacgaaaacaacaagaacggcgtggaccaggaaatcatcttcccacccatcaagaccgatgtgattacaatggaccccaaggacaactgctccaaggacgccaacgataccctgctgctccagctgaccaacaccagcgcctactacatgtacttgttgctgctgctgaagtccgtggtgtacttcgccatcatcacatgctgcctgctgcggagaaccgccttctgctgcaacggcgagaagtctagggccaagcgatctggatctggagcaacaaacttctcactactcaaacaagcaggtgacgtggaggagaatcccgggcctactagcgccaccatggccttaccagtgaccgccttgctcctgccgctggccttgctgctccacgccgccaggccggaagttgctgccctcgagaaggaggtagcagctttggaaaaagaagtcgcagcccttgagaaagaagttgcggctctggagaagacgcgtatccagaaccctgatcctgccgtgtaccagctgcgggatagcaagagcagcgacaagagcgtgtgtctgttcaccgacttcgacagccagaccaacgtgtcccagagcaaggactccgacgtgtacatcaccgataagaccgtgctggacatgcggagcatggacttcaagagcaactccgccgtggcctggtccaacaagtccgatttcgcctgcgccaacgccttcaacaacagcattatccccgaggacacattcttcccaagccccgagagcagcgactccaccgaccacgtgaagcccaaagagacagagaacaccaagcagcccagcaagagctgccacaagcccaaggccatcgtgcacaccgagaaagtgaacatgatgagcctgaccgtgctgggcctgcggatgctgttcgccaaaaccgtggccgtgaacttcctgctgaccgccaagctgttcttcctc

SEQ ID NO: 17926 - DNA, 2355 bp, synthetic construct
  source 1..2355: mol_type = other DNA
atggccttaccagtgaccgccttgctcctgccgctggccttgctgctccacgccgccaggccgctcgaggaggaggacctgaagaacgtgttcccacctgaggtggccgtgttcgagcctagcgaggccgagatcagccacacccagaaagccaccctcgtgtgcctggctaccggcttctaccccgaccatgtggaactgtcttggtgggtcaacggcaaagaggtgcacagcggcgtgtctaccgacccccagccactgaaagaacagcccgccctgaacgacagccggtactgcctgagcagcagactgagagtgtccgccaccttctggcagaacccccggaaccacttcagatgccaggtgcagttctacggcctgagcgagaacgacgagtggacccaggacagagccaagcccgtgacccagatcgtgtctgccgaagcctggggcagagccgatgatgtgattaagatccactggcaggaaaagaagtccaacaccatcctgggcagccaggaaggcaacaccatgaagaccaacgacacctacatgaagttcagctggctgaccgtgcccgagaagtccctggacaaagaacacagatgcatcgtgcggcacgaaaacaacaagaacggcgtggaccaggaaatcatcttcccacccatcaagaccgatgtgattacaatggaccccaaggacaactgctccaaggacgccaacgataccctgctgctccagctgaccaacaccagcgcctactacatgtacttgttgctgctgctgaagtccgtggtgtacttcgccatcatcacatgctgcctgctgcggagaaccgccttctgctgcaacggcgagaagtctagggccaagcgatctggatctggagcaacaaacttctcactactcaaacaagcaggtgacgtggaggagaatcccgggcctactagcgccaccatggccttaccagtgaccgccttgctcctgccgctggccttgctgctccacgccgccaggccgctgttcaatcaagaggtgcagatccctctgaccgagagctactgtggcccctgtcctaagaactggatctgctacaagaacaactgctaccagttcttcgacgagagcaagaattggtacgagagccaggccagctgcatgagccagaatgccagcctgctgaaggtgtacagcaaagaggaccaggacctgctgaaactggtcaagagcgcccactggatgggccttgtgcacatccccaccaatggctcttggcagtgggaggacggcagcattctgagccctaacctgctgaccatcatcgagatgcagaagggcgactgcgccctgtacgccagcagctttaagggctacatcgagaattgcagcaccccgaacacctacatctgtatgcagagaaccgtttctggcggaggcggctctggaggaggcggaagtggcggcggaggcgacctctttaatcaagaagtccagattccactcaccgaatcctactgcggaccttgtccaaaaaattggatttgttataagaacaactgttatcaattctttgatgagtctaaaaattggtatgagtcccaggcttcctgcatgtctcagaacgcttctctgctgaaagtctactctaaagaagatcaggatctcctgaagctcgtcaagtctgcccattggatggggctcgtccacattcctaccaacggaagctggcaatgggaagatggctccatcctgtctccaaatctgctcacgattattgaaatgcagaaaggggattgtgctctctacgccagctccttcaagggatatattgagaactgtagcacgcccaatacttatatctgtatgcaacggaccgtgacgcgtatccagaaccctgatcctgccgtgtaccagctgcgggatagcaagagcagcgacaagagcgtgtgtctgttcaccgacttcgacagccagaccaacgtgtcccagagcaaggactccgacgtgtacatcaccgataagaccgtgctggacatgcggagcatggacttcaagagcaactccgccgtggcctggtccaacaagtccgatttcgcctgcgccaacgccttcaacaacagcattatccccgaggacacattcttcccaagccccgagagcagcgactccaccgaccacgtgaagcccaaagagacagagaacaccaagcagcccagcaagagctgccacaagcccaaggccatcgtgcacaccgagaaagtgaacatgatgagcctgaccgtgctgggcctgcggatgctgttcgccaaaaccgtggccgtgaacttcctgctgaccgccaagctgttcttcctc

SEQ ID NO: 17927 - DNA, 2355 bp, synthetic construct
  source 1..2355: mol_type = other DNA
atggccttaccagtgaccgccttgctcctgccgctggccttgctgctccacgccgccaggccgctcgaggaggaggacctgaagaacgtgttcccacctgaggtggccgtgttcgagcctagcgaggccgagatcagccacacccagaaagccaccctcgtgtgcctggctaccggcttctaccccgaccatgtggaactgtcttggtgggtcaacggcaaagaggtgcacagcggcgtgtctaccgacccccagccactgaaagaacagcccgccctgaacgacagccggtactgcctgagcagcagactgagagtgtccgccaccttctggcagaacccccggaaccacttcagatgccaggtgcagttctacggcctgagcgagaacgacgagtggacccaggacagagccaagcccgtgacccagatcgtgtctgccgaagcctggggcagagccgatgatgtgattaagatccactggcaggaaaagaagtccaacaccatcctgggcagccaggaaggcaacaccatgaagaccaacgacacctacatgaagttcagctggctgaccgtgcccgagaagtccctggacaaagaacacagatgcatcgtgcggcacgaaaacaacaagaacggcgtggaccaggaaatcatcttcccacccatcaagaccgatgtgattacaatggaccccaaggacaactgctccaaggacgccaacgataccctgctgctccagctgaccaacaccagcgcctactacatgtacttgttgctgctgctgaagtccgtggtgtacttcgccatcatcacatgctgcctgctgcggagaaccgccttctgctgcaacggcgagaagtctagggccaagcgatctggatctggagcaacaaacttctcactactcaaacaagcaggtgacgtggaggagaatcccgggcctactagcgccaccatggccttaccagtgaccgccttgctcctgccgctggccttgctgctccacgccgccaggccgctgttcaatcaagaggtgcagatccctctgaccgagagctactgtggcccctgtcctaagaactggatctgctacaagaacaactgctaccagttcttcgacgagagcaagaattggtacgagagccaggccagctgcatgagccagaatgccagcctgctgaaggtgtacagcaaagaggaccaggacctgctgaaactggtcaagagcgcccactggatgggccttgtgcacatccccaccaatggctcttggcagtgggaggacggcagcattctgagccctaacctgctgaccatcatcgagatgcagaagggcgactgcgccctgtacgccagcagctttaagggcttcatcgagaattgcagcaccccgaacacctacatctgtatgcagagaaccgttggcggaggcggaagtggaggcggaggatctggcggcggaggctctgacctctttaatcaagaagtccagattccactcaccgaatcctactgcggaccttgtccaaaaaattggatttgttataagaacaactgttatcaattctttgatgagtctaaaaattggtatgagtcccaggcttcctgcatgtctcagaacgcttctctgctgaaagtctactctaaagaagatcaggatctcctgaagctcgtcaagtctgcccattggatggggctcgtccacattcctaccaacggaagctggcaatgggaagatggctccatcctgtctccaaatctgctcacgattattgaaatgcagaaaggggattgtgctctctacgccagctccttcaagggatttattgagaactgtagcacgcccaatacttatatctgtatgcaacggaccgtgacgcgtatccagaaccctgatcctgccgtgtaccagctgcgggatagcaagagcagcgacaagagcgtgtgtctgttcaccgacttcgacagccagaccaacgtgtcccagagcaaggactccgacgtgtacatcaccgataagaccgtgctggacatgcggagcatggacttcaagagcaactccgccgtggcctggtccaacaagtccgatttcgcctgcgccaacgccttcaacaacagcattatccccgaggacacattcttcccaagccccgagagcagcgactccaccgaccacgtgaagcccaaagagacagagaacaccaagcagcccagcaagagctgccacaagcccaaggccatcgtgcacaccgagaaagtgaacatgatgagcctgaccgtgctgggcctgcggatgctgttcgccaaaaccgtggccgtgaacttcctgctgaccgccaagctgttcttcctc

SEQ ID NO: 17928 - DNA, 2433 bp, synthetic construct
  source 1..2433: mol_type = other DNA
atggccttaccagtgaccgccttgctcctgccgctggccttgctgctccacgccgccaggccgctcgaggaggaggacctgaagaacgtgttcccacctgaggtggccgtgttcgagcctagcgaggccgagatcagccacacccagaaagccaccctcgtgtgcctggctaccggcttctaccccgaccatgtggaactgtcttggtgggtcaacggcaaagaggtgcacagcggcgtgtctaccgacccccagccactgaaagaacagcccgccctgaacgacagccggtactgcctgagcagcagactgagagtgtccgccaccttctggcagaacccccggaaccacttcagatgccaggtgcagttctacggcctgagcgagaacgacgagtggacccaggacagagccaagcccgtgacccagatcgtgtctgccgaagcctggggcagagccgatgatgtgattaagatccactggcaggaaaagaagtccaacaccatcctgggcagccaggaaggcaacaccatgaagaccaacgacacctacatgaagttcagctggctgaccgtgcccgagaagtccctggacaaagaacacagatgcatcgtgcggcacgaaaacaacaagaacggcgtggaccaggaaatcatcttcccacccatcaagaccgatgtgattacaatggaccccaaggacaactgctccaaggacgccaacgataccctgctgctccagctgaccaacaccagcgcctactacatgtacttgttgctgctgctgaagtccgtggtgtacttcgccatcatcacatgctgcctgctgcggagaaccgccttctgctgcaacggcgagaagtctagggccaagcgatctggatctggagcaacaaacttctcactactcaaacaagcaggtgacgtggaggagaatcccgggcctactagcatggccttaccagtgaccgccttgctcctgccgctggccttgctgctccacgccgccaggccgatggaccccgacctggaaatcagagccgccttcctgcggcagagaaacacagccctgagaacagaggtggccgagctggaacaagaggtgcagcggctggaaaacgaggtgtcccagtacgagacaagatacggccctctcggaggcggaaaaggtaccggcggaggcggatctggcggcggaggtagcggtggcggaggatctgaattcgacatccagatgacacagagccctagcagcctgtctgccagcgtgggagacagagtgaccatcacatgcaaggccagcgaccacatcaacaactggctggcctggtatcagcagaagcctggacaggcccctaagctgctgatctacggcgctaccacactggaaacaggcgtgcccagcagattttctggcagcggctctggcaccgactacaccctgacaatatccagcctccagcctgaggacttcgccacctactactgtcagcagagctggaacaccccttggacattcggccagggcaccaagctggaaatcaagagaggcggaggcggaagtggaggcggaggatctggcggcggaggctctcaagttcagcttcaacagcctggcgctgagctggtcaaacctggcgcttctgtgaagatgagctgcaaagccagcggctacgccttcagcagctactggatcaactggatgaagcagaaacccggccagggactcgaatggatcggccaaatctatcccggcgacggcgacaccaactacaacggcaagttcaagggcagagccacactgaccgccgatacctctagcagcacagcctacatgcagctgagcagcctgaccagcgaagatagcgccgtgtacttctgtgcccggtccatcacaacagtcgtgggctgcgctatggactattggggccagggaacaagcgtgaccgtgtctagtacgcgtatccagaaccctgatcctgccgtgtaccagctgcgggatagcaagagcagcgacaagagcgtgtgtctgttcaccgacttcgacagccagaccaacgtgtcccagagcaaggactccgacgtgtacatcaccgataagaccgtgctggacatgcggagcatggacttcaagagcaactccgccgtggcctggtccaacaagtccgatttcgcctgcgccaacgccttcaacaacagcattatccccgaggacacattcttcccaagccccgagagcagcgactccaccgaccacgtgaagcccaaagagacagagaacaccaagcagcccagcaagagctgccacaagcccaaggccatcgtgcacaccgagaaagtgaacatgatgagcctgaccgtgctgggcctgcggatgctgttcgccaaaaccgtggccgtgaacttcctgctgaccgccaagctgttcttcctc

SEQ ID NO: 17929 - DNA, 3138 bp, synthetic construct
  source 1..3138: mol_type = other DNA
atggccttaccagtgaccgccttgctcctgccgctggccttgctgctccacgccgccaggccgctcgaggaggaggacctgaagaacgtgttcccacctgaggtggccgtgttcgagcctagcgaggccgagatcagccacacccagaaagccaccctcgtgtgcctggctaccggcttctaccccgaccatgtggaactgtcttggtgggtcaacggcaaagaggtgcacagcggcgtgtctaccgacccccagccactgaaagaacagcccgccctgaacgacagccggtactgcctgagcagcagactgagagtgtccgccaccttctggcagaacccccggaaccacttcagatgccaggtgcagttctacggcctgagcgagaacgacgagtggacccaggacagagccaagcccgtgacccagatcgtgtctgccgaagcctggggcagagccgatgatgtgattaagatccactggcaggaaaagaagtccaacaccatcctgggcagccaggaaggcaacaccatgaagaccaacgacacctacatgaagttcagctggctgaccgtgcccgagaagtccctggacaaagaacacagatgcatcgtgcggcacgaaaacaacaagaacggcgtggaccaggaaatcatcttcccacccatcaagaccgatgtgattacaatggaccccaaggacaactgctccaaggacgccaacgataccctgctgctccagctgaccaacaccagcgcctactacatgtacttgttgctgctgctgaagtccgtggtgtacttcgccatcatcacatgctgcctgctgcggagaaccgccttctgctgcaacggcgagaagtctagggccaagcgatctggatctggagcaacaaacttctcactactcaaacaagcaggtgacgtggaggagaatcccgggcctactagcatggccttaccagtgaccgccttgctcctgccgctggccttgctgctccacgccgccaggccgctgttcaatcaagaggtgcagatccctctgaccgagagctactgtggcccctgtcctaagaactggatctgctacaagaacaactgctaccagttcttcgacgagagcaagaattggtacgagagccaggccagctgcatgagccagaatgccagcctgctgaaggtgtacagcaaagaggaccaggacctgctgaaactggtcaagagcgcccactggatgggccttgtgcacatccccaccaatggctcttggcagtgggaggacggcagcattctgagccctaacctgctgaccatcatcgagatgcagaagggcgactgcgccctgtacgccagcagctttaagggcttcatcgagaattgcagcaccccgaacacctacatctgtatgcagagaaccgttggcggaggcggaagtggaggcggaggatctggcggcggaggctctgacctctttaatcaagaagtccagattccactcaccgaatcctactgcggaccttgtccaaaaaattggatttgttataagaacaactgttatcaattctttgatgagtctaaaaattggtatgagtcccaggcttcctgcatgtctcagaacgcttctctgctgaaagtctactctaaagaagatcaggatctcctgaagctcgtcaagtctgcccattggatggggctcgtccacattcctaccaacggaagctggcaatgggaagatggctccatcctgtctccaaatctgctcacgattattgaaatgcagaaaggggattgtgctctctacgccagctccttcaagggatttattgagaactgtagcacgcccaatacttatatctgtatgcaacggaccgtgggtaccggcggaggcggatctggcggcggaggtagcggtggcggaggatctgaattcgacatccagatgacacagagccctagcagcctgtctgccagcgtgggagacagagtgaccatcacatgcaaggccagcgaccacatcaacaactggctggcctggtatcagcagaagcctggacaggcccctaagctgctgatctacggcgctaccacactggaaacaggcgtgcccagcagattttctggcagcggctctggcaccgactacaccctgacaatatccagcctccagcctgaggacttcgccacctactactgtcagcagagctggaacaccccttggacattcggccagggcaccaagctggaaatcaagagaggcggaggcggaagtggaggcggaggatctggcggcggaggctctcaagttcagcttcaacagcctggcgctgagctggtcaaacctggcgcttctgtgaagatgagctgcaaagccagcggctacgccttcagcagctactggatcaactggatgaagcagaaacccggccagggactcgaatggatcggccaaatctatcccggcgacggcgacaccaactacaacggcaagttcaagggcagagccacactgaccgccgatacctctagcagcacagcctacatgcagctgagcagcctgaccagcgaagatagcgccgtgtacttctgtgcccggtccatcacaacagtcgtgggctgcgctatggactattggggccagggaacaagcgtgaccgtgtctagtacgcgtatccagaaccctgatcctgccgtgtaccagctgcgggatagcaagagcagcgacaagagcgtgtgtctgttcaccgacttcgacagccagaccaacgtgtcccagagcaaggactccgacgtgtacatcaccgataagaccgtgctggacatgcggagcatggacttcaagagcaactccgccgtggcctggtccaacaagtccgatttcgcctgcgccaacgccttcaacaacagcattatccccgaggacacattcttcccaagccccgagagcagcgactccaccgaccacgtgaagcccaaagagacagagaacaccaagcagcccagcaagagctgccacaagcccaaggccatcgtgcacaccgagaaagtgaacatgatgagcctgaccgtgctgggcctgcggatgctgttcgccaaaaccgtggccgtgaacttcctgctgaccgccaagctgttcttcctc

SEQ ID NO: 17930 - DNA, 2253 bp, synthetic construct
  source 1..2253: mol_type = other DNA
atggccttaccagtgaccgccttgctcctgccgctggccttgctgctccacgccgccaggccgctcgaggaggaggacctgaagaacgtgttcccacctgaggtggccgtgttcgagcctagcgaggccgagatcagccacacccagaaagccaccctcgtgtgcctggctaccggcttctaccccgaccatgtggaactgtcttggtgggtcaacggcaaagaggtgcacagcggcgtgtctaccgacccccagccactgaaagaacagcccgccctgaacgacagccggtactgcctgagcagcagactgagagtgtccgccaccttctggcagaacccccggaaccacttcagatgccaggtgcagttctacggcctgagcgagaacgacgagtggacccaggacagagccaagcccgtgacccagatcgtgtctgccgaagcctggggcagagccgatgatgtgattaagatccactggcaggaaaagaagtccaacaccatcctgggcagccaggaaggcaacaccatgaagaccaacgacacctacatgaagttcagctggctgaccgtgcccgagaagtccctggacaaagaacacagatgcatcgtgcggcacgaaaacaacaagaacggcgtggaccaggaaatcatcttcccacccatcaagaccgatgtgattacaatggaccccaaggacaactgctccaaggacgccaacgataccctgctgctccagctgaccaacaccagcgcctactacatgtacttgttgctgctgctgaagtccgtggtgtacttcgccatcatcacatgctgcctgctgcggagaaccgccttctgctgcaacggcgagaagtctagggccaagcgatctggatctggagcaacaaacttctcactactcaaacaagcaggtgacgtggaggagaatcccgggcctactagcatggccttaccagtgaccgccttgctcctgccgctggccttgctgctccacgccgccaggccgcagtctgtgctgacacagcctcctagtgtgtctggcgctcctggacagagagtgaccatctcttgtaccggcagcagcagcaatatcggagccggctatgacgtgcactggtatcagcagctccctggcacagcccctaaactgctgatcttcggcaacagcaacagacccagcggcgtgcccgatagattcagcggctttaagagcggcacaagcgccagcctggctatcactggactgcaagccgaggacgaggccgactacttctgccagagctacgatagcagcctgagcggcagcggagtgtttggcacaggcaccaaagtgacagtgcttggcggcggaggcggaagtggaggcggaggatctggcggcggaggctctcaaatgcaactggttcaaagcggcggtggcctggtgcaacctggaagaagtctgagactgagctgtgccgccagcggcttcaccttcgatgattacgccatgcactgggtccgacaggcccctggaaaaggactggaatgggtgtccggcatctcctggaatagcggctctatcggctacgccgacagcgtgaagggcagattcaccatcagccgggacaacgccaagaacagcctgtacctccagatgaactccctgagagccgaggatacagccctgtactactgcgccaaggacatccacagcggcagctactacggcctgctgtactacgctatggacgtgtggggccagggcacaaccgtgacagtttcttctacgcgtatccagaaccctgatcctgccgtgtaccagctgcgggatagcaagagcagcgacaagagcgtgtgtctgttcaccgacttcgacagccagaccaacgtgtcccagagcaaggactccgacgtgtacatcaccgataagaccgtgctggacatgcggagcatggacttcaagagcaactccgccgtggcctggtccaacaagtccgatttcgcctgcgccaacgccttcaacaacagcattatccccgaggacacattcttcccaagccccgagagcagcgactccaccgaccacgtgaagcccaaagagacagagaacaccaagcagcccagcaagagctgccacaagcccaaggccatcgtgcacaccgagaaagtgaacatgatgagcctgaccgtgctgggcctgcggatgctgttcgccaaaaccgtggccgtgaacttcctgctgaccgccaagctgttcttcctc

SEQ ID NO: 17931 - DNA, 1764 bp, synthetic construct
  source 1..1764: mol_type = other DNA
atggccttaccagtgaccgccttgctcctgccgctggccttgctgctccacgccgccaggccgctcgaggaggaggacctgaagaacgtgttcccacctgaggtggccgtgttcgagcctagcgaggccgagatcagccacacccagaaagccaccctcgtgtgcctggctaccggcttctaccccgaccatgtggaactgtcttggtgggtcaacggcaaagaggtgcacagcggcgtgtctaccgacccccagccactgaaagaacagcccgccctgaacgacagccggtactgcctgagcagcagactgagagtgtccgccaccttctggcagaacccccggaaccacttcagatgccaggtgcagttctacggcctgagcgagaacgacgagtggacccaggacagagccaagcccgtgacccagatcgtgtctgccgaagcctggggcagagccgatgatgtgattaagatccactggcaggaaaagaagtccaacaccatcctgggcagccaggaaggcaacaccatgaagaccaacgacacctacatgaagttcagctggctgaccgtgcccgagaagtccctggacaaagaacacagatgcatcgtgcggcacgaaaacaacaagaacggcgtggaccaggaaatcatcttcccacccatcaagaccgatgtgattacaatggaccccaaggacaactgctccaaggacgccaacgataccctgctgctccagctgaccaacaccagcgcctactacatgtacttgttgctgctgctgaagtccgtggtgtacttcgccatcatcacatgctgcctgctgcggagaaccgccttctgctgcaacggcgagaagtctagggccaagcgatctggatctggagcaacaaacttctcactactcaaacaagcaggtgacgtggaggagaatcccgggcctactagcatggccttaccagtgaccgccttgctcctgccgctggccttgctgctccacgccgccaggccgatgtgtatgccctgcttcaccaccgaccatcagatggcccggaagtgcgacgattgctgtggcggaaaaggcagaggcaagtgctacggccctcagtgcttgtgtagactcgagggcggaggcggaagtggaggcggaggatctggcggcggaggctctttcgaagtgtgtatgccttgttttaccacggatcaacaaatggctcgcaagtgttctgactgctgcggaggcaaaggccggggaaagtgttatggcccacagtgtctgtgccggacgcgtatccagaaccctgatcctgccgtgtaccagctgcgggatagcaagagcagcgacaagagcgtgtgtctgttcaccgacttcgacagccagaccaacgtgtcccagagcaaggactccgacgtgtacatcaccgataagaccgtgctggacatgcggagcatggacttcaagagcaactccgccgtggcctggtccaacaagtccgatttcgcctgcgccaacgccttcaacaacagcattatccccgaggacacattcttcccaagccccgagagcagcgactccaccgaccacgtgaagcccaaagagacagagaacaccaagcagcccagcaagagctgccacaagcccaaggccatcgtgcacaccgagaaagtgaacatgatgagcctgaccgtgctgggcctgcggatgctgttcgccaaaaccgtggccgtgaacttcctgctgaccgccaagctgttcttcctc

SEQ ID NO: 17932 - DNA, 2553 bp, synthetic construct
  source 1..2553: mol_type = other DNA
atggccttaccagtgaccgccttgctcctgccgctggccttgctgctccacgccgccaggccgctcgaggaggaggacctgaagaacgtgttcccacctgaggtggccgtgttcgagcctagcgaggccgagatcagccacacccagaaagccaccctcgtgtgcctggctaccggcttctaccccgaccatgtggaactgtcttggtgggtcaacggcaaagaggtgcacagcggcgtgtctaccgacccccagccactgaaagaacagcccgccctgaacgacagccggtactgcctgagcagcagactgagagtgtccgccaccttctggcagaacccccggaaccacttcagatgccaggtgcagttctacggcctgagcgagaacgacgagtggacccaggacagagccaagcccgtgacccagatcgtgtctgccgaagcctggggcagagccgatgatgtgattaagatccactggcaggaaaagaagtccaacaccatcctgggcagccaggaaggcaacaccatgaagaccaacgacacctacatgaagttcagctggctgaccgtgcccgagaagtccctggacaaagaacacagatgcatcgtgcggcacgaaaacaacaagaacggcgtggaccaggaaatcatcttcccacccatcaagaccgatgtgattacaatggaccccaaggacaactgctccaaggacgccaacgataccctgctgctccagctgaccaacaccagcgcctactacatgtacttgttgctgctgctgaagtccgtggtgtacttcgccatcatcacatgctgcctgctgcggagaaccgccttctgctgcaacggcgagaagtctagggccaagcgatctggatctggagcaacaaacttctcactactcaaacaagcaggtgacgtggaggagaatcccgggcctactagcatggccttaccagtgaccgccttgctcctgccgctggccttgctgctccacgccgccaggccgatgtgtatgccctgcttcaccaccgaccatcagatggcccggaagtgcgacgattgctgtggcggaaaaggcagaggcaagtgctacggccctcagtgcttgtgtagactcgagggcggaggcggaagtggaggcggaggatctggcggcggaggctctttcgaagtgtgtatgccttgttttaccacggatcaacaaatggctcgcaagtgttctgactgctgcggaggcaaaggccggggaaagtgttatggcccacagtgtctgtgccggggtaccggcggaggcggatctggcggcggaggtagcggtggcggaggatctgaattcgacatccagatgacacagagccctagcagcctgtctgccagcgtgggagacagagtgaccatcacatgcaaggccagcgaccacatcaacaactggctggcctggtatcagcagaagcctggacaggcccctaagctgctgatctacggcgctaccacactggaaacaggcgtgcccagcagattttctggcagcggctctggcaccgactacaccctgacaatatccagcctccagcctgaggacttcgccacctactactgtcagcagagctggaacaccccttggacattcggccagggcaccaagctggaaatcaagagaggcggaggcggaagtggaggcggaggatctggcggcggaggctctcaagttcagcttcaacagcctggcgctgagctggtcaaacctggcgcttctgtgaagatgagctgcaaagccagcggctacgccttcagcagctactggatcaactggatgaagcagaaacccggccagggactcgaatggatcggccaaatctatcccggcgacggcgacaccaactacaacggcaagttcaagggcagagccacactgaccgccgatacctctagcagcacagcctacatgcagctgagcagcctgaccagcgaagatagcgccgtgtacttctgtgcccggtccatcacaacagtcgtgggctgcgctatggactattggggccagggaacaagcgtgaccgtgtctagtacgcgtatccagaaccctgatcctgccgtgtaccagctgcgggatagcaagagcagcgacaagagcgtgtgtctgttcaccgacttcgacagccagaccaacgtgtcccagagcaaggactccgacgtgtacatcaccgataagaccgtgctggacatgcggagcatggacttcaagagcaactccgccgtggcctggtccaacaagtccgatttcgcctgcgccaacgccttcaacaacagcattatccccgaggacacattcttcccaagccccgagagcagcgactccaccgaccacgtgaagcccaaagagacagagaacaccaagcagcccagcaagagctgccacaagcccaaggccatcgtgcacaccgagaaagtgaacatgatgagcctgaccgtgctgggcctgcggatgctgttcgccaaaaccgtggccgtgaacttcctgctgaccgccaagctgttcttcctc

SEQ ID NO: 17933 - DNA, 2778 bp, synthetic construct
  source 1..2778: mol_type = other DNA
atggccttaccagtgaccgccttgctcctgccgctggccttgctgctccacgccgccaggccgctcgaggaggaggacctgaagaacgtgttcccacctgaggtggccgtgttcgagcctagcgaggccgagatcagccacacccagaaagccaccctcgtgtgcctggctaccggcttctaccccgaccatgtggaactgtcttggtgggtcaacggcaaagaggtgcacagcggcgtgtctaccgacccccagccactgaaagaacagcccgccctgaacgacagccggtactgcctgagcagcagactgagagtgtccgccaccttctggcagaacccccggaaccacttcagatgccaggtgcagttctacggcctgagcgagaacgacgagtggacccaggacagagccaagcccgtgacccagatcgtgtctgccgaagcctggggcagagccgatgatgtgattaagatccactggcaggaaaagaagtccaacaccatcctgggcagccaggaaggcaacaccatgaagaccaacgacacctacatgaagttcagctggctgaccgtgcccgagaagtccctggacaaagaacacagatgcatcgtgcggcacgaaaacaacaagaacggcgtggaccaggaaatcatcttcccacccatcaagaccgatgtgattacaatggaccccaaggacaactgctccaaggacgccaacgataccctgctgctccagctgaccaacaccagcgcctactacatgtacttgttgctgctgctgaagtccgtggtgtacttcgccatcatcacatgctgcctgctgcggagaaccgccttctgctgcaacggcgagaagtctagggccaagcgatctggatctggagcaacaaacttctcactactcaaacaagcaggtgacgtggaggagaatcccgggcctactagcatggccttaccagtgaccgccttgctcctgccgctggccttgctgctccacgccgccaggccgagccccgtagctcctgcctgtgaccccagactcctaaataaactgctgcgtgactcccacctccttcacagccgactgagtcagtgtcccgacgtggaccctttgtctatccctgttctgctgcctgctgtggactttagcctgggagaatggaaaacccagacggaacagagcaaggcacaggacattctaggggcagtgtcccttctactggagggagtgatggcagcacgaggacagttggaaccctcctgcctctcatccctcctgggacagctttctgggcaggttcgcctcctcttgggggccctgcagggcctcctaggaacccagcttcctctacagggcaggaccacagctcacaaggaccccaatgccctcttcttgagcttgcaacaactgcttcggggaaaggtgcgcttcctgcttctggtagaaggtcccaccctctgtgtcagacggaccctgccaaccacagctgtcccaagcagtacttctggtaccggcggaggcggatctggcggcggaggtagcggtggcggaggatctgaattcgacatccagatgacacagagccctagcagcctgtctgccagcgtgggagacagagtgaccatcacatgcaaggccagcgaccacatcaacaactggctggcctggtatcagcagaagcctggacaggcccctaagctgctgatctacggcgctaccacactggaaacaggcgtgcccagcagattttctggcagcggctctggcaccgactacaccctgacaatatccagcctccagcctgaggacttcgccacctactactgtcagcagagctggaacaccccttggacattcggccagggcaccaagctggaaatcaagagaggcggaggcggaagtggaggcggaggatctggcggcggaggctctcaagttcagcttcaacagcctggcgctgagctggtcaaacctggcgcttctgtgaagatgagctgcaaagccagcggctacgccttcagcagctactggatcaactggatgaagcagaaacccggccagggactcgaatggatcggccaaatctatcccggcgacggcgacaccaactacaacggcaagttcaagggcagagccacactgaccgccgatacctctagcagcacagcctacatgcagctgagcagcctgaccagcgaagatagcgccgtgtacttctgtgcccggtccatcacaacagtcgtgggctgcgctatggactattggggccagggaacaagcgtgaccgtgtctagtacgcgtatccagaaccctgatcctgccgtgtaccagctgcgggatagcaagagcagcgacaagagcgtgtgtctgttcaccgacttcgacagccagaccaacgtgtcccagagcaaggactccgacgtgtacatcaccgataagaccgtgctggacatgcggagcatggacttcaagagcaactccgccgtggcctggtccaacaagtccgatttcgcctgcgccaacgccttcaacaacagcattatccccgaggacacattcttcccaagccccgagagcagcgactccaccgaccacgtgaagcccaaagagacagagaacaccaagcagcccagcaagagctgccacaagcccaaggccatcgtgcacaccgagaaagtgaacatgatgagcctgaccgtgctgggcctgcggatgctgttcgccaaaaccgtggccgtgaacttcctgctgaccgccaagctgttcttcctc

SEQ ID NO: 17934 - DNA, 2499 bp, synthetic construct
  source 1..2499: mol_type = other DNA
atggccttaccagtgaccgccttgctcctgccgctggccttgctgctccacgccgccaggccgctcgaggaggaggacctgaagaacgtgttcccacctgaggtggccgtgttcgagcctagcgaggccgagatcagccacacccagaaagccaccctcgtgtgcctggctaccggcttctaccccgaccatgtggaactgtcttggtgggtcaacggcaaagaggtgcacagcggcgtgtctaccgacccccagccactgaaagaacagcccgccctgaacgacagccggtactgcctgagcagcagactgagagtgtccgccaccttctggcagaacccccggaaccacttcagatgccaggtgcagttctacggcctgagcgagaacgacgagtggacccaggacagagccaagcccgtgacccagatcgtgtctgccgaagcctggggcagagccgatgatgtgattaagatccactggcaggaaaagaagtccaacaccatcctgggcagccaggaaggcaacaccatgaagaccaacgacacctacatgaagttcagctggctgaccgtgcccgagaagtccctggacaaagaacacagatgcatcgtgcggcacgaaaacaacaagaacggcgtggaccaggaaatcatcttcccacccatcaagaccgatgtgattacaatggaccccaaggacaactgctccaaggacgccaacgataccctgctgctccagctgaccaacaccagcgcctactacatgtacttgttgctgctgctgaagtccgtggtgtacttcgccatcatcacatgctgcctgctgcggagaaccgccttctgctgcaacggcgagaagtctagggccaagcgatctggatctggagcaacaaacttctcactactcaaacaagcaggtgacgtggaggagaatcccgggcctactagcatggccttaccagtgaccgccttgctcctgccgctggccttgctgctccacgccgccaggccgatgggcagctgggaagagttcgagctgagactgaacgccatcgaggaacggctgtatgccctcggaggatctgaagccgagctggcctacttcgagtacgtgatcgccgacttcgagggcaacctgcagcggtacaaaggcaagggcaaccctgaagtggaagccctgtacttcgaggccgacgccatcttcgaggaactggtggcctacagacacaacggtaccggcggaggcggatctggcggcggaggtagcggtggcggaggatctgaattcgacatccagatgacacagagccctagcagcctgtctgccagcgtgggagacagagtgaccatcacatgcaaggccagcgaccacatcaacaactggctggcctggtatcagcagaagcctggacaggcccctaagctgctgatctacggcgctaccacactggaaacaggcgtgcccagcagattttctggcagcggctctggcaccgactacaccctgacaatatccagcctccagcctgaggacttcgccacctactactgtcagcagagctggaacaccccttggacattcggccagggcaccaagctggaaatcaagagaggcggaggcggaagtggaggcggaggatctggcggcggaggctctcaagttcagcttcaacagcctggcgctgagctggtcaaacctggcgcttctgtgaagatgagctgcaaagccagcggctacgccttcagcagctactggatcaactggatgaagcagaaacccggccagggactcgaatggatcggccaaatctatcccggcgacggcgacaccaactacaacggcaagttcaagggcagagccacactgaccgccgatacctctagcagcacagcctacatgcagctgagcagcctgaccagcgaagatagcgccgtgtacttctgtgcccggtccatcacaacagtcgtgggctgcgctatggactattggggccagggaacaagcgtgaccgtgtctagtacgcgtatccagaaccctgatcctgccgtgtaccagctgcgggatagcaagagcagcgacaagagcgtgtgtctgttcaccgacttcgacagccagaccaacgtgtcccagagcaaggactccgacgtgtacatcaccgataagaccgtgctggacatgcggagcatggacttcaagagcaactccgccgtggcctggtccaacaagtccgatttcgcctgcgccaacgccttcaacaacagcattatccccgaggacacattcttcccaagccccgagagcagcgactccaccgaccacgtgaagcccaaagagacagagaacaccaagcagcccagcaagagctgccacaagcccaaggccatcgtgcacaccgagaaagtgaacatgatgagcctgaccgtgctgggcctgcggatgctgttcgccaaaaccgtggccgtgaacttcctgctgaccgccaagctgttcttcctc

SEQ ID NO: 17935 - DNA, 2919 bp, synthetic construct
  source 1..2919: mol_type = other DNA
atggccttaccagtgaccgccttgctcctgccgctggccttgctgctccacgccgccaggccgctcgagatccagaaccctgatcctgccgtgtaccagctgcgggatagcaagagcagcgacaagagcgtgtgtctgttcaccgacttcgacagccagaccaacgtgtcccagagcaaggactccgacgtgtacatcaccgataagaccgtgctggacatgcggagcatggacttcaagagcaactccgccgtggcctggtccaacaagtccgatttcgcctgcgccaacgccttcaacaacagcattatccccgaggacacattcttcccaagccccgagagcagcgactccaccgaccacgtgaagcccaaagagacagagaacaccaagcagcccagcaagagctgccacaagcccaaggccatcgtgcacaccgagaaagtgaacatgatgagcctgaccgtgctgggcctgcggatgctgttcgccaaaaccgtggccgtgaacttcctgctgaccgccaagctgttcttcctcagggccaagcgatctggatctggagcaacaaacttctcactactcaaacaagcaggtgacgtggaggagaatcccgggcctactagcatggccttaccagtgaccgccttgctcctgccgctggccttgctgctccacgccgccaggccggacatccagatgacacagactacatcctccctgtctgcctctctgggagacagagtcaccatcagttgcagggcaagtcaggacattagtaaatatttaaattggtatcagcagaaaccagatggaactgttaaactcctgatctaccatacatcaagattacactcaggagtcccatcaaggttcagtggcagtgggtctggaacagattattctctcaccattagcaacctggagcaagaagatattgccacttacttttgccaacagggtaatacgcttccgtacacgttcggaggggggaccaagctggagatcacaggtggcggtggctcgggcggtggtgggtcgggtggcggcggatctgaggtgaaactgcaggagtcaggacctggcctggtggcgccctcacagagcctgtccgtcacatgcactgtctcaggggtctcattacccgactatggtgtaagctggattcgccagcctccacgaaagggtctggagtggctgggagtaatatggggtagtgaaaccacatactataattcagctctcaaatccagactgaccatcatcaaggacaactccaagagccaagttttcttaaaaatgaacagtctgcaaactgatgacacagccatttactactgtgccaaacattattactacggtggtagctatgctatggactactggggtcaaggaacctcagtcaccgtctcctcaacgcgtgaggaggacctgaagaacgtgttcccacctgaggtggccgtgttcgagcctagcgaggccgagatcagccacacccagaaagccaccctcgtgtgcctggctaccggcttctaccccgaccatgtggaactgtcttggtgggtcaacggcaaagaggtgcacagcggcgtgtctaccgacccccagccactgaaagaacagcccgccctgaacgacagccggtactgcctgagcagcagactgagagtgtccgccaccttctggcagaacccccggaaccacttcagatgccaggtgcagttctacggcctgagcgagaacgacgagtggacccaggacagagccaagcccgtgacccagatcgtgtctgccgaagcctggggcagagccgatgatgtgattaagatccactggcaggaaaagaagtccaacaccatcctgggcagccaggaaggcaacaccatgaagaccaacgacacctacatgaagttcagctggctgaccgtgcccgagaagtccctggacaaagaacacagatgcatcgtgcggcacgaaaacaacaagaacggcgtggaccaggaaatcatcttcccacccatcaagaccgatgtgattacaatggaccccaaggacaactgctccaaggacgccaacgataccctgctgctccagctgaccaacaccagcgcctactacatgtacttgttgctgctgctgaagtccgtggtgtacttcgccatcatcacatgctgcctgctgcggagaaccgccttctgctgcaacggcgagaagtctcgcgccaagagaagcggatctggcgtgaagcagaccctgaatttcgacctgctgaagctggctggcgacgtggaatccaacccaggcccttctagaggccatatgaccgagtacaagcccacggtgcgcctcgccacccgcgacgacgtccccagggccgtacgcaccctcgccgccgcgttcgccgactaccccgccacgcgccacaccgtcgatccggaccgccacatcgagcgggtcaccgagctgcaagaactcttcctcacgcgcgtcgggctcgacatcggcaaggtgtgggtcgcggacgacggcgccgcggtggcggtctggaccacgccggagagcgtcgaagcgggggcggtgttcgccgagatcggcccgcgcatggccgagttgagcggttcccggctggccgcgcagcaacagatggaaggcctcctggcgccgcaccggcccaaggagcccgcgtggttcctggccaccgtcggcgtctcgcccgaccaccagggcaagggtctgggcagcgccgtcgtgctccccggagtggaggcggccgagcgcgccggggtgcccgccttcctggagacctccgcgccccgcaacctccccttctacgagcggctcggcttcaccgtcaccgccgacgtcgaggtgcccgaaggaccgcgcacctggtgcatgacccgcaagcccggtgcctga

SEQ ID NO: 17936 - DNA, 2922 bp, synthetic construct
  source 1..2922: mol_type = other DNA
atggccttaccagtgaccgccttgctcctgccgctggccttgctgctccacgccgccaggccgctcgagatccagaaccctgatcctgccgtgtaccagctgcgggatagcaagagcagcgacaagagcgtgtgtctgttcaccgacttcgacagccagaccaacgtgtcccagagcaaggactccgacgtgtacatcaccgataagaccgtgctggacatgcggagcatggacttcaagagcaactccgccgtggcctggtccaacaagtccgatttcgcctgcgccaacgccttcaacaacagcattatccccgaggacacattcttcccaagccccgagagcagcgactccaccgaccacgtgaagcccaaagagacagagaacaccaagcagcccagcaagagctgccacaagcccaaggccatcgtgcacaccgagaaagtgaacatgatgagcctgaccgtgctgggcctgcggatgctgttcgccaaaaccgtggccgtgaacttcctgctgaccgccaagctgttcttcctcagggccaagcgatctggatctggagcaacaaacttctcactactcaaacaagcaggtgacgtggaggagaatcccgggcctactagcaccatggccttaccagtgaccgccttgctcctgccgctggccttgctgctccacgccgccaggccggagatcgtgatgacccagagccctgccaccctgtctctgagccctggcgaaagagccaccctgagctgtagagccagccaggacatcagcaagtacctgaactggtatcagcagaagcccggccaggcccccagactgctgatctaccacaccagcagactgcacagcggcatccccgccagattttctggctctggcagcggcaccgactacaccctgacaatcagcagcctccagcccgaggacttcgccgtgtacttctgtcagcaaggcaacaccctgccctacaccttcggccagggcaccaagctggaaatcaagggcggaggcggaagtggaggcggaggatctggcggcggaggctctcaggtgcaactccaggaatctggccctggcctcgtgaagcccagcgagacactgagcctgacctgtaccgtgtccggcgtgtccctgcctgactatggcgtgtcctggatcagacagccccctggcaagggcctggaatggatcggagtgatttggggcagcgaaaccacctactacaacagctccctgaagtccagagtgaccatctccaaggacaactccaagaaccaggtgtccctgaagctgagcagcgtgacagccgccgacaccgccgtgtattactgcgccaagcactactactacggcggcagctacgctatggactactggggccagggaaccctcgtgaccgtgtctagtacgcgtgaggaggacctgaagaacgtgttcccacctgaggtggccgtgttcgagcctagcgaggccgagatcagccacacccagaaagccaccctcgtgtgcctggctaccggcttctaccccgaccatgtggaactgtcttggtgggtcaacggcaaagaggtgcacagcggcgtgtctaccgacccccagccactgaaagaacagcccgccctgaacgacagccggtactgcctgagcagcagactgagagtgtccgccaccttctggcagaacccccggaaccacttcagatgccaggtgcagttctacggcctgagcgagaacgacgagtggacccaggacagagccaagcccgtgacccagatcgtgtctgccgaagcctggggcagagccgatgatgtgattaagatccactggcaggaaaagaagtccaacaccatcctgggcagccaggaaggcaacaccatgaagaccaacgacacctacatgaagttcagctggctgaccgtgcccgagaagtccctggacaaagaacacagatgcatcgtgcggcacgaaaacaacaagaacggcgtggaccaggaaatcatcttcccacccatcaagaccgatgtgattacaatggaccccaaggacaactgctccaaggacgccaacgataccctgctgctccagctgaccaacaccagcgcctactacatgtacttgttgctgctgctgaagtccgtggtgtacttcgccatcatcacatgctgcctgctgcggagaaccgccttctgctgcaacggcgagaagtctcgcgccaagagaagcggatctggcgtgaagcagaccctgaatttcgacctgctgaagctggctggcgacgtggaatccaacccaggcccttctagaggccatatgaccgagtacaagcccacggtgcgcctcgccacccgcgacgacgtccccagggccgtacgcaccctcgccgccgcgttcgccgactaccccgccacgcgccacaccgtcgatccggaccgccacatcgagcgggtcaccgagctgcaagaactcttcctcacgcgcgtcgggctcgacatcggcaaggtgtgggtcgcggacgacggcgccgcggtggcggtctggaccacgccggagagcgtcgaagcgggggcggtgttcgccgagatcggcccgcgcatggccgagttgagcggttcccggctggccgcgcagcaacagatggaaggcctcctggcgccgcaccggcccaaggagcccgcgtggttcctggccaccgtcggcgtctcgcccgaccaccagggcaagggtctgggcagcgccgtcgtgctccccggagtggaggcggccgagcgcgccggggtgcccgccttcctggagacctccgcgccccgcaacctccccttctacgagcggctcggcttcaccgtcaccgccgacgtcgaggtgcccgaaggaccgcgcacctggtgcatgacccgcaagcccggtgcctga

SEQ ID NO: 17937 - DNA, 2925 bp, synthetic construct
  source 1..2925: mol_type = other DNA
atggccttaccagtgaccgccttgctcctgccgctggccttgctgctccacgccgccaggccgctcgagatccagaaccctgatcctgccgtgtaccagctgcgggatagcaagagcagcgacaagagcgtgtgtctgttcaccgacttcgacagccagaccaacgtgtcccagagcaaggactccgacgtgtacatcaccgataagaccgtgctggacatgcggagcatggacttcaagagcaactccgccgtggcctggtccaacaagtccgatttcgcctgcgccaacgccttcaacaacagcattatccccgaggacacattcttcccaagccccgagagcagcgactccaccgaccacgtgaagcccaaagagacagagaacaccaagcagcccagcaagagctgccacaagcccaaggccatcgtgcacaccgagaaagtgaacatgatgagcctgaccgtgctgggcctgcggatgctgttcgccaaaaccgtggccgtgaacttcctgctgaccgccaagctgttcttcctcagggccaagcgatctggatctggagcaacaaacttctcactactcaaacaagcaggtgacgtggaggagaatcccgggcctactagcaccatggccttaccagtgaccgccttgctcctgccgctggccttgctgctccacgccgccaggccggacgagatcgtgctgacacagagccccgccaccctgtcactgtctccaggcgaaagagccaccctgagctgtagcgccagcagcagcgtgtcctacatgcactggtatcagcagaagcccggccaggcccccagactgctgatctacgataccagcaagctggcctccggcatccccgccagattttctggcagcggctccggcaccgacttcaccctgacaatcagcagcctggaacccgaggacgtggccgtgtactactgttttcaaggcagcgtgtaccccttcaccttcggccagggcaccaagctggaaatcaagagaggtggcggtggctcgggcggtggtgggtcgggtggcggcggatctcaggtgcagctccaggaatctggccctggcctcgtgaagcctagccagaccctgagcctgacctgtaccgtgtctggcggcagcatcagcacaagcggcatgggcgtgggctggatcagacagcaccctggcaagggcctggaatggatcggccacatttggtgggacgacgacaagcggtacaaccccgccctgaagtccagagtgaccatcagcgtggacaccagcaagaaccagttcagcctgaagctgagcagcgtgacagccgccgataccgccgtgtattattgcgcccggatggaactgtggtcctactacttcgactactggggccagggaaccctcgtgaccgtgtctagtacgcgtgaggaggacctgaagaacgtgttcccacctgaggtggccgtgttcgagcctagcgaggccgagatcagccacacccagaaagccaccctcgtgtgcctggctaccggcttctaccccgaccatgtggaactgtcttggtgggtcaacggcaaagaggtgcacagcggcgtgtctaccgacccccagccactgaaagaacagcccgccctgaacgacagccggtactgcctgagcagcagactgagagtgtccgccaccttctggcagaacccccggaaccacttcagatgccaggtgcagttctacggcctgagcgagaacgacgagtggacccaggacagagccaagcccgtgacccagatcgtgtctgccgaagcctggggcagagccgatgatgtgattaagatccactggcaggaaaagaagtccaacaccatcctgggcagccaggaaggcaacaccatgaagaccaacgacacctacatgaagttcagctggctgaccgtgcccgagaagtccctggacaaagaacacagatgcatcgtgcggcacgaaaacaacaagaacggcgtggaccaggaaatcatcttcccacccatcaagaccgatgtgattacaatggaccccaaggacaactgctccaaggacgccaacgataccctgctgctccagctgaccaacaccagcgcctactacatgtacttgttgctgctgctgaagtccgtggtgtacttcgccatcatcacatgctgcctgctgcggagaaccgccttctgctgcaacggcgagaagtctcgcgccaagagaagcggatctggcgtgaagcagaccctgaatttcgacctgctgaagctggctggcgacgtggaatccaacccaggcccttctagaggccatatgaccgagtacaagcccacggtgcgcctcgccacccgcgacgacgtccccagggccgtacgcaccctcgccgccgcgttcgccgactaccccgccacgcgccacaccgtcgatccggaccgccacatcgagcgggtcaccgagctgcaagaactcttcctcacgcgcgtcgggctcgacatcggcaaggtgtgggtcgcggacgacggcgccgcggtggcggtctggaccacgccggagagcgtcgaagcgggggcggtgttcgccgagatcggcccgcgcatggccgagttgagcggttcccggctggccgcgcagcaacagatggaaggcctcctggcgccgcaccggcccaaggagcccgcgtggttcctggccaccgtcggcgtctcgcccgaccaccagggcaagggtctgggcagcgccgtcgtgctccccggagtggaggcggccgagcgcgccggggtgcccgccttcctggagacctccgcgccccgcaacctccccttctacgagcggctcggcttcaccgtcaccgccgacgtcgaggtgcccgaaggaccgcgcacctggtgcatgacccgcaagcccggtgcctga

SEQ ID NO: 17938 - DNA, 2913 bp, synthetic construct
  source 1..2913: mol_type = other DNA
atggccttaccagtgaccgccttgctcctgccgctggccttgctgctccacgccgccaggccgctcgagatccagaaccctgatcctgccgtgtaccagctgcgggatagcaagagcagcgacaagagcgtgtgtctgttcaccgacttcgacagccagaccaacgtgtcccagagcaaggactccgacgtgtacatcaccgataagaccgtgctggacatgcggagcatggacttcaagagcaactccgccgtggcctggtccaacaagtccgatttcgcctgcgccaacgccttcaacaacagcattatccccgaggacacattcttcccaagccccgagagcagcgactccaccgaccacgtgaagcccaaagagacagagaacaccaagcagcccagcaagagctgccacaagcccaaggccatcgtgcacaccgagaaagtgaacatgatgagcctgaccgtgctgggcctgcggatgctgttcgccaaaaccgtggccgtgaacttcctgctgaccgccaagctgttcttcctcagggccaagcgatctggatctggagcaacaaacttctcactactcaaacaagcaggtgacgtggaggagaatcccgggcctactagcatggccttaccagtgaccgccttgctcctgccgctggccttgctgctccacgccgccaggccggacatccagatgacacagagccctagcagcctgtctgccagcgtgggagacagagtgaccatcacctgtagagccagccaggacatcagcaactacctgaactggtatcagcagaagcccggcaaggcccctaagctgctgatctactacaccagcagactgcacagcggcgtgcccagcagattttctggctctggcagcggcaccgacttcaccctgacaatatctagcctccagcctgaggacttcgccacctactattgccagcagggcaacaccctgccttacacatttggacagggcaccaaggtggaaatcaagagaggcggaggcggaagtggaggcggaggatctggcggcggaggctctgaagtgcagctggttgaatcaggtggcggcctggttcaacctggcggatctctgagactgagctgtgccgccagcggcttcaccttcagcgactactttatgagctgggtccgacaggcccctggcaaaggacttgaatgggtcgccaccatcagcaatggcggcacctacacttactaccccgacagcgtgaagggcagattcaccatctccagagacaacagcaagaacaccctgtacctccagatgaactccctgagagccgaggacaccgccgtgtactactgcgccagattcgacggctacatcttcgactattggggccagggcaccctggtcacagtctcttctacgcgtgaggaggacctgaagaacgtgttcccacctgaggtggccgtgttcgagcctagcgaggccgagatcagccacacccagaaagccaccctcgtgtgcctggctaccggcttctaccccgaccatgtggaactgtcttggtgggtcaacggcaaagaggtgcacagcggcgtgtctaccgacccccagccactgaaagaacagcccgccctgaacgacagccggtactgcctgagcagcagactgagagtgtccgccaccttctggcagaacccccggaaccacttcagatgccaggtgcagttctacggcctgagcgagaacgacgagtggacccaggacagagccaagcccgtgacccagatcgtgtctgccgaagcctggggcagagccgatgatgtgattaagatccactggcaggaaaagaagtccaacaccatcctgggcagccaggaaggcaacaccatgaagaccaacgacacctacatgaagttcagctggctgaccgtgcccgagaagtccctggacaaagaacacagatgcatcgtgcggcacgaaaacaacaagaacggcgtggaccaggaaatcatcttcccacccatcaagaccgatgtgattacaatggaccccaaggacaactgctccaaggacgccaacgataccctgctgctccagctgaccaacaccagcgcctactacatgtacttgttgctgctgctgaagtccgtggtgtacttcgccatcatcacatgctgcctgctgcggagaaccgccttctgctgcaacggcgagaagtctcgcgccaagagaagcggatctggcgtgaagcagaccctgaatttcgacctgctgaagctggctggcgacgtggaatccaacccaggcccttctagaggccatatgaccgagtacaagcccacggtgcgcctcgccacccgcgacgacgtccccagggccgtacgcaccctcgccgccgcgttcgccgactaccccgccacgcgccacaccgtcgatccggaccgccacatcgagcgggtcaccgagctgcaagaactcttcctcacgcgcgtcgggctcgacatcggcaaggtgtgggtcgcggacgacggcgccgcggtggcggtctggaccacgccggagagcgtcgaagcgggggcggtgttcgccgagatcggcccgcgcatggccgagttgagcggttcccggctggccgcgcagcaacagatggaaggcctcctggcgccgcaccggcccaaggagcccgcgtggttcctggccaccgtcggcgtctcgcccgaccaccagggcaagggtctgggcagcgccgtcgtgctccccggagtggaggcggccgagcgcgccggggtgcccgccttcctggagacctccgcgccccgcaacctccccttctacgagcggctcggcttcaccgtcaccgccgacgtcgaggtgcccgaaggaccgcgcacctggtgcatgacccgcaagcccggtgcctga

SEQ ID NO: 17939 - DNA, 2925 bp, synthetic construct
  source 1..2925: mol_type = other DNA
atggccttaccagtgaccgccttgctcctgccgctggccttgctgctccacgccgccaggccgctcgagatccagaaccctgatcctgccgtgtaccagctgcgggatagcaagagcagcgacaagagcgtgtgtctgttcaccgacttcgacagccagaccaacgtgtcccagagcaaggactccgacgtgtacatcaccgataagaccgtgctggacatgcggagcatggacttcaagagcaactccgccgtggcctggtccaacaagtccgatttcgcctgcgccaacgccttcaacaacagcattatccccgaggacacattcttcccaagccccgagagcagcgactccaccgaccacgtgaagcccaaagagacagagaacaccaagcagcccagcaagagctgccacaagcccaaggccatcgtgcacaccgagaaagtgaacatgatgagcctgaccgtgctgggcctgcggatgctgttcgccaaaaccgtggccgtgaacttcctgctgaccgccaagctgttcttcctcagggccaagcgatctggatctggagcaacaaacttctcactactcaaacaagcaggtgacgtggaggagaatcccgggcctactagcatggccttaccagtgaccgccttgctcctgccgctggccttgctgctccacgccgccaggccggacatccagatgacacagagccctagcagcctgtctgccagcgtgggagacagagtgaccatcacatgcaaggccagcgaccacatcaacaactggctggcctggtatcagcagaagcctggacaggcccctaagctgctgatctacggcgctaccacactggaaacaggcgtgcccagcagattttctggcagcggctctggcaccgactacaccctgacaatatccagcctccagcctgaggacttcgccacctactactgtcagcagagctggaacaccccttggacattcggccagggcaccaagctggaaatcaagagaggcggaggcggaagtggaggcggaggatctggcggcggaggctctcaagttcagcttcaacagcctggcgctgagctggtcaaacctggcgcttctgtgaagatgagctgcaaagccagcggctacgccttcagcagctactggatcaactggatgaagcagaaacccggccagggactcgaatggatcggccaaatctatcccggcgacggcgacaccaactacaacggcaagttcaagggcagagccacactgaccgccgatacctctagcagcacagcctacatgcagctgagcagcctgaccagcgaagatagcgccgtgtacttctgtgcccggtccatcacaacagtcgtgggctgcgctatggactattggggccagggaacaagcgtgaccgtgtctagtacgcgtgaggaggacctgaagaacgtgttcccacctgaggtggccgtgttcgagcctagcgaggccgagatcagccacacccagaaagccaccctcgtgtgcctggctaccggcttctaccccgaccatgtggaactgtcttggtgggtcaacggcaaagaggtgcacagcggcgtgtctaccgacccccagccactgaaagaacagcccgccctgaacgacagccggtactgcctgagcagcagactgagagtgtccgccaccttctggcagaacccccggaaccacttcagatgccaggtgcagttctacggcctgagcgagaacgacgagtggacccaggacagagccaagcccgtgacccagatcgtgtctgccgaagcctggggcagagccgatgatgtgattaagatccactggcaggaaaagaagtccaacaccatcctgggcagccaggaaggcaacaccatgaagaccaacgacacctacatgaagttcagctggctgaccgtgcccgagaagtccctggacaaagaacacagatgcatcgtgcggcacgaaaacaacaagaacggcgtggaccaggaaatcatcttcccacccatcaagaccgatgtgattacaatggaccccaaggacaactgctccaaggacgccaacgataccctgctgctccagctgaccaacaccagcgcctactacatgtacttgttgctgctgctgaagtccgtggtgtacttcgccatcatcacatgctgcctgctgcggagaaccgccttctgctgcaacggcgagaagtctcgcgccaagagaagcggatctggcgtgaagcagaccctgaatttcgacctgctgaagctggctggcgacgtggaatccaacccaggcccttctagaggccatatgaccgagtacaagcccacggtgcgcctcgccacccgcgacgacgtccccagggccgtacgcaccctcgccgccgcgttcgccgactaccccgccacgcgccacaccgtcgatccggaccgccacatcgagcgggtcaccgagctgcaagaactcttcctcacgcgcgtcgggctcgacatcggcaaggtgtgggtcgcggacgacggcgccgcggtggcggtctggaccacgccggagagcgtcgaagcgggggcggtgttcgccgagatcggcccgcgcatggccgagttgagcggttcccggctggccgcgcagcaacagatggaaggcctcctggcgccgcaccggcccaaggagcccgcgtggttcctggccaccgtcggcgtctcgcccgaccaccagggcaagggtctgggcagcgccgtcgtgctccccggagtggaggcggccgagcgcgccggggtgcccgccttcctggagacctccgcgccccgcaacctccccttctacgagcggctcggcttcaccgtcaccgccgacgtcgaggtgcccgaaggaccgcgcacctggtgcatgacccgcaagcccggtgcctga

SEQ ID NO: 17940 - DNA, 2931 bp, synthetic construct
  source 1..2931: mol_type = other DNA
atggccttaccagtgaccgccttgctcctgccgctggccttgctgctccacgccgccaggccgctcgagatccagaaccctgatcctgccgtgtaccagctgcgggatagcaagagcagcgacaagagcgtgtgtctgttcaccgacttcgacagccagaccaacgtgtcccagagcaaggactccgacgtgtacatcaccgataagaccgtgctggacatgcggagcatggacttcaagagcaactccgccgtggcctggtccaacaagtccgatttcgcctgcgccaacgccttcaacaacagcattatccccgaggacacattcttcccaagccccgagagcagcgactccaccgaccacgtgaagcccaaagagacagagaacaccaagcagcccagcaagagctgccacaagcccaaggccatcgtgcacaccgagaaagtgaacatgatgagcctgaccgtgctgggcctgcggatgctgttcgccaaaaccgtggccgtgaacttcctgctgaccgccaagctgttcttcctcagggccaagcgatctggatctggagcaacaaacttctcactactcaaacaagcaggtgacgtggaggagaatcccgggcctactagcatggccttaccagtgaccgccttgctcctgccgctggccttgctgctccacgccgccaggccgcagatcgtgctgtctcagtctcctgccatcctgagcgcttccccaggcgagaaagtgaccatgacctgtagagccagcagcagcgtgtcctacatgcactggtatcagcagaagcccggcagcagccctaagccttggatctacgccaccagcaatctggcctctggcgtgccagccagattttctggctctggcagcggcaccagctacagcttcacaatcagcagagtggaagccgaggacgccgccacctactattgtcagcagtggaccttcaatcctcctaccttcggcggaggcacccggctggaaatcaaaagaacagtggctgctggcggaggcggaagtggaggcggaggatctggcggcggaggctctcaggcttatctgcaacagagcggagccgaactcgtcagacctggcgcttctgtgaagatgagctgcaaggccagcggctacaccttcaccagctataatatgcactgggtcaagcagacccctcggcagggactcgaatggatcggcggaatctatcccggcaacggcgacacctcctacaaccagaagttcaagggcaaagccacactgaccgtgggcaagagcagcagcaccgcctatatgcagctcagcagcctgaccagcgaggacagcgccgtgtacttctgcgccagatacgactacaactacgctatggactactggggccagggcaccagcgtgacagttagctctgccagcacgcgtgaggaggacctgaagaacgtgttcccacctgaggtggccgtgttcgagcctagcgaggccgagatcagccacacccagaaagccaccctcgtgtgcctggctaccggcttctaccccgaccatgtggaactgtcttggtgggtcaacggcaaagaggtgcacagcggcgtgtctaccgacccccagccactgaaagaacagcccgccctgaacgacagccggtactgcctgagcagcagactgagagtgtccgccaccttctggcagaacccccggaaccacttcagatgccaggtgcagttctacggcctgagcgagaacgacgagtggacccaggacagagccaagcccgtgacccagatcgtgtctgccgaagcctggggcagagccgatgatgtgattaagatccactggcaggaaaagaagtccaacaccatcctgggcagccaggaaggcaacaccatgaagaccaacgacacctacatgaagttcagctggctgaccgtgcccgagaagtccctggacaaagaacacagatgcatcgtgcggcacgaaaacaacaagaacggcgtggaccaggaaatcatcttcccacccatcaagaccgatgtgattacaatggaccccaaggacaactgctccaaggacgccaacgataccctgctgctccagctgaccaacaccagcgcctactacatgtacttgttgctgctgctgaagtccgtggtgtacttcgccatcatcacatgctgcctgctgcggagaaccgccttctgctgcaacggcgagaagtctcgcgccaagagaagcggatctggcgtgaagcagaccctgaatttcgacctgctgaagctggctggcgacgtggaatccaacccaggcccttctagaggccatatgaccgagtacaagcccacggtgcgcctcgccacccgcgacgacgtccccagggccgtacgcaccctcgccgccgcgttcgccgactaccccgccacgcgccacaccgtcgatccggaccgccacatcgagcgggtcaccgagctgcaagaactcttcctcacgcgcgtcgggctcgacatcggcaaggtgtgggtcgcggacgacggcgccgcggtggcggtctggaccacgccggagagcgtcgaagcgggggcggtgttcgccgagatcggcccgcgcatggccgagttgagcggttcccggctggccgcgcagcaacagatggaaggcctcctggcgccgcaccggcccaaggagcccgcgtggttcctggccaccgtcggcgtctcgcccgaccaccagggcaagggtctgggcagcgccgtcgtgctccccggagtggaggcggccgagcgcgccggggtgcccgccttcctggagacctccgcgccccgcaacctccccttctacgagcggctcggcttcaccgtcaccgccgacgtcgaggtgcccgaaggaccgcgcacctggtgcatgacccgcaagcccggtgcctga

SEQ ID NO: 17941 - DNA, 2925 bp, synthetic construct
  source 1..2925: mol_type = other DNA
atggccttaccagtgaccgccttgctcctgccgctggccttgctgctccacgccgccaggccgctcgagatccagaaccctgatcctgccgtgtaccagctgcgggatagcaagagcagcgacaagagcgtgtgtctgttcaccgacttcgacagccagaccaacgtgtcccagagcaaggactccgacgtgtacatcaccgataagaccgtgctggacatgcggagcatggacttcaagagcaactccgccgtggcctggtccaacaagtccgatttcgcctgcgccaacgccttcaacaacagcattatccccgaggacacattcttcccaagccccgagagcagcgactccaccgaccacgtgaagcccaaagagacagagaacaccaagcagcccagcaagagctgccacaagcccaaggccatcgtgcacaccgagaaagtgaacatgatgagcctgaccgtgctgggcctgcggatgctgttcgccaaaaccgtggccgtgaacttcctgctgaccgccaagctgttcttcctcagggccaagcgatctggatctggagcaacaaacttctcactactcaaacaagcaggtgacgtggaggagaatcccgggcctactagcatggccttaccagtgaccgccttgctcctgccgctggccttgctgctccacgccgccaggccggagatcgtgctgacacagagccctgccaccctgtctctgagccctggcgaaagagccaccctgagctgtagagccagccagagcgtgtccagctacctggcctggtatcagcagaagcccggccaggctccccggctgctgatctacgatgccagcaatagagccaccggcatccccgccagattttccggctctggcagcggcaccgacttcaccctgaccatcagctccctggaacccgaggacttcgccgtgtactactgccagcagcggagcaactggcccatcacattcggccagggcacccggctggaaatcaaaggcggaggcggaagtggaggcggaggatctggcggcggaggctctgaggtgcagcttgttgagtctggcggaggactggtgcagcccgatagaagcctgagactgtcttgtgccgccagcggcttcaccttccacgattatgccatgcactgggtccgacaggcccctggcaaaggacttgaatgggtgtccaccatctcttggaacagcggcacaatcggctacgccgactctgtgaagggcagattcaccatcagccgggacaacgccaagaacagcctgtacctccagatgaactccctgagagccgaggacacagccctgtactactgcgccaaggacatccagtacggcaactactactacggcatggacgtgtggggccagggcacaacagtgacagtctcttctacgcgtgaggaggacctgaagaacgtgttcccacctgaggtggccgtgttcgagcctagcgaggccgagatcagccacacccagaaagccaccctcgtgtgcctggctaccggcttctaccccgaccatgtggaactgtcttggtgggtcaacggcaaagaggtgcacagcggcgtgtctaccgacccccagccactgaaagaacagcccgccctgaacgacagccggtactgcctgagcagcagactgagagtgtccgccaccttctggcagaacccccggaaccacttcagatgccaggtgcagttctacggcctgagcgagaacgacgagtggacccaggacagagccaagcccgtgacccagatcgtgtctgccgaagcctggggcagagccgatgatgtgattaagatccactggcaggaaaagaagtccaacaccatcctgggcagccaggaaggcaacaccatgaagaccaacgacacctacatgaagttcagctggctgaccgtgcccgagaagtccctggacaaagaacacagatgcatcgtgcggcacgaaaacaacaagaacggcgtggaccaggaaatcatcttcccacccatcaagaccgatgtgattacaatggaccccaaggacaactgctccaaggacgccaacgataccctgctgctccagctgaccaacaccagcgcctactacatgtacttgttgctgctgctgaagtccgtggtgtacttcgccatcatcacatgctgcctgctgcggagaaccgccttctgctgcaacggcgagaagtctcgcgccaagagaagcggatctggcgtgaagcagaccctgaatttcgacctgctgaagctggctggcgacgtggaatccaacccaggcccttctagaggccatatgaccgagtacaagcccacggtgcgcctcgccacccgcgacgacgtccccagggccgtacgcaccctcgccgccgcgttcgccgactaccccgccacgcgccacaccgtcgatccggaccgccacatcgagcgggtcaccgagctgcaagaactcttcctcacgcgcgtcgggctcgacatcggcaaggtgtgggtcgcggacgacggcgccgcggtggcggtctggaccacgccggagagcgtcgaagcgggggcggtgttcgccgagatcggcccgcgcatggccgagttgagcggttcccggctggccgcgcagcaacagatggaaggcctcctggcgccgcaccggcccaaggagcccgcgtggttcctggccaccgtcggcgtctcgcccgaccaccagggcaagggtctgggcagcgccgtcgtgctccccggagtggaggcggccgagcgcgccggggtgcccgccttcctggagacctccgcgccccgcaacctccccttctacgagcggctcggcttcaccgtcaccgccgacgtcgaggtgcccgaaggaccgcgcacctggtgcatgacccgcaagcccggtgcctga

SEQ ID NO: 17942 - DNA, 2919 bp, synthetic construct
  source 1..2919: mol_type = other DNA
atggccttaccagtgaccgccttgctcctgccgctggccttgctgctccacgccgccaggccgctcgagatccagaaccctgatcctgccgtgtaccagctgcgggatagcaagagcagcgacaagagcgtgtgtctgttcaccgacttcgacagccagaccaacgtgtcccagagcaaggactccgacgtgtacatcaccgataagaccgtgctggacatgcggagcatggacttcaagagcaactccgccgtggcctggtccaacaagtccgatttcgcctgcgccaacgccttcaacaacagcattatccccgaggacacattcttcccaagccccgagagcagcgactccaccgaccacgtgaagcccaaagagacagagaacaccaagcagcccagcaagagctgccacaagcccaaggccatcgtgcacaccgagaaagtgaacatgatgagcctgaccgtgctgggcctgcggatgctgttcgccaaaaccgtggccgtgaacttcctgctgaccgccaagctgttcttcctcagggccaagcgatctggatctggagcaacaaacttctcactactcaaacaagcaggtgacgtggaggagaatcccgggcctactagcatggccttaccagtgaccgccttgctcctgccgctggccttgctgctccacgccgccaggccggacatccagatgacccagagccccagcagcctgtctgccagcgtgggcgacagagtgaccatcacctgtagagccagccaggacgtgaacaccgccgtggcctggtatcagcagaagcctggcaaggcccccaagctgctgatctacagcgccagcttcctggaaagcggcgtgcccagcagattcagcggaagcagaagcggcaccgacttcaccctgaccatcagctccctccagcccgaggacttcgccacctactactgccagcagcactacaccacccctcccaccttcggccagaccaaggtggaaatcaagagaggcggaggcggaagtggaggcggaggatctggcggcggaggctctgaagtgcaactggtggaatctggcggcggactggtgcagcctggcggatctctgagactgagctgtgccgccagcggcttcaacatcaaggacacctacatccactgggtgcgccaggcccctggaaagggactggaatgggtggcccggatctaccccaccaacggctacaccagatacgccgacagcgtgaagggccggttcaccatcagcgccgacaccagcaagaataccgcctacctccagatgaacagcctgcgggccgaggataccgccgtgtactactgctcaagatggggaggcgacggcttctacgctatggacgtgtggggccagggcacccttgtgaccgtgtcatctacgcgtgaggaggacctgaagaacgtgttcccacctgaggtggccgtgttcgagcctagcgaggccgagatcagccacacccagaaagccaccctcgtgtgcctggctaccggcttctaccccgaccatgtggaactgtcttggtgggtcaacggcaaagaggtgcacagcggcgtgtctaccgacccccagccactgaaagaacagcccgccctgaacgacagccggtactgcctgagcagcagactgagagtgtccgccaccttctggcagaacccccggaaccacttcagatgccaggtgcagttctacggcctgagcgagaacgacgagtggacccaggacagagccaagcccgtgacccagatcgtgtctgccgaagcctggggcagagccgatgatgtgattaagatccactggcaggaaaagaagtccaacaccatcctgggcagccaggaaggcaacaccatgaagaccaacgacacctacatgaagttcagctggctgaccgtgcccgagaagtccctggacaaagaacacagatgcatcgtgcggcacgaaaacaacaagaacggcgtggaccaggaaatcatcttcccacccatcaagaccgatgtgattacaatggaccccaaggacaactgctccaaggacgccaacgataccctgctgctccagctgaccaacaccagcgcctactacatgtacttgttgctgctgctgaagtccgtggtgtacttcgccatcatcacatgctgcctgctgcggagaaccgccttctgctgcaacggcgagaagtctcgcgccaagagaagcggatctggcgtgaagcagaccctgaatttcgacctgctgaagctggctggcgacgtggaatccaacccaggcccttctagaggccatatgaccgagtacaagcccacggtgcgcctcgccacccgcgacgacgtccccagggccgtacgcaccctcgccgccgcgttcgccgactaccccgccacgcgccacaccgtcgatccggaccgccacatcgagcgggtcaccgagctgcaagaactcttcctcacgcgcgtcgggctcgacatcggcaaggtgtgggtcgcggacgacggcgccgcggtggcggtctggaccacgccggagagcgtcgaagcgggggcggtgttcgccgagatcggcccgcgcatggccgagttgagcggttcccggctggccgcgcagcaacagatggaaggcctcctggcgccgcaccggcccaaggagcccgcgtggttcctggccaccgtcggcgtctcgcccgaccaccagggcaagggtctgggcagcgccgtcgtgctccccggagtggaggcggccgagcgcgccggggtgcccgccttcctggagacctccgcgccccgcaacctccccttctacgagcggctcggcttcaccgtcaccgccgacgtcgaggtgcccgaaggaccgcgcacctggtgcatgacccgcaagcccggtgcctga

SEQ ID NO: 17943 - DNA, 2556 bp, synthetic construct
  source 1..2556: mol_type = other DNA
atggccttaccagtgaccgccttgctcctgccgctggccttgctgctccacgccgccaggccgctcgagatccagaaccctgatcctgccgtgtaccagctgcgggatagcaagagcagcgacaagagcgtgtgtctgttcaccgacttcgacagccagaccaacgtgtcccagagcaaggactccgacgtgtacatcaccgataagaccgtgctggacatgcggagcatggacttcaagagcaactccgccgtggcctggtccaacaagtccgatttcgcctgcgccaacgccttcaacaacagcattatccccgaggacacattcttcccaagccccgagagcagcgactccaccgaccacgtgaagcccaaagagacagagaacaccaagcagcccagcaagagctgccacaagcccaaggccatcgtgcacaccgagaaagtgaacatgatgagcctgaccgtgctgggcctgcggatgctgttcgccaaaaccgtggccgtgaacttcctgctgaccgccaagctgttcttcctcagggccaagcgatctggatctggagcaacaaacttctcactactcaaacaagcaggtgacgtggaggagaatcccgggcctactagcatggccctgcccgtgacagccctgctgctgcctctggctctgctgctgcacgccgccagacccgatgaattcgaggtgcaactggtggaaagcggcggaggcctggtgcaggctggcggatctctgagactgagctgtgccgccagcggcatcaccttcagcatcaacacaatgggctggtacagacaggcccctggcaagcagagggaactggtggccctgatctccagcatcggcgacacctactacgccgacagcgtgaagggccggttcaccatcagccgggacaacgccaagaacaccgtgtacctccagatgaacagcctgaagcccgaggacaccgccgtgtactactgcaagcggttcagaacagccgcccagggcaccgattattggggccagggaacacaagtgaccgtgtcctctacgcgtgaggaggacctgaagaacgtgttcccacctgaggtggccgtgttcgagcctagcgaggccgagatcagccacacccagaaagccaccctcgtgtgcctggctaccggcttctaccccgaccatgtggaactgtcttggtgggtcaacggcaaagaggtgcacagcggcgtgtctaccgacccccagccactgaaagaacagcccgccctgaacgacagccggtactgcctgagcagcagactgagagtgtccgccaccttctggcagaacccccggaaccacttcagatgccaggtgcagttctacggcctgagcgagaacgacgagtggacccaggacagagccaagcccgtgacccagatcgtgtctgccgaagcctggggcagagccgatgatgtgattaagatccactggcaggaaaagaagtccaacaccatcctgggcagccaggaaggcaacaccatgaagaccaacgacacctacatgaagttcagctggctgaccgtgcccgagaagtccctggacaaagaacacagatgcatcgtgcggcacgaaaacaacaagaacggcgtggaccaggaaatcatcttcccacccatcaagaccgatgtgattacaatggaccccaaggacaactgctccaaggacgccaacgataccctgctgctccagctgaccaacaccagcgcctactacatgtacttgttgctgctgctgaagtccgtggtgtacttcgccatcatcacatgctgcctgctgcggagaaccgccttctgctgcaacggcgagaagtctcgcgccaagagaagcggatctggcgtgaagcagaccctgaatttcgacctgctgaagctggctggcgacgtggaatccaacccaggcccttctagaggccatatgaccgagtacaagcccacggtgcgcctcgccacccgcgacgacgtccccagggccgtacgcaccctcgccgccgcgttcgccgactaccccgccacgcgccacaccgtcgatccggaccgccacatcgagcgggtcaccgagctgcaagaactcttcctcacgcgcgtcgggctcgacatcggcaaggtgtgggtcgcggacgacggcgccgcggtggcggtctggaccacgccggagagcgtcgaagcgggggcggtgttcgccgagatcggcccgcgcatggccgagttgagcggttcccggctggccgcgcagcaacagatggaaggcctcctggcgccgcaccggcccaaggagcccgcgtggttcctggccaccgtcggcgtctcgcccgaccaccagggcaagggtctgggcagcgccgtcgtgctccccggagtggaggcggccgagcgcgccggggtgcccgccttcctggagacctccgcgccccgcaacctccccttctacgagcggctcggcttcaccgtcaccgccgacgtcgaggtgcccgaaggaccgcgcacctggtgcatgacccgcaagcccggtgcctga

SEQ ID NO: 17944 - DNA, 2556 bp, synthetic construct; identical to SEQ ID NO: 17943
  source 1..2556: mol_type = other DNA

SEQ ID NO: 17945 - DNA, 3351 bp, synthetic construct
  source 1..3351: mol_type = other DNA
atggccttaccagtgaccgccttgctcctgccgctggccttgctgctccacgccgccaggccgctcgagatccagaaccctgatcctgccgtgtaccagctgcgggatagcaagagcagcgacaagagcgtgtgtctgttcaccgacttcgacagccagaccaacgtgtcccagagcaaggactccgacgtgtacatcaccgataagaccgtgctggacatgcggagcatggacttcaagagcaactccgccgtggcctggtccaacaagtccgatttcgcctgcgccaacgccttcaacaacagcattatccccgaggacacattcttcccaagccccgagagcagcgactccaccgaccacgtgaagcccaaagagacagagaacaccaagcagcccagcaagagctgccacaagcccaaggccatcgtgcacaccgagaaagtgaacatgatgagcctgaccgtgctgggcctgcggatgctgttcgccaaaaccgtggccgtgaacttcctgctgaccgccaagctgttcttcctcagggccaagcgatctggatctggagcaacaaacttctcactactcaaacaagcaggtgacgtggaggagaatcccgggcctactagcatggccttaccagtgaccgccttgctcctgccgctggccttgctgctccacgccgccaggccgcaggtccagctcgtcgagtccggcggcggcctcgtccaggccggcgactccgtcaccctctcctgcaccgcctccggccgcaccttctcctcctacgccctcgcctggttccgccagcgccccggcaaggagcgcgagttcgtcgccggcctccgctggggcggccccaccaactacgccgactccgtcaaggaccgcttcaccatctccggcgactccgccaagcacaccatgtacctccagatgaactccctcaagcccgaggacaccgccgtctactactgcggctacaaccccggcggctgggccgtcccctcccagtacgagtacgactcctggggccagggcacccaggtcaccgtctcctccggtaccggcggaggcggatctggcggcggaggtagcggtggcggaggatctgaattcgacatccagatgacacagagccctagcagcctgtctgccagcgtgggagacagagtgaccatcacatgcaaggccagcgaccacatcaacaactggctggcctggtatcagcagaagcctggacaggcccctaagctgctgatctacggcgctaccacactggaaacaggcgtgcccagcagattttctggcagcggctctggcaccgactacaccctgacaatatccagcctccagcctgaggacttcgccacctactactgtcagcagagctggaacaccccttggacattcggccagggcaccaagctggaaatcaagagaggcggaggcggaagtggaggcggaggatctggcggcggaggctctcaagttcagcttcaacagcctggcgctgagctggtcaaacctggcgcttctgtgaagatgagctgcaaagccagcggctacgccttcagcagctactggatcaactggatgaagcagaaacccggccagggactcgaatggatcggccaaatctatcccggcgacggcgacaccaactacaacggcaagttcaagggcagagccacactgaccgccgatacctctagcagcacagcctacatgcagctgagcagcctgaccagcgaagatagcgccgtgtacttctgtgcccggtccatcacaacagtcgtgggctgcgctatggactattggggccagggaacaagcgtgaccgtgtctagtacgcgtgaggaggacctgaagaacgtgttcccacctgaggtggccgtgttcgagcctagcgaggccgagatcagccacacccagaaagccaccctcgtgtgcctggctaccggcttctaccccgaccatgtggaactgtcttggtgggtcaacggcaaagaggtgcacagcggcgtgtctaccgacccccagccactgaaagaacagcccgccctgaacgacagccggtactgcctgagcagcagactgagagtgtccgccaccttctggcagaacccccggaaccacttcagatgccaggtgcagttctacggcctgagcgagaacgacgagtggacccaggacagagccaagcccgtgacccagatcgtgtctgccgaagcctggggcagagccgatgatgtgattaagatccactggcaggaaaagaagtccaacaccatcctgggcagccaggaaggcaacaccatgaagaccaacgacacctacatgaagttcagctggctgaccgtgcccgagaagtccctggacaaagaacacagatgcatcgtgcggcacgaaaacaacaagaacggcgtggaccaggaaatcatcttcccacccatcaagaccgatgtgattacaatggaccccaaggacaactgctccaaggacgccaacgataccctgctgctccagctgaccaacaccagcgcctactacatgtacttgttgctgctgctgaagtccgtggtgtacttcgccatcatcacatgctgcctgctgcggagaaccgccttctgctgcaacggcgagaagtctcgcgccaagagaagcggatctggcgtgaagcagaccctgaatttcgacctgctgaagctggctggcgacgtggaatccaacccaggcccttctagaggccatatgaccgagtacaagcccacggtgcgcctcgccacccgcgacgacgtccccagggccgtacgcaccctcgccgccgcgttcgccgactaccccgccacgcgccacaccgtcgatccggaccgccacatcgagcgggtcaccgagctgcaagaactcttcctcacgcgcgtcgggctcgacatcggcaaggtgtgggtcgcggacgacggcgccgcggtggcggtctggaccacgccggagagcgtcgaagcgggggcggtgttcgccgagatcggcccgcgcatggccgagttgagcggttcccggctggccgcgcagcaacagatggaaggcctcctggcgccgcaccggcccaaggagcccgcgtggttcctggccaccgtcggcgtctcgcccgaccaccagggcaagggtctgggcagcgccgtcgtgctccccggagtggaggcggccgagcgcgccggggtgcccgccttcctggagacctccgcgccccgcaacctccccttctacgagcggctcggcttcaccgtcaccgccgacgtcgaggtgcccgaaggaccgcgcacctggtgcatgacccgcaagcccggtgcctga

SEQ ID NO: 17946 - DNA, 3738 bp, synthetic construct
  source 1..3738: mol_type = other DNA
atggccttaccagtgaccgccttgctcctgccgctggccttgctgctccacgccgccaggccgctcgagatccagaaccctgatcctgccgtgtaccagctgcgggatagcaagagcagcgacaagagcgtgtgtctgttcaccgacttcgacagccagaccaacgtgtcccagagcaaggactccgacgtgtacatcaccgataagaccgtgctggacatgcggagcatggacttcaagagcaactccgccgtggcctggtccaacaagtccgatttcgcctgcgccaacgccttcaacaacagcattatccccgaggacacattcttcccaagccccgagagcagcgactccaccgaccacgtgaagcccaaagagacagagaacaccaagcagcccagcaagagctgccacaagcccaaggccatcgtgcacaccgagaaagtgaacatgatgagcctgaccgtgctgggcctgcggatgctgttcgccaaaaccgtggccgtgaacttcctgctgaccgccaagctgttcttcctcagggccaagcgatctggatctggagcaacaaacttctcactactcaaacaagcaggtgacgtggaggagaatcccgggcctactagcatggccttaccagtgaccgccttgctcctgccgctggccttgctgctccacgccgccaggccggaggttcagctgcttgagtctggcggaggactggttcaacctggcggaagcctgagactgtcttgtgccgccagcggcttcacctttagcagctacgccatgagctgggtccgacaggctcctggcaaaggactggaatgggtgtccagcatcagcggcagcggcgactacatctactacgccgatagcgtgaagggcagattcaccatcagccgggacatcagcaagaacaccctgtacctccagatgaacagcctgagagccgaggacaccgccgtgtactactgtgccaaagaaggcaccggcgctaacagcagcctggccgattatagaggccagggcacactggtcaccgtgtctagtggcggaggaagcggcggaggatctcaggtccagctcgtcgagtccggcggcggcctcgtccaggccggcgactccgtcaccctctcctgcaccgcctccggccgcaccttctcctcctacgccctcgcctggttccgccagcgccccggcaaggagcgcgagttcgtcgccggcctccgctggggcggccccaccaactacgccgactccgtcaaggaccgcttcaccatctccggcgactccgccaagcacaccatgtacctccagatgaactccctcaagcccgaggacaccgccgtctactactgcggctacaaccccggcggctgggccgtcccctcccagtacgagtacgactcctggggccagggcacccaggtcaccgtctcctccggtaccggcggaggcggatctggcggcggaggtagcggtggcggaggatctgaattcgacatccagatgacacagagccctagcagcctgtctgccagcgtgggagacagagtgaccatcacatgcaaggccagcgaccacatcaacaactggctggcctggtatcagcagaagcctggacaggcccctaagctgctgatctacggcgctaccacactggaaacaggcgtgcccagcagattttctggcagcggctctggcaccgactacaccctgacaatatccagcctccagcctgaggacttcgccacctactactgtcagcagagctggaacaccccttggacattcggccagggcaccaagctggaaatcaagagaggcggaggcggaagtggaggcggaggatctggcggcggaggctctcaagttcagcttcaacagcctggcgctgagctggtcaaacctggcgcttctgtgaagatgagctgcaaagccagcggctacgccttcagcagctactggatcaactggatgaagcagaaacccggccagggactcgaatggatcggccaaatctatcccggcgacggcgacaccaactacaacggcaagttcaagggcagagccacactgaccgccgatacctctagcagcacagcctacatgcagctgagcagcctgaccagcgaagatagcgccgtgtacttctgtgcccggtccatcacaacagtcgtgggctgcgctatggactattggggccagggaacaagcgtgaccgtgtctagtacgcgtgaggaggacctgaagaacgtgttcccacctgaggtggccgtgttcgagcctagcgaggccgagatcagccacacccagaaagccaccctcgtgtgcctggctaccggcttctaccccgaccatgtggaactgtcttggtgggtcaacggcaaagaggtgcacagcggcgtgtctaccgacccccagccactgaaagaacagcccgccctgaacgacagccggtactgcctgagcagcagactgagagtgtccgccaccttctggcagaacccccggaaccacttcagatgccaggtgcagttctacggcctgagcgagaacgacgagtggacccaggacagagccaagcccgtgacccagatcgtgtctgccgaagcctggggcagagccgatgatgtgattaagatccactggcaggaaaagaagtccaacaccatcctgggcagccaggaaggcaacaccatgaagaccaacgacacctacatgaagttcagctggctgaccgtgcccgagaagtccctggacaaagaacacagatgcatcgtgcggcacgaaaacaacaagaacggcgtggaccaggaaatcatcttcccacccatcaagaccgatgtgattacaatggaccccaaggacaactgctccaaggacgccaacgataccctgctgctccagctgaccaacaccagcgcctactacatgtacttgttgctgctgctgaagtccgtggtgtacttcgccatcatcacatgctgcctgctgcggagaaccgccttctgctgcaacggcgagaagtctcgcgccaagagaagcggatctggcgtgaagcagaccctgaatttcgacctgctgaagctggctggcgacgtggaatccaacccaggcccttctagaggccatatgaccgagtacaagcccacggtgcgcctcgccacccgcgacgacgtccccagggccgtacgcaccctcgccgccgcgttcgccgactaccccgccacgcgccacaccgtcgatccggaccgccacatcgagcgggtcaccgagctgcaagaactcttcctcacgcgcgtcgggctcgacatcggcaaggtgtgggtcgcggacgacggcgccgcggtggcggtctggaccacgccggagagcgtcgaagcgggggcggtgttcgccgagatcggcccgcgcatggccgagttgagcggttcccggctggccgcgcagcaacagatggaaggcctcctggcgccgcaccggcccaaggagcccgcgtggttcctggccaccgtcggcgtctcgcccgaccaccagggcaagggtctgggcagcgccgtcgtgctccccggagtggaggcggccgagcgcgccggggtgcccgccttcctggagacctccgcgccccgcaacctccccttctacgagcggctcggcttcaccgtcaccgccgacgtcgaggtgcccgaaggaccgcgcacctggtgcatgacccgcaagcccggtgcctga

SEQ ID NO: 17947 - DNA, 3732 bp, synthetic construct
  source 1..3732: mol_type = other DNA
atggccttaccagtgaccgccttgctcctgccgctggccttgctgctccacgccgccaggccgctcgagatccagaaccctgatcctgccgtgtaccagctgcgggatagcaagagcagcgacaagagcgtgtgtctgttcaccgacttcgacagccagaccaacgtgtcccagagcaaggactccgacgtgtacatcaccgataagaccgtgctggacatgcggagcatggacttcaagagcaactccgccgtggcctggtccaacaagtccgatttcgcctgcgccaacgccttcaacaacagcattatccccgaggacacattcttcccaagccccgagagcagcgactccaccgaccacgtgaagcccaaagagacagagaacaccaagcagcccagcaagagctgccacaagcccaaggccatcgtgcacaccgagaaagtgaacatgatgagcctgaccgtgctgggcctgcggatgctgttcgccaaaaccgtggccgtgaacttcctgctgaccgccaagctgttcttcctcagggccaagcgatctggatctggagcaacaaacttctcactactcaaacaagcaggtgacgtggaggagaatcccgggcctactagcatggccttaccagtgaccgccttgctcctgccgctggccttgctgctccacgccgccaggccgggcgtgacacagagccccacacacctgattaagaccagaggccagcaggccacactgagatgcagccctatcagcggccacaccagcgtgtactggtatcagcaggctctcggactgggcctccagttcctgctttggtacgacgagggcgaagagagaaaccggggcaacttccctcctcggttttccggcagacagttccccaactacagcagcgagctgaacgtgaacgccctggaactggaagatagcgccctgtacctgtgtgcctcttctcttggtggacctcgcggactggctggactgagaggggatgagcagtttttcggccctggcaccagactgaccgtgctggaaggcggaggaagcggcggaggatctcaggtccagctcgtcgagtccggcggcggcctcgtccaggccggcgactccgtcaccctctcctgcaccgcctccggccgcaccttctcctcctacgccctcgcctggttccgccagcgccccggcaaggagcgcgagttcgtcgccggcctccgctggggcggccccaccaactacgccgactccgtcaaggaccgcttcaccatctccggcgactccgccaagcacaccatgtacctccagatgaactccctcaagcccgaggacaccgccgtctactactgcggctacaaccccggcggctgggccgtcccctcccagtacgagtacgactcctggggccagggcacccaggtcaccgtctcctccggtaccggcggaggcggatctggcggcggaggtagcggtggcggaggatctgaattcgacatccagatgacacagagccctagcagcctgtctgccagcgtgggagacagagtgaccatcacatgcaaggccagcgaccacatcaacaactggctggcctggtatcagcagaagcctggacaggcccctaagctgctgatctacggcgctaccacactggaaacaggcgtgcccagcagattttctggcagcggctctggcaccgactacaccctgacaatatccagcctccagcctgaggacttcgccacctactactgtcagcagagctggaacaccccttggacattcggccagggcaccaagctggaaatcaagagaggcggaggcggaagtggaggcggaggatctggcggcggaggctctcaagttcagcttcaacagcctggcgctgagctggtcaaacctggcgcttctgtgaagatgagctgcaaagccagcggctacgccttcagcagctactggatcaactggatgaagcagaaacccggccagggactcgaatggatcggccaaatctatcccggcgacggcgacaccaactacaacggcaagttcaagggcagagccacactgaccgccgatacctctagcagcacagcctacatgcagctgagcagcctgaccagcgaagatagcgccgtgtacttctgtgcccggtccatcacaacagtcgtgggctgcgctatggactattggggccagggaacaagcgtgaccgtgtctagtacgcgtgaggaggacctgaagaacgtgttcccacctgaggtggccgtgttcgagcctagcgaggccgagatcagccacacccagaaagccaccctcgtgtgcctggctaccggcttctaccccgaccatgtggaactgtcttggtgggtcaacggcaaagaggtgcacagcggcgtgtctaccgacccccagccactgaaagaacagcccgccctgaacgacagccggtactgcctgagcagcagactgagagtgtccgccaccttctggcagaacccccggaaccacttcagatgccaggtgcagttctacggcctgagcgagaacgacgagtggacccaggacagagccaagcccgtgacccagatcgtgtctgccgaagcctggggcagagccgatgatgtgattaagatccactggcaggaaaagaagtccaacaccatcctgggcagccaggaaggcaacaccatgaagaccaacgacacctacatgaagttcagctggctgaccgtgcccgagaagtccctggacaaagaacacagatgcatcgtgcggcacgaaaacaacaagaacggcgtggaccaggaaatcatcttcccacccatcaagaccgatgtgattacaatggaccccaaggacaactgctccaaggacgccaacgataccctgctgctccagctgaccaacaccagcgcctactacatgtacttgttgctgctgctgaagtccgtggtgtacttcgccatcatcacatgctgcctgctgcggagaaccgccttctgctgcaacggcgagaagtctcgcgccaagagaagcggatctggcgtgaagcagaccctgaatttcgacctgctgaagctggctggcgacgtggaatccaacccaggcccttctagaggccatatgaccgagtacaagcccacggtgcgcctcgccacccgcgacgacgtccccagggccgtacgcaccctcgccgccgcgttcgccgactaccccgccacgcgccacaccgtcgatccggaccgccacatcgagcgggtcaccgagctgcaagaactcttcctcacgcgcgtcgggctcgacatcggcaaggtgtgggtcgcggacgacggcgccgcggtggcggtctggaccacgccggagagcgtcgaagcgggggcggtgttcgccgagatcggcccgcgcatggccgagttgagcggttcccggctggccgcgcagcaacagatggaaggcctcctggcgccgcaccggcccaaggagcccgcgtggttcctggccaccgtcggcgtctcgcccgaccaccagggcaagggtctgggcagcgccgtcgtgctccccggagtggaggcggccgagcgcgccggggtgcccgccttcctggagacctccgcgccccgcaacctccccttctacgagcggctcggcttcaccgtcaccgccgacgtcgaggtgcccgaaggaccgcgcacctggtgcatgacccgcaagcccggtgcctga

SEQ ID NO: 17948 - DNA, 3012 bp, synthetic construct
  source 1..3012: mol_type = other DNA
atggccttaccagtgaccgccttgctcctgccgctggccttgctgctccacgccgccaggccgctcgagatccagaaccctgatcctgccgtgtaccagctgcgggatagcaagagcagcgacaagagcgtgtgtctgttcaccgacttcgacagccagaccaacgtgtcccagagcaaggactccgacgtgtacatcaccgataagaccgtgctggacatgcggagcatggacttcaagagcaactccgccgtggcctggtccaacaagtccgatttcgcctgcgccaacgccttcaacaacagcattatccccgaggacacattcttcccaagccccgagagcagcgactccaccgaccacgtgaagcccaaagagacagagaacaccaagcagcccagcaagagctgccacaagcccaaggccatcgtgcacaccgagaaagtgaacatgatgagcctgaccgtgctgggcctgcggatgctgttcgccaaaaccgtggccgtgaacttcctgctgaccgccaagctgttcttcctcagggccaagcgatctggatctggagcaacaaacttctcactactcaaacaagcaggtgacgtggaggagaatcccgggcctactagcatggccttaccagtgaccgccttgctcctgccgctggccttgctgctccacgccgccaggccgggcgtgacacagagccccacacacctgattaagaccagaggccagcaggccacactgagatgcagccctatcagcggccacaccagcgtgtactggtatcagcaggctctcggactgggcctccagttcctgctttggtacgacgagggcgaagagagaaaccggggcaacttccctcctcggttttccggcagacagttccccaactacagcagcgagctgaacgtgaacgccctggaactggaagatagcgccctgtacctgtgtgcctcttctcttggtggacctcgcggactggctggactgagaggggatgagcagtttttcggccctggcaccagactgaccgtgctggaaggcggaggaagcggcggaggatctggcgtgacacagagccccacacacctgattaagaccagaggccagcaggccacactgagatgcagccctatcagcggccacaccagcgtgtactggtatcagcaggctctcggactgggcctccagttcctgctttggtacgacgagggcgaagagagaaaccggggcaacttccctcctcggttttccggcagacagttccccaactacagcagcgagctgaacgtgaacgccctggaactggaagatagcgccctgtacctgtgtgccagctctctcggcggagatgaactgggagccgatggcaacgagcagttctttggccctggcaccagactgaccgtgctggaaggtaccggcggaggcggatctggcggcggaggtagcggtggcggaggatctgaattcgacatccagatgacacagagccctagcagcctgtctgccagcgtgggagacagagtgaccatcacatgcaaggccagcgaccacatcaacaactggctggcctggtatcagcagaagcctggacaggcccctaagctgctgatctacggcgctaccacactggaaacaggcgtgcccagcagattttctggcagcggctctggcaccgactacaccctgacaatatccagcctccagcctgaggacttcgccacctactactgtcagcagagctggaacaccccttggacattcggccagggcaccaagctggaaatcaagagaggcggaggcggaagtggaggcggaggatctggcggcggaggctctcaagttcagcttcaacagcctggcgctgagctggtcaaacctggcgcttctgtgaagatgagctgcaaagccagcggctacgccttcagcagctactggatcaactggatgaagcagaaacccggccagggactcgaatggatcggccaaatctatcccggcgacggcgacaccaactacaacggcaagttcaagggcagagccacactgaccgccgatacctctagcagcacagcctacatgcagctgagcagcctgaccagcgaagatagcgccgtgtacttctgtgcccggtccatcacaacagtcgtgggctgcgctatggactattggggccagggaacaagcgtgaccgtgtctagtacgcgtgaggaggacctgaagaacgtgttcccacctgaggtggccgtgttcgagcctagcgaggccgagatcagccacacccagaaagccaccctcgtgtgcctggctaccggcttctaccccgaccatgtggaactgtcttggtgggtcaacggcaaagaggtgcacagcggcgtgtctaccgacccccagccactgaaagaacagcccgccctgaacgacagccggtactgcctgagcagcagactgagagtgtccgccaccttctggcagaacccccggaaccacttcagatgccaggtgcagttctacggcctgagcgagaacgacgagtggacccaggacagagccaagcccgtgacccagatcgtgtctgccgaagcctggggcagagccgatgatgtgattaagatccactggcaggaaaagaagtccaacaccatcctgggcagccaggaaggcaacaccatgaagaccaacgacacctacatgaagttcagctggctgaccgtgcccgagaagtccctggacaaagaacacagatgcatcgtgcggcacgaaaacaacaagaacggcgtggaccaggaaatcatcttcccacccatcaagaccgatgtgattacaatggaccccaaggacaactgctccaaggacgccaacgataccctgctgctccagctgaccaacaccagcgcctactacatgtacttgttgctgctgctgaagtccgtggtgtacttcgccatcatcacatgctgcctgctgcggagaaccgccttctgctgcaacggcgagaagtct

SEQ ID NO: 17949 - DNA, 2574 bp, synthetic construct
  source 1..2574: mol_type = other DNA
atggccttaccagtgaccgccttgctcctgccgctggccttgctgctccacgccgccaggccgctcgagatccagaaccctgatcctgccgtgtaccagctgcgggatagcaagagcagcgacaagagcgtgtgtctgttcaccgacttcgacagccagaccaacgtgtcccagagcaaggactccgacgtgtacatcaccgataagaccgtgctggacatgcggagcatggacttcaagagcaactccgccgtggcctggtccaacaagtccgatttcgcctgcgccaacgccttcaacaacagcattatccccgaggacacattcttcccaagccccgagagcagcgactccaccgaccacgtgaagcccaaagagacagagaacaccaagcagcccagcaagagctgccacaagcccaaggccatcgtgcacaccgagaaagtgaacatgatgagcctgaccgtgctgggcctgcggatgctgttcgccaaaaccgtggccgtgaacttcctgctgaccgccaagctgttcttcctcagggccaagcgatctggatctggagcaacaaacttctcactactcaaacaagcaggtgacgtggaggagaatcccgggcctactagcatggccctgcccgtgacagccctgctgctgcctctggctctgctgctgcacgccgccagacccgatgaattcggctctgacctgggcatcaagctgctgttcgccgctgccaagggccaggacgacgaagtgcggattctgctggctgctggggccgacgtgaacgccaaggatttcgagggctacacccccctgcacgtggccgcctatgatggacacctggaaatcgtggaagtgctgctgaaggctggcgctgatgtgaatgccaaagacagccagggccggacccctctgcatgaagccgcctacagcggccatctggaaattgtggaagtgctgctgaaagccggggcagacgtgaacgctcaggacgacgctggcgagacaccagccgatctggctgcagcttggggccacgaagatatcgccgaggtgctgcagaagacgcgtgaggaggacctgaagaacgtgttcccacctgaggtggccgtgttcgagcctagcgaggccgagatcagccacacccagaaagccaccctcgtgtgcctggctaccggcttctaccccgaccatgtggaactgtcttggtgggtcaacggcaaagaggtgcacagcggcgtgtctaccgacccccagccactgaaagaacagcccgccctgaacgacagccggtactgcctgagcagcagactgagagtgtccgccaccttctggcagaacccccggaaccacttcagatgccaggtgcagttctacggcctgagcgagaacgacgagtggacccaggacagagccaagcccgtgacccagatcgtgtctgccgaagcctggggcagagccgatgatgtgattaagatccactggcaggaaaagaagtccaacaccatcctgggcagccaggaaggcaacaccatgaagaccaacgacacctacatgaagttcagctggctgaccgtgcccgagaagtccctggacaaagaacacagatgcatcgtgcggcacgaaaacaacaagaacggcgtggaccaggaaatcatcttcccacccatcaagaccgatgtgattacaatggaccccaaggacaactgctccaaggacgccaacgataccctgctgctccagctgaccaacaccagcgcctactacatgtacttgttgctgctgctgaagtccgtggtgtacttcgccatcatcacatgctgcctgctgcggagaaccgccttctgctgcaacggcgagaagtctcgcgccaagagaagcggatctggcgtgaagcagaccctgaatttcgacctgctgaagctggctggcgacgtggaatccaacccaggcccttctagaggccatatgaccgagtacaagcccacggtgcgcctcgccacccgcgacgacgtccccagggccgtacgcaccctcgccgccgcgttcgccgactaccccgccacgcgccacaccgtcgatccggaccgccacatcgagcgggtcaccgagctgcaagaactcttcctcacgcgcgtcgggctcgacatcggcaaggtgtgggtcgcggacgacggcgccgcggtggcggtctggaccacgccggagagcgtcgaagcgggggcggtgttcgccgagatcggcccgcgcatggccgagttgagcggttcccggctggccgcgcagcaacagatggaaggcctcctggcgccgcaccggcccaaggagcccgcgtggttcctggccaccgtcggcgtctcgcccgaccaccagggcaagggtctgggcagcgccgtcgtgctccccggagtggaggcggccgagcgcgccggggtgcccgccttcctggagacctccgcgccccgcaacctccccttctacgagcggctcggcttcaccgtcaccgccgacgtcgaggtgcccgaaggaccgcgcacctggtgcatgacccgcaagcccggtgcctga

SEQ ID NO: 17950 - DNA, 2361 bp, synthetic construct
  source 1..2361: mol_type = other DNA
atggccttaccagtgaccgccttgctcctgccgctggccttgctgctccacgccgccaggccgctcgagatccagaaccctgatcctgccgtgtaccagctgcgggatagcaagagcagcgacaagagcgtgtgtctgttcaccgacttcgacagccagaccaacgtgtcccagagcaaggactccgacgtgtacatcaccgataagaccgtgctggacatgcggagcatggacttcaagagcaactccgccgtggcctggtccaacaagtccgatttcgcctgcgccaacgccttcaacaacagcattatccccgaggacacattcttcccaagccccgagagcagcgactccaccgaccacgtgaagcccaaagagacagagaacaccaagcagcccagcaagagctgccacaagcccaaggccatcgtgcacaccgagaaagtgaacatgatgagcctgaccgtgctgggcctgcggatgctgttcgccaaaaccgtggccgtgaacttcctgctgaccgccaagctgttcttcctcagggccaagcgatctggatctggagcaacaaacttctcactactcaaacaagcaggtgacgtggaggagaatcccgggcctactagcatggactggatttggcgcatccttttccttgtcggcgctgctaccggcgcccattccttcgaaggcagcggattcgaatacgccaaagagatgcggaacgcctactgggagatcgccctgctgcccaatctgaccaaccagcagaagagagcccccatcagaaagctgtacgacgacccctcccagagcagcgagctgctgtctgaggctaaaaaactgaacgatagccagacgcgtgaggaggacctgaagaacgtgttcccacctgaggtggccgtgttcgagcctagcgaggccgagatcagccacacccagaaagccaccctcgtgtgcctggctaccggcttctaccccgaccatgtggaactgtcttggtgggtcaacggcaaagaggtgcacagcggcgtgtctaccgacccccagccactgaaagaacagcccgccctgaacgacagccggtactgcctgagcagcagactgagagtgtccgccaccttctggcagaacccccggaaccacttcagatgccaggtgcagttctacggcctgagcgagaacgacgagtggacccaggacagagccaagcccgtgacccagatcgtgtctgccgaagcctggggcagagccgatgatgtgattaagatccactggcaggaaaagaagtccaacaccatcctgggcagccaggaaggcaacaccatgaagaccaacgacacctacatgaagttcagctggctgaccgtgcccgagaagtccctggacaaagaacacagatgcatcgtgcggcacgaaaacaacaagaacggcgtggaccaggaaatcatcttcccacccatcaagaccgatgtgattacaatggaccccaaggacaactgctccaaggacgccaacgataccctgctgctccagctgaccaacaccagcgcctactacatgtacttgttgctgctgctgaagtccgtggtgtacttcgccatcatcacatgctgcctgctgcggagaaccgccttctgctgcaacggcgagaagtctcgcgccaagagaagcggatctggcgtgaagcagaccctgaatttcgacctgctgaagctggctggcgacgtggaatccaacccaggcccttctagaggccatatgaccgagtacaagcccacggtgcgcctcgccacccgcgacgacgtccccagggccgtacgcaccctcgccgccgcgttcgccgactaccccgccacgcgccacaccgtcgatccggaccgccacatcgagcgggtcaccgagctgcaagaactcttcctcacgcgcgtcgggctcgacatcggcaaggtgtgggtcgcggacgacggcgccgcggtggcggtctggaccacgccggagagcgtcgaagcgggggcggtgttcgccgagatcggcccgcgcatggccgagttgagcggttcccggctggccgcgcagcaacagatggaaggcctcctggcgccgcaccggcccaaggagcccgcgtggttcctggccaccgtcggcgtctcgcccgaccaccagggcaagggtctgggcagcgccgtcgtgctccccggagtggaggcggccgagcgcgccggggtgcccgccttcctggagacctccgcgccccgcaacctccccttctacgagcggctcggcttcaccgtcaccgccgacgtcgaggtgcccgaaggaccgcgcacctggtgcatgacccgcaagcccggtgcctga

SEQ ID NO: 17951 - DNA, 3027 bp, synthetic construct
  source 1..3027: mol_type = other DNA
atggccttaccagtgaccgccttgctcctgccgctggccttgctgctccacgccgccaggccgctcgagatccagaaccctgatcctgccgtgtaccagctgcgggatagcaagagcagcgacaagagcgtgtgtctgttcaccgacttcgacagccagaccaacgtgtcccagagcaaggactccgacgtgtacatcaccgataagaccgtgctggacatgcggagcatggacttcaagagcaactccgccgtggcctggtccaacaagtccgatttcgcctgcgccaacgccttcaacaacagcattatccccgaggacacattcttcccaagccccgagagcagcgactccaccgaccacgtgaagcccaaagagacagagaacaccaagcagcccagcaagagctgccacaagcccaaggccatcgtgcacaccgagaaagtgaacatgatgagcctgaccgtgctgggcctgcggatgctgttcgccaaaaccgtggccgtgaacttcctgctgaccgccaagctgttcttcctcagggccaagcgatctggatctggagcaacaaacttctcactactcaaacaagcaggtgacgtggaggagaatcccgggcctactagcatggccctgcccgtgacagccctgctgctgcctctggctctgctgctgcacgccgccagacccgatgaattcgaggtgcaactggtggaaagcggcggaggcctggtgcaggctggcggatctctgagactgagctgtgccgccagcggcatcaccttcagcatcaacacaatgggctggtacagacaggcccctggcaagcagagggaactggtggccctgatctccagcatcggcgacacctactacgccgacagcgtgaagggccggttcaccatcagccgggacaacgccaagaacaccgtgtacctccagatgaacagcctgaagcccgaggacaccgccgtgtactactgcaagcggttcagaacagccgcccagggcaccgattattggggccagggaacacaagtgaccgtgtcctctctcgagggaggaggcggctccgggggaggcggaagtggaggcggaggatctgggtctggaggaagcggatctggaggctcagggtcagggggctcaggcagtggaggctctttcgaagtgcaactggtggaatctgggggcggactggtgcagccaggcggaagtctgaggctgtcttgtgccgcctccggcagcatcttcggcttcaacgacatggcctggtatcggcaggctcccggaaaacagcgcgagctggtggctctgattagcagagtgggcgtgaccagcagcgccgactctgtgaagggcagattcacaatctccagagtgaacgccaaggatacagtgtacctccagatgaactctctgaaacctgaggatacagcagtgtactattgctacatggaccagcggctggacggcagcacactggcctactggggacagggaactcaagtgacagtgtctagcacgcgtgaggaggacctgaagaacgtgttcccacctgaggtggccgtgttcgagcctagcgaggccgagatcagccacacccagaaagccaccctcgtgtgcctggctaccggcttctaccccgaccatgtggaactgtcttggtgggtcaacggcaaagaggtgcacagcggcgtgtctaccgacccccagccactgaaagaacagcccgccctgaacgacagccggtactgcctgagcagcagactgagagtgtccgccaccttctggcagaacccccggaaccacttcagatgccaggtgcagttctacggcctgagcgagaacgacgagtggacccaggacagagccaagcccgtgacccagatcgtgtctgccgaagcctggggcagagccgatgatgtgattaagatccactggcaggaaaagaagtccaacaccatcctgggcagccaggaaggcaacaccatgaagaccaacgacacctacatgaagttcagctggctgaccgtgcccgagaagtccctggacaaagaacacagatgcatcgtgcggcacgaaaacaacaagaacggcgtggaccaggaaatcatcttcccacccatcaagaccgatgtgattacaatggaccccaaggacaactgctccaaggacgccaacgataccctgctgctccagctgaccaacaccagcgcctactacatgtacttgttgctgctgctgaagtccgtggtgtacttcgccatcatcacatgctgcctgctgcggagaaccgccttctgctgcaacggcgagaagtctcgcgccaagagaagcggatctggcgtgaagcagaccctgaatttcgacctgctgaagctggctggcgacgtggaatccaacccaggcccttctagaggccatatgaccgagtacaagcccacggtgcgcctcgccacccgcgacgacgtccccagggccgtacgcaccctcgccgccgcgttcgccgactaccccgccacgcgccacaccgtcgatccggaccgccacatcgagcgggtcaccgagctgcaagaactcttcctcacgcgcgtcgggctcgacatcggcaaggtgtgggtcgcggacgacggcgccgcggtggcggtctggaccacgccggagagcgtcgaagcgggggcggtgttcgccgagatcggcccgcgcatggccgagttgagcggttcccggctggccgcgcagcaacagatggaaggcctcctggcgccgcaccggcccaaggagcccgcgtggttcctggccaccgtcggcgtctcgcccgaccaccagggcaagggtctgggcagcgccgtcgtgctccccggagtggaggcggccgagcgcgccggggtgcccgccttcctggagacctccgcgccccgcaacctccccttctacgagcggctcggcttcaccgtcaccgccgacgtcgaggtgcccgaaggaccgcgcacctggtgcatgacccgcaagcccggtgcctga

SEQ ID NO: 17952 - DNA, 2769 bp, synthetic construct
  source 1..2769: mol_type = other DNA
atggccttaccagtgaccgccttgctcctgccgctggccttgctgctccacgccgccaggccgctcgagatccagaaccctgatcctgccgtgtaccagctgcgggatagcaagagcagcgacaagagcgtgtgtctgttcaccgacttcgacagccagaccaacgtgtcccagagcaaggactccgacgtgtacatcaccgataagaccgtgctggacatgcggagcatggacttcaagagcaactccgccgtggcctggtccaacaagtccgatttcgcctgcgccaacgccttcaacaacagcattatccccgaggacacattcttcccaagccccgagagcagcgactccaccgaccacgtgaagcccaaagagacagagaacaccaagcagcccagcaagagctgccacaagcccaaggccatcgtgcacaccgagaaagtgaacatgatgagcctgaccgtgctgggcctgcggatgctgttcgccaaaaccgtggccgtgaacttcctgctgaccgccaagctgttcttcctcagggccaagcgatctggatctggagcaacaaacttctcactactcaaacaagcaggtgacgtggaggagaatcccgggcctactagcatggcccttccagtcactgccttgctgttgcctctggcgctcctgctccacgccgctagaccgggcatgagaaccgaggacctgcctaaggccgtggtgttcctggaaccccagtggtacagagtgctggaaaaggacagcgtgaccctgaagtgccagggcgcctacagccccgaggacaatagcacccagtggttccacaacgagagcctgatctccagccaggccagcagctacttcatcgacgccgccaccgtggacgacagcggcgagtatagatgccagaccaacctgagcaccctgagcgaccccgtgcagctggaagtgcacatcggatggctgctgctgcaggcccccagatgggtgttcaaagaagaggaccccatccacctgagatgccactcttggaagaacaccgccctgcacaaagtgacctacctgcagaacggcaagggcagaaagtacttccaccacaacagcgacttctacatccccaaggccaccctgaaggactccggctcctacttctgcagaggcctcgtgggcagcaagaacgtgtccagcgagacagtgaacatcaccatcacccagggcctggccgtgtctaccatcagcagctttttcccacccggctaccagacgcgtgaggaggacctgaagaacgtgttcccacctgaggtggccgtgttcgagcctagcgaggccgagatcagccacacccagaaagccaccctcgtgtgcctggctaccggcttctaccccgaccatgtggaactgtcttggtgggtcaacggcaaagaggtgcacagcggcgtgtctaccgacccccagccactgaaagaacagcccgccctgaacgacagccggtactgcctgagcagcagactgagagtgtccgccaccttctggcagaacccccggaaccacttcagatgccaggtgcagttctacggcctgagcgagaacgacgagtggacccaggacagagccaagcccgtgacccagatcgtgtctgccgaagcctggggcagagccgatgatgtgattaagatccactggcaggaaaagaagtccaacaccatcctgggcagccaggaaggcaacaccatgaagaccaacgacacctacatgaagttcagctggctgaccgtgcccgagaagtccctggacaaagaacacagatgcatcgtgcggcacgaaaacaacaagaacggcgtggaccaggaaatcatcttcccacccatcaagaccgatgtgattacaatggaccccaaggacaactgctccaaggacgccaacgataccctgctgctccagctgaccaacaccagcgcctactacatgtacttgttgctgctgctgaagtccgtggtgtacttcgccatcatcacatgctgcctgctgcggagaaccgccttctgctgcaacggcgagaagtctcgcgccaagagaagcggatctggcgtgaagcagaccctgaatttcgacctgctgaagctggctggcgacgtggaatccaacccaggcccttctagaggccatatgaccgagtacaagcccacggtgcgcctcgccacccgcgacgacgtccccagggccgtacgcaccctcgccgccgcgttcgccgactaccccgccacgcgccacaccgtcgatccggaccgccacatcgagcgggtcaccgagctgcaagaactcttcctcacgcgcgtcgggctcgacatcggcaaggtgtgggtcgcggacgacggcgccgcggtggcggtctggaccacgccggagagcgtcgaagcgggggcggtgttcgccgagatcggcccgcgcatggccgagttgagcggttcccggctggccgcgcagcaacagatggaaggcctcctggcgccgcaccggcccaaggagcccgcgtggttcctggccaccgtcggcgtctcgcccgaccaccagggcaagggtctgggcagcgccgtcgtgctccccggagtggaggcggccgagcgcgccggggtgcccgccttcctggagacctccgcgccccgcaacctccccttctacgagcggctcggcttcaccgtcaccgccgacgtcgaggtgcccgaaggaccgcgcacctggtgcatgacccgcaagcccggtgcctga

SEQ ID NO: 17953 - DNA, 1650 bp, synthetic construct
  source 1..1650: mol_type = other DNA
atggccttaccagtgaccgccttgctcctgccgctggccttgctgctccacgccgccaggccgctcgagatccagaaccctgatcctgccgtgtaccagctgcgggatagcaagagcagcgacaagagcgtgtgtctgttcaccgacttcgacagccagaccaacgtgtcccagagcaaggactccgacgtgtacatcaccgataagaccgtgctggacatgcggagcatggacttcaagagcaactccgccgtggcctggtccaacaagtccgatttcgcctgcgccaacgccttcaacaacagcattatccccgaggacacattcttcccaagccccgagagcagcgactccaccgaccacgtgaagcccaaagagacagagaacaccaagcagcccagcaagagctgccacaagcccaaggccatcgtgcacaccgagaaagtgaacatgatgagcctgaccgtgctgggcctgcggatgctgttcgccaaaaccgtggccgtgaacttcctgctgaccgccaagctgttcttcctcagggccaagcgatctggatctggagcaacaaacttctcactactcaaacaagcaggtgacgtggaggagaatcccgggcctactagcgccaccatggccttaccagtgaccgccttgctcctgccgctggccttgctgctccacgccgccaggccgatggaccccgacctggaaatcagagccgccttcctgcggcagagaaacacagccctgagaacagaggtggccgagctggaacaagaggtgcagcggctggaaaacgaggtgtcccagtacgagacaagatacggccctctcggaggcggaaaaacgcgtgaggaggacctgaagaacgtgttcccacctgaggtggccgtgttcgagcctagcgaggccgagatcagccacacccagaaagccaccctcgtgtgcctggctaccggcttctaccccgaccatgtggaactgtcttggtgggtcaacggcaaagaggtgcacagcggcgtgtctaccgacccccagccactgaaagaacagcccgccctgaacgacagccggtactgcctgagcagcagactgagagtgtccgccaccttctggcagaacccccggaaccacttcagatgccaggtgcagttctacggcctgagcgagaacgacgagtggacccaggacagagccaagcccgtgacccagatcgtgtctgccgaagcctggggcagagccgatgatgtgattaagatccactggcaggaaaagaagtccaacaccatcctgggcagccaggaaggcaacaccatgaagaccaacgacacctacatgaagttcagctggctgaccgtgcccgagaagtccctggacaaagaacacagatgcatcgtgcggcacgaaaacaacaagaacggcgtggaccaggaaatcatcttcccacccatcaagaccgatgtgattacaatggaccccaaggacaactgctccaaggacgccaacgataccctgctgctccagctgaccaacaccagcgcctactacatgtacttgttgctgctgctgaagtccgtggtgtacttcgccatcatcacatgctgcctgctgcggagaaccgccttctgctgcaacggcgagaagtct

SEQ ID NO: 17954 - DNA, 1650 bp, synthetic construct
  source 1..1650: mol_type = other DNA
atggccttaccagtgaccgccttgctcctgccgctggccttgctgctccacgccgccaggccgctcgagatccagaaccctgatcctgccgtgtaccagctgcgggatagcaagagcagcgacaagagcgtgtgtctgttcaccgacttcgacagccagaccaacgtgtcccagagcaaggactccgacgtgtacatcaccgataagaccgtgctggacatgcggagcatggacttcaagagcaactccgccgtggcctggtccaacaagtccgatttcgcctgcgccaacgccttcaacaacagcattatccccgaggacacattcttcccaagccccgagagcagcgactccaccgaccacgtgaagcccaaagagacagagaacaccaagcagcccagcaagagctgccacaagcccaaggccatcgtgcacaccgagaaagtgaacatgatgagcctgaccgtgctgggcctgcggatgctgttcgccaaaaccgtggccgtgaacttcctgctgaccgccaagctgttcttcctcagggccaagcgatctggatctggagcaacaaacttctcactactcaaacaagcaggtgacgtggaggagaatcccgggcctactagcgccaccatggccttaccagtgaccgccttgctcctgccgctggccttgctgctccacgccgccaggccgatggaccctgatctcgaaattgaggccgcctttctggaacgcgagaacactgccctggaaaccagggtcgcagagctgagacagagagtgcagagactgcggaacagagtgtctcagtaccgcaccagatatggcccactcggcggaggtaaaacgcgtgaggaggacctgaagaacgtgttcccacctgaggtggccgtgttcgagcctagcgaggccgagatcagccacacccagaaagccaccctcgtgtgcctggctaccggcttctaccccgaccatgtggaactgtcttggtgggtcaacggcaaagaggtgcacagcggcgtgtctaccgacccccagccactgaaagaacagcccgccctgaacgacagccggtactgcctgagcagcagactgagagtgtccgccaccttctggcagaacccccggaaccacttcagatgccaggtgcagttctacggcctgagcgagaacgacgagtggacccaggacagagccaagcccgtgacccagatcgtgtctgccgaagcctggggcagagccgatgatgtgattaagatccactggcaggaaaagaagtccaacaccatcctgggcagccaggaaggcaacaccatgaagaccaacgacacctacatgaagttcagctggctgaccgtgcccgagaagtccctggacaaagaacacagatgcatcgtgcggcacgaaaacaacaagaacggcgtggaccaggaaatcatcttcccacccatcaagaccgatgtgattacaatggaccccaaggacaactgctccaaggacgccaacgataccctgctgctccagctgaccaacaccagcgcctactacatgtacttgttgctgctgctgaagtccgtggtgtacttcgccatcatcacatgctgcctgctgcggagaaccgccttctgctgcaacggcgagaagtct

SEQ ID NO: 17955 - DNA, 2355 bp, synthetic construct
  source 1..2355: mol_type = other DNA
atggccttaccagtgaccgccttgctcctgccgctggccttgctgctccacgccgccaggccgctcgagatccagaaccctgatcctgccgtgtaccagctgcgggatagcaagagcagcgacaagagcgtgtgtctgttcaccgacttcgacagccagaccaacgtgtcccagagcaaggactccgacgtgtacatcaccgataagaccgtgctggacatgcggagcatggacttcaagagcaactccgccgtggcctggtccaacaagtccgatttcgcctgcgccaacgccttcaacaacagcattatccccgaggacacattcttcccaagccccgagagcagcgactccaccgaccacgtgaagcccaaagagacagagaacaccaagcagcccagcaagagctgccacaagcccaaggccatcgtgcacaccgagaaagtgaacatgatgagcctgaccgtgctgggcctgcggatgctgttcgccaaaaccgtggccgtgaacttcctgctgaccgccaagctgttcttcctcagggccaagcgatctggatctggagcaacaaacttctcactactcaaacaagcaggtgacgtggaggagaatcccgggcctactagcgccaccatggccttaccagtgaccgccttgctcctgccgctggccttgctgctccacgccgccaggccgctgttcaatcaagaggtgcagatccctctgaccgagagctactgtggcccctgtcctaagaactggatctgctacaagaacaactgctaccagttcttcgacgagagcaagaattggtacgagagccaggccagctgcatgagccagaatgccagcctgctgaaggtgtacagcaaagaggaccaggacctgctgaaactggtcaagagcgcccactggatgggccttgtgcacatccccaccaatggctcttggcagtgggaggacggcagcattctgagccctaacctgctgaccatcatcgagatgcagaagggcgactgcgccctgtacgccagcagctttaagggctacatcgagaattgcagcaccccgaacacctacatctgtatgcagagaaccgtttctggcggaggcggctctggaggaggcggaagtggcggcggaggcgacctctttaatcaagaagtccagattccactcaccgaatcctactgcggaccttgtccaaaaaattggatttgttataagaacaactgttatcaattctttgatgagtctaaaaattggtatgagtcccaggcttcctgcatgtctcagaacgcttctctgctgaaagtctactctaaagaagatcaggatctcctgaagctcgtcaagtctgcccattggatggggctcgtccacattcctaccaacggaagctggcaatgggaagatggctccatcctgtctccaaatctgctcacgattattgaaatgcagaaaggggattgtgctctctacgccagctccttcaagggatatattgagaactgtagcacgcccaatacttatatctgtatgcaacggaccgtgacgcgtgaggaggacctgaagaacgtgttcccacctgaggtggccgtgttcgagcctagcgaggccgagatcagccacacccagaaagccaccctcgtgtgcctggctaccggcttctaccccgaccatgtggaactgtcttggtgggtcaacggcaaagaggtgcacagcggcgtgtctaccgacccccagccactgaaagaacagcccgccctgaacgacagccggtactgcctgagcagcagactgagagtgtccgccaccttctggcagaacccccggaaccacttcagatgccaggtgcagttctacggcctgagcgagaacgacgagtggacccaggacagagccaagcccgtgacccagatcgtgtctgccgaagcctggggcagagccgatgatgtgattaagatccactggcaggaaaagaagtccaacaccatcctgggcagccaggaaggcaacaccatgaagaccaacgacacctacatgaagttcagctggctgaccgtgcccgagaagtccctggacaaagaacacagatgcatcgtgcggcacgaaaacaacaagaacggcgtggaccaggaaatcatcttcccacccatcaagaccgatgtgattacaatggaccccaaggacaactgctccaaggacgccaacgataccctgctgctccagctgaccaacaccagcgcctactacatgtacttgttgctgctgctgaagtccgtggtgtacttcgccatcatcacatgctgcctgctgcggagaaccgccttctgctgcaacggcgagaagtct

SEQ ID NO: 17956 - DNA, 2355 bp, synthetic construct
  source 1..2355: mol_type = other DNA
atggccttaccagtgaccgccttgctcctgccgctggccttgctgctccacgccgccaggccgctcgagatccagaaccctgatcctgccgtgtaccagctgcgggatagcaagagcagcgacaagagcgtgtgtctgttcaccgacttcgacagccagaccaacgtgtcccagagcaaggactccgacgtgtacatcaccgataagaccgtgctggacatgcggagcatggacttcaagagcaactccgccgtggcctggtccaacaagtccgatttcgcctgcgccaacgccttcaacaacagcattatccccgaggacacattcttcccaagccccgagagcagcgactccaccgaccacgtgaagcccaaagagacagagaacaccaagcagcccagcaagagctgccacaagcccaaggccatcgtgcacaccgagaaagtgaacatgatgagcctgaccgtgctgggcctgcggatgctgttcgccaaaaccgtggccgtgaacttcctgctgaccgccaagctgttcttcctcagggccaagcgatctggatctggagcaacaaacttctcactactcaaacaagcaggtgacgtggaggagaatcccgggcctactagcgccaccatggccttaccagtgaccgccttgctcctgccgctggccttgctgctccacgccgccaggccgctgttcaatcaagaggtgcagatccctctgaccgagagctactgtggcccctgtcctaagaactggatctgctacaagaacaactgctaccagttcttcgacgagagcaagaattggtacgagagccaggccagctgcatgagccagaatgccagcctgctgaaggtgtacagcaaagaggaccaggacctgctgaaactggtcaagagcgcccactggatgggccttgtgcacatccccaccaatggctcttggcagtgggaggacggcagcattctgagccctaacctgctgaccatcatcgagatgcagaagggcgactgcgccctgtacgccagcagctttaagggcttcatcgagaattgcagcaccccgaacacctacatctgtatgcagagaaccgttggcggaggcggaagtggaggcggaggatctggcggcggaggctctgacctctttaatcaagaagtccagattccactcaccgaatcctactgcggaccttgtccaaaaaattggatttgttataagaacaactgttatcaattctttgatgagtctaaaaattggtatgagtcccaggcttcctgcatgtctcagaacgcttctctgctgaaagtctactctaaagaagatcaggatctcctgaagctcgtcaagtctgcccattggatggggctcgtccacattcctaccaacggaagctggcaatgggaagatggctccatcctgtctccaaatctgctcacgattattgaaatgcagaaaggggattgtgctctctacgccagctccttcaagggatttattgagaactgtagcacgcccaatacttatatctgtatgcaacggaccgtgacgcgtgaggaggacctgaagaacgtgttcccacctgaggtggccgtgttcgagcctagcgaggccgagatcagccacacccagaaagccaccctcgtgtgcctggctaccggcttctaccccgaccatgtggaactgtcttggtgggtcaacggcaaagaggtgcacagcggcgtgtctaccgacccccagccactgaaagaacagcccgccctgaacgacagccggtactgcctgagcagcagactgagagtgtccgccaccttctggcagaacccccggaaccacttcagatgccaggtgcagttctacggcctgagcgagaacgacgagtggacccaggacagagccaagcccgtgacccagatcgtgtctgccgaagcctggggcagagccgatgatgtgattaagatccactggcaggaaaagaagtccaacaccatcctgggcagccaggaaggcaacaccatgaagaccaacgacacctacatgaagttcagctggctgaccgtgcccgagaagtccctggacaaagaacacagatgcatcgtgcggcacgaaaacaacaagaacggcgtggaccaggaaatcatcttcccacccatcaagaccgatgtgattacaatggaccccaaggacaactgctccaaggacgccaacgataccctgctgctccagctgaccaacaccagcgcctactacatgtacttgttgctgctgctgaagtccgtggtgtacttcgccatcatcacatgctgcctgctgcggagaaccgccttctgctgcaacggcgagaagtct

SEQ ID NO: 17957 - DNA, 2433 bp, synthetic construct
  source 1..2433: mol_type = other DNA
atggccttaccagtgaccgccttgctcctgccgctggccttgctgctccacgccgccaggccgctcgagatccagaaccctgatcctgccgtgtaccagctgcgggatagcaagagcagcgacaagagcgtgtgtctgttcaccgacttcgacagccagaccaacgtgtcccagagcaaggactccgacgtgtacatcaccgataagaccgtgctggacatgcggagcatggacttcaagagcaactccgccgtggcctggtccaacaagtccgatttcgcctgcgccaacgccttcaacaacagcattatccccgaggacacattcttcccaagccccgagagcagcgactccaccgaccacgtgaagcccaaagagacagagaacaccaagcagcccagcaagagctgccacaagcccaaggccatcgtgcacaccgagaaagtgaacatgatgagcctgaccgtgctgggcctgcggatgctgttcgccaaaaccgtggccgtgaacttcctgctgaccgccaagctgttcttcctcagggccaagcgatctggatctggagcaacaaacttctcactactcaaacaagcaggtgacgtggaggagaatcccgggcctactagcatggccttaccagtgaccgccttgctcctgccgctggccttgctgctccacgccgccaggccgatggaccccgacctggaaatcagagccgccttcctgcggcagagaaacacagccctgagaacagaggtggccgagctggaacaagaggtgcagcggctggaaaacgaggtgtcccagtacgagacaagatacggccctctcggaggcggaaaaggtaccggcggaggcggatctggcggcggaggtagcggtggcggaggatctgaattcgacatccagatgacacagagccctagcagcctgtctgccagcgtgggagacagagtgaccatcacatgcaaggccagcgaccacatcaacaactggctggcctggtatcagcagaagcctggacaggcccctaagctgctgatctacggcgctaccacactggaaacaggcgtgcccagcagattttctggcagcggctctggcaccgactacaccctgacaatatccagcctccagcctgaggacttcgccacctactactgtcagcagagctggaacaccccttggacattcggccagggcaccaagctggaaatcaagagaggcggaggcggaagtggaggcggaggatctggcggcggaggctctcaagttcagcttcaacagcctggcgctgagctggtcaaacctggcgcttctgtgaagatgagctgcaaagccagcggctacgccttcagcagctactggatcaactggatgaagcagaaacccggccagggactcgaatggatcggccaaatctatcccggcgacggcgacaccaactacaacggcaagttcaagggcagagccacactgaccgccgatacctctagcagcacagcctacatgcagctgagcagcctgaccagcgaagatagcgccgtgtacttctgtgcccggtccatcacaacagtcgtgggctgcgctatggactattggggccagggaacaagcgtgaccgtgtctagtacgcgtgaggaggacctgaagaacgtgttcccacctgaggtggccgtgttcgagcctagcgaggccgagatcagccacacccagaaagccaccctcgtgtgcctggctaccggcttctaccccgaccatgtggaactgtcttggtgggtcaacggcaaagaggtgcacagcggcgtgtctaccgacccccagccactgaaagaacagcccgccctgaacgacagccggtactgcctgagcagcagactgagagtgtccgccaccttctggcagaacccccggaaccacttcagatgccaggtgcagttctacggcctgagcgagaacgacgagtggacccaggacagagccaagcccgtgacccagatcgtgtctgccgaagcctggggcagagccgatgatgtgattaagatccactggcaggaaaagaagtccaacaccatcctgggcagccaggaaggcaacaccatgaagaccaacgacacctacatgaagttcagctggctgaccgtgcccgagaagtccctggacaaagaacacagatgcatcgtgcggcacgaaaacaacaagaacggcgtggaccaggaaatcatcttcccacccatcaagaccgatgtgattacaatggaccccaaggacaactgctccaaggacgccaacgataccctgctgctccagctgaccaacaccagcgcctactacatgtacttgttgctgctgctgaagtccgtggtgtacttcgccatcatcacatgctgcctgctgcggagaaccgccttctgctgcaacggcgagaagtct

SEQ ID NO: 17958 - DNA, 3138 bp, synthetic construct
  source 1..3138: mol_type = other DNA
atggccttaccagtgaccgccttgctcctgccgctggccttgctgctccacgccgccaggccgctcgagatccagaaccctgatcctgccgtgtaccagctgcgggatagcaagagcagcgacaagagcgtgtgtctgttcaccgacttcgacagccagaccaacgtgtcccagagcaaggactccgacgtgtacatcaccgataagaccgtgctggacatgcggagcatggacttcaagagcaactccgccgtggcctggtccaacaagtccgatttcgcctgcgccaacgccttcaacaacagcattatccccgaggacacattcttcccaagccccgagagcagcgactccaccgaccacgtgaagcccaaagagacagagaacaccaagcagcccagcaagagctgccacaagcccaaggccatcgtgcacaccgagaaagtgaacatgatgagcctgaccgtgctgggcctgcggatgctgttcgccaaaaccgtggccgtgaacttcctgctgaccgccaagctgttcttcctcagggccaagcgatctggatctggagcaacaaacttctcactactcaaacaagcaggtgacgtggaggagaatcccgggcctactagcatggccttaccagtgaccgccttgctcctgccgctggccttgctgctccacgccgccaggccgctgttcaatcaagaggtgcagatccctctgaccgagagctactgtggcccctgtcctaagaactggatctgctacaagaacaactgctaccagttcttcgacgagagcaagaattggtacgagagccaggccagctgcatgagccagaatgccagcctgctgaaggtgtacagcaaagaggaccaggacctgctgaaactggtcaagagcgcccactggatgggccttgtgcacatccccaccaatggctcttggcagtgggaggacggcagcattctgagccctaacctgctgaccatcatcgagatgcagaagggcgactgcgccctgtacgccagcagctttaagggcttcatcgagaattgcagcaccccgaacacctacatctgtatgcagagaaccgttggcggaggcggaagtggaggcggaggatctggcggcggaggctctgacctctttaatcaagaagtccagattccactcaccgaatcctactgcggaccttgtccaaaaaattggatttgttataagaacaactgttatcaattctttgatgagtctaaaaattggtatgagtcccaggcttcctgcatgtctcagaacgcttctctgctgaaagtctactctaaagaagatcaggatctcctgaagctcgtcaagtctgcccattggatggggctcgtccacattcctaccaacggaagctggcaatgggaagatggctccatcctgtctccaaatctgctcacgattattgaaatgcagaaaggggattgtgctctctacgccagctccttcaagggatttattgagaactgtagcacgcccaatacttatatctgtatgcaacggaccgtgggtaccggcggaggcggatctggcggcggaggtagcggtggcggaggatctgaattcgacatccagatgacacagagccctagcagcctgtctgccagcgtgggagacagagtgaccatcacatgcaaggccagcgaccacatcaacaactggctggcctggtatcagcagaagcctggacaggcccctaagctgctgatctacggcgctaccacactggaaacaggcgtgcccagcagattttctggcagcggctctggcaccgactacaccctgacaatatccagcctccagcctgaggacttcgccacctactactgtcagcagagctggaacaccccttggacattcggccagggcaccaagctggaaatcaagagaggcggaggcggaagtggaggcggaggatctggcggcggaggctctcaagttcagcttcaacagcctggcgctgagctggtcaaacctggcgcttctgtgaagatgagctgcaaagccagcggctacgccttcagcagctactggatcaactggatgaagcagaaacccggccagggactcgaatggatcggccaaatctatcccggcgacggcgacaccaactacaacggcaagttcaagggcagagccacactgaccgccgatacctctagcagcacagcctacatgcagctgagcagcctgaccagcgaagatagcgccgtgtacttctgtgcccggtccatcacaacagtcgtgggctgcgctatggactattggggccagggaacaagcgtgaccgtgtctagtacgcgtgaggaggacctgaagaacgtgttcccacctgaggtggccgtgttcgagcctagcgaggccgagatcagccacacccagaaagccaccctcgtgtgcctggctaccggcttctaccccgaccatgtggaactgtcttggtgggtcaacggcaaagaggtgcacagcggcgtgtctaccgacccccagccactgaaagaacagcccgccctgaacgacagccggtactgcctgagcagcagactgagagtgtccgccaccttctggcagaacccccggaaccacttcagatgccaggtgcagttctacggcctgagcgagaacgacgagtggacccaggacagagccaagcccgtgacccagatcgtgtctgccgaagcctggggcagagccgatgatgtgattaagatccactggcaggaaaagaagtccaacaccatcctgggcagccaggaaggcaacaccatgaagaccaacgacacctacatgaagttcagctggctgaccgtgcccgagaagtccctggacaaagaacacagatgcatcgtgcggcacgaaaacaacaagaacggcgtggaccaggaaatcatcttcccacccatcaagaccgatgtgattacaatggaccccaaggacaactgctccaaggacgccaacgataccctgctgctccagctgaccaacaccagcgcctactacatgtacttgttgctgctgctgaagtccgtggtgtacttcgccatcatcacatgctgcctgctgcggagaaccgccttctgctgcaacggcgagaagtct

SEQ ID NO: 17959 - DNA, 2253 bp, synthetic construct
  source 1..2253: mol_type = other DNA
atggccttaccagtgaccgccttgctcctgccgctggccttgctgctccacgccgccaggccgctcgagatccagaaccctgatcctgccgtgtaccagctgcgggatagcaagagcagcgacaagagcgtgtgtctgttcaccgacttcgacagccagaccaacgtgtcccagagcaaggactccgacgtgtacatcaccgataagaccgtgctggacatgcggagcatggacttcaagagcaactccgccgtggcctggtccaacaagtccgatttcgcctgcgccaacgccttcaacaacagcattatccccgaggacacattcttcccaagccccgagagcagcgactccaccgaccacgtgaagcccaaagagacagagaacaccaagcagcccagcaagagctgccacaagcccaaggccatcgtgcacaccgagaaagtgaacatgatgagcctgaccgtgctgggcctgcggatgctgttcgccaaaaccgtggccgtgaacttcctgctgaccgccaagctgttcttcctcagggccaagcgatctggatctggagcaacaaacttctcactactcaaacaagcaggtgacgtggaggagaatcccgggcctactagcatggccttaccagtgaccgccttgctcctgccgctggccttgctgctccacgccgccaggccgcagtctgtgctgacacagcctcctagtgtgtctggcgctcctggacagagagtgaccatctcttgtaccggcagcagcagcaatatcggagccggctatgacgtgcactggtatcagcagctccctggcacagcccctaaactgctgatcttcggcaacagcaacagacccagcggcgtgcccgatagattcagcggctttaagagcggcacaagcgccagcctggctatcactggactgcaagccgaggacgaggccgactacttctgccagagctacgatagcagcctgagcggcagcggagtgtttggcacaggcaccaaagtgacagtgcttggcggcggaggcggaagtggaggcggaggatctggcggcggaggctctcaaatgcaactggttcaaagcggcggtggcctggtgcaacctggaagaagtctgagactgagctgtgccgccagcggcttcaccttcgatgattacgccatgcactgggtccgacaggcccctggaaaaggactggaatgggtgtccggcatctcctggaatagcggctctatcggctacgccgacagcgtgaagggcagattcaccatcagccgggacaacgccaagaacagcctgtacctccagatgaactccctgagagccgaggatacagccctgtactactgcgccaaggacatccacagcggcagctactacggcctgctgtactacgctatggacgtgtggggccagggcacaaccgtgacagtttcttctacgcgtgaggaggacctgaagaacgtgttcccacctgaggtggccgtgttcgagcctagcgaggccgagatcagccacacccagaaagccaccctcgtgtgcctggctaccggcttctaccccgaccatgtggaactgtcttggtgggtcaacggcaaagaggtgcacagcggcgtgtctaccgacccccagccactgaaagaacagcccgccctgaacgacagccggtactgcctgagcagcagactgagagtgtccgccaccttctggcagaacccccggaaccacttcagatgccaggtgcagttctacggcctgagcgagaacgacgagtggacccaggacagagccaagcccgtgacccagatcgtgtctgccgaagcctggggcagagccgatgatgtgattaagatccactggcaggaaaagaagtccaacaccatcctgggcagccaggaaggcaacaccatgaagaccaacgacacctacatgaagttcagctggctgaccgtgcccgagaagtccctggacaaagaacacagatgcatcgtgcggcacgaaaacaacaagaacggcgtggaccaggaaatcatcttcccacccatcaagaccgatgtgattacaatggaccccaaggacaactgctccaaggacgccaacgataccctgctgctccagctgaccaacaccagcgcctactacatgtacttgttgctgctgctgaagtccgtggtgtacttcgccatcatcacatgctgcctgctgcggagaaccgccttctgctgcaacggcgagaagtct

SEQ ID NO: 17960 - DNA, 1764 bp, synthetic construct
  source 1..1764: mol_type = other DNA
atggccttaccagtgaccgccttgctcctgccgctggccttgctgctccacgccgccaggccgctcgagatccagaaccctgatcctgccgtgtaccagctgcgggatagcaagagcagcgacaagagcgtgtgtctgttcaccgacttcgacagccagaccaacgtgtcccagagcaaggactccgacgtgtacatcaccgataagaccgtgctggacatgcggagcatggacttcaagagcaactccgccgtggcctggtccaacaagtccgatttcgcctgcgccaacgccttcaacaacagcattatccccgaggacacattcttcccaagccccgagagcagcgactccaccgaccacgtgaagcccaaagagacagagaacaccaagcagcccagcaagagctgccacaagcccaaggccatcgtgcacaccgagaaagtgaacatgatgagcctgaccgtgctgggcctgcggatgctgttcgccaaaaccgtggccgtgaacttcctgctgaccgccaagctgttcttcctcagggccaagcgatctggatctggagcaacaaacttctcactactcaaacaagcaggtgacgtggaggagaatcccgggcctactagcatggccttaccagtgaccgccttgctcctgccgctggccttgctgctccacgccgccaggccgatgtgtatgccctgcttcaccaccgaccatcagatggcccggaagtgcgacgattgctgtggcggaaaaggcagaggcaagtgctacggccctcagtgcttgtgtagactcgagggcggaggcggaagtggaggcggaggatctggcggcggaggctctttcgaagtgtgtatgccttgttttaccacggatcaacaaatggctcgcaagtgttctgactgctgcggaggcaaaggccggggaaagtgttatggcccacagtgtctgtgccggacgcgtgaggaggacctgaagaacgtgttcccacctgaggtggccgtgttcgagcctagcgaggccgagatcagccacacccagaaagccaccctcgtgtgcctggctaccggcttctaccccgaccatgtggaactgtcttggtgggtcaacggcaaagaggtgcacagcggcgtgtctaccgacccccagccactgaaagaacagcccgccctgaacgacagccggtactgcctgagcagcagactgagagtgtccgccaccttctggcagaacccccggaaccacttcagatgccaggtgcagttctacggcctgagcgagaacgacgagtggacccaggacagagccaagcccgtgacccagatcgtgtctgccgaagcctggggcagagccgatgatgtgattaagatccactggcaggaaaagaagtccaacaccatcctgggcagccaggaaggcaacaccatgaagaccaacgacacctacatgaagttcagctggctgaccgtgcccgagaagtccctggacaaagaacacagatgcatcgtgcggcacgaaaacaacaagaacggcgtggaccaggaaatcatcttcccacccatcaagaccgatgtgattacaatggaccccaaggacaactgctccaaggacgccaacgataccctgctgctccagctgaccaacaccagcgcctactacatgtacttgttgctgctgctgaagtccgtggtgtacttcgccatcatcacatgctgcctgctgcggagaaccgccttctgctgcaacggcgagaagtct

SEQ ID NO: 17961 - DNA, 2394 bp, synthetic construct
  source 1..2394: mol_type = other DNA
atggccttaccagtgaccgccttgctcctgccgctggccttgctgctccacgccgccaggccgctcgagatccagaaccctgatcctgccgtgtaccagctgcgggatagcaagagcagcgacaagagcgtgtgtctgttcaccgacttcgacagccagaccaacgtgtcccagagcaaggactccgacgtgtacatcaccgataagaccgtgctggacatgcggagcatggacttcaagagcaactccgccgtggcctggtccaacaagtccgatttcgcctgcgccaacgccttcaacaacagcattatccccgaggacacattcttcccaagccccgagagcagcgactccaccgaccacgtgaagcccaaagagacagagaacaccaagcagcccagcaagagctgccacaagcccaaggccatcgtgcacaccgagaaagtgaacatgatgagcctgaccgtgctgggcctgcggatgctgttcgccaaaaccgtggccgtgaacttcctgctgaccgccaagctgttcttcctcagggccaagcgatctggatctggagcaacaaacttctcactactcaaacaagcaggtgacgtggaggagaatcccgggcctactagcatggccttaccagtgaccgccttgctcctgccgctggccttgctgctccacgccgccaggccgttcgaagtgtgtatgccttgttttaccacggatcaacaaatggctcgcaagtgttctgactgctgcggaggcaaaggccggggaaagtgttatggcccacagtgtctgtgccggggtaccggcggaggcggatctggcggcggaggtagcggtggcggaggatctgaattcgacatccagatgacacagagccctagcagcctgtctgccagcgtgggagacagagtgaccatcacatgcaaggccagcgaccacatcaacaactggctggcctggtatcagcagaagcctggacaggcccctaagctgctgatctacggcgctaccacactggaaacaggcgtgcccagcagattttctggcagcggctctggcaccgactacaccctgacaatatccagcctccagcctgaggacttcgccacctactactgtcagcagagctggaacaccccttggacattcggccagggcaccaagctggaaatcaagagaggcggaggcggaagtggaggcggaggatctggcggcggaggctctcaagttcagcttcaacagcctggcgctgagctggtcaaacctggcgcttctgtgaagatgagctgcaaagccagcggctacgccttcagcagctactggatcaactggatgaagcagaaacccggccagggactcgaatggatcggccaaatctatcccggcgacggcgacaccaactacaacggcaagttcaagggcagagccacactgaccgccgatacctctagcagcacagcctacatgcagctgagcagcctgaccagcgaagatagcgccgtgtacttctgtgcccggtccatcacaacagtcgtgggctgcgctatggactattggggccagggaacaagcgtgaccgtgtctagtacgcgtgaggaggacctgaagaacgtgttcccacctgaggtggccgtgttcgagcctagcgaggccgagatcagccacacccagaaagccaccctcgtgtgcctggctaccggcttctaccccgaccatgtggaactgtcttggtgggtcaacggcaaagaggtgcacagcggcgtgtctaccgacccccagccactgaaagaacagcccgccctgaacgacagccggtactgcctgagcagcagactgagagtgtccgccaccttctggcagaacccccggaaccacttcagatgccaggtgcagttctacggcctgagcgagaacgacgagtggacccaggacagagccaagcccgtgacccagatcgtgtctgccgaagcctggggcagagccgatgatgtgattaagatccactggcaggaaaagaagtccaacaccatcctgggcagccaggaaggcaacaccatgaagaccaacgacacctacatgaagttcagctggctgaccgtgcccgagaagtccctggacaaagaacacagatgcatcgtgcggcacgaaaacaacaagaacggcgtggaccaggaaatcatcttcccacccatcaagaccgatgtgattacaatggaccccaaggacaactgctccaaggacgccaacgataccctgctgctccagctgaccaacaccagcgcctactacatgtacttgttgctgctgctgaagtccgtggtgtacttcgccatcatcacatgctgcctgctgcggagaaccgccttctgctgcaacggcgagaagtct

SEQ ID NO: 17962 - DNA, 2784 bp, synthetic construct
  source 1..2784: mol_type = other DNA
atggccttaccagtgaccgccttgctcctgccgctggccttgctgctccacgccgccaggccgctcgagatccagaaccctgatcctgccgtgtaccagctgcgggatagcaagagcagcgacaagagcgtgtgtctgttcaccgacttcgacagccagaccaacgtgtcccagagcaaggactccgacgtgtacatcaccgataagaccgtgctggacatgcggagcatggacttcaagagcaactccgccgtggcctggtccaacaagtccgatttcgcctgcgccaacgccttcaacaacagcattatccccgaggacacattcttcccaagccccgagagcagcgactccaccgaccacgtgaagcccaaagagacagagaacaccaagcagcccagcaagagctgccacaagcccaaggccatcgtgcacaccgagaaagtgaacatgatgagcctgaccgtgctgggcctgcggatgctgttcgccaaaaccgtggccgtgaacttcctgctgaccgccaagctgttcttcctcagggccaagcgatctggatctggagcaacaaacttctcactactcaaacaagcaggtgacgtggaggagaatcccgggcctactagcatggccttaccagtgaccgccttgctcctgccgctggccttgctgctccacgccgccaggccgttcgaaagccccgtagctcctgcctgtgaccccagactcctaaataaactgctgcgtgactcccacctccttcacagccgactgagtcagtgtcccgacgtggaccctttgtctatccctgttctgctgcctgctgtggactttagcctgggagaatggaaaacccagacggaacagagcaaggcacaggacattctaggggcagtgtcccttctactggagggagtgatggcagcacgaggacagttggaaccctcctgcctctcatccctcctgggacagctttctgggcaggttcgcctcctcttgggggccctgcagggcctcctaggaacccagcttcctctacagggcaggaccacagctcacaaggaccccaatgccctcttcttgagcttgcaacaactgcttcggggaaaggtgcgcttcctgcttctggtagaaggtcccaccctctgtgtcagacggaccctgccaaccacagctgtcccaagcagtacttctggtaccggcggaggcggatctggcggcggaggtagcggtggcggaggatctgaattcgacatccagatgacacagagccctagcagcctgtctgccagcgtgggagacagagtgaccatcacatgcaaggccagcgaccacatcaacaactggctggcctggtatcagcagaagcctggacaggcccctaagctgctgatctacggcgctaccacactggaaacaggcgtgcccagcagattttctggcagcggctctggcaccgactacaccctgacaatatccagcctccagcctgaggacttcgccacctactactgtcagcagagctggaacaccccttggacattcggccagggcaccaagctggaaatcaagagaggcggaggcggaagtggaggcggaggatctggcggcggaggctctcaagttcagcttcaacagcctggcgctgagctggtcaaacctggcgcttctgtgaagatgagctgcaaagccagcggctacgccttcagcagctactggatcaactggatgaagcagaaacccggccagggactcgaatggatcggccaaatctatcccggcgacggcgacaccaactacaacggcaagttcaagggcagagccacactgaccgccgatacctctagcagcacagcctacatgcagctgagcagcctgaccagcgaagatagcgccgtgtacttctgtgcccggtccatcacaacagtcgtgggctgcgctatggactattggggccagggaacaagcgtgaccgtgtctagtacgcgtgaggaggacctgaagaacgtgttcccacctgaggtggccgtgttcgagcctagcgaggccgagatcagccacacccagaaagccaccctcgtgtgcctggctaccggcttctaccccgaccatgtggaactgtcttggtgggtcaacggcaaagaggtgcacagcggcgtgtctaccgacccccagccactgaaagaacagcccgccctgaacgacagccggtactgcctgagcagcagactgagagtgtccgccaccttctggcagaacccccggaaccacttcagatgccaggtgcagttctacggcctgagcgagaacgacgagtggacccaggacagagccaagcccgtgacccagatcgtgtctgccgaagcctggggcagagccgatgatgtgattaagatccactggcaggaaaagaagtccaacaccatcctgggcagccaggaaggcaacaccatgaagaccaacgacacctacatgaagttcagctggctgaccgtgcccgagaagtccctggacaaagaacacagatgcatcgtgcggcacgaaaacaacaagaacggcgtggaccaggaaatcatcttcccacccatcaagaccgatgtgattacaatggaccccaaggacaactgctccaaggacgccaacgataccctgctgctccagctgaccaacaccagcgcctactacatgtacttgttgctgctgctgaagtccgtggtgtacttcgccatcatcacatgctgcctgctgcggagaaccgccttctgctgcaacggcgagaagtct

SEQ ID NO: 17963 - DNA, 2505 bp, synthetic construct
  source 1..2505: mol_type = other DNA
atggccttaccagtgaccgccttgctcctgccgctggccttgctgctccacgccgccaggccgctcgagatccagaaccctgatcctgccgtgtaccagctgcgggatagcaagagcagcgacaagagcgtgtgtctgttcaccgacttcgacagccagaccaacgtgtcccagagcaaggactccgacgtgtacatcaccgataagaccgtgctggacatgcggagcatggacttcaagagcaactccgccgtggcctggtccaacaagtccgatttcgcctgcgccaacgccttcaacaacagcattatccccgaggacacattcttcccaagccccgagagcagcgactccaccgaccacgtgaagcccaaagagacagagaacaccaagcagcccagcaagagctgccacaagcccaaggccatcgtgcacaccgagaaagtgaacatgatgagcctgaccgtgctgggcctgcggatgctgttcgccaaaaccgtggccgtgaacttcctgctgaccgccaagctgttcttcctcagggccaagcgatctggatctggagcaacaaacttctcactactcaaacaagcaggtgacgtggaggagaatcccgggcctactagcatggccttaccagtgaccgccttgctcctgccgctggccttgctgctccacgccgccaggccgttcgaaatgggcagctgggaagagttcgagctgagactgaacgccatcgaggaacggctgtatgccctcggaggatctgaagccgagctggcctacttcgagtacgtgatcgccgacttcgagggcaacctgcagcggtacaaaggcaagggcaaccctgaagtggaagccctgtacttcgaggccgacgccatcttcgaggaactggtggcctacagacacaacggtaccggcggaggcggatctggcggcggaggtagcggtggcggaggatctgaattcgacatccagatgacacagagccctagcagcctgtctgccagcgtgggagacagagtgaccatcacatgcaaggccagcgaccacatcaacaactggctggcctggtatcagcagaagcctggacaggcccctaagctgctgatctacggcgctaccacactggaaacaggcgtgcccagcagattttctggcagcggctctggcaccgactacaccctgacaatatccagcctccagcctgaggacttcgccacctactactgtcagcagagctggaacaccccttggacattcggccagggcaccaagctggaaatcaagagaggcggaggcggaagtggaggcggaggatctggcggcggaggctctcaagttcagcttcaacagcctggcgctgagctggtcaaacctggcgcttctgtgaagatgagctgcaaagccagcggctacgccttcagcagctactggatcaactggatgaagcagaaacccggccagggactcgaatggatcggccaaatctatcccggcgacggcgacaccaactacaacggcaagttcaagggcagagccacactgaccgccgatacctctagcagcacagcctacatgcagctgagcagcctgaccagcgaagatagcgccgtgtacttctgtgcccggtccatcacaacagtcgtgggctgcgctatggactattggggccagggaacaagcgtgaccgtgtctagtacgcgtgaggaggacctgaagaacgtgttcccacctgaggtggccgtgttcgagcctagcgaggccgagatcagccacacccagaaagccaccctcgtgtgcctggctaccggcttctaccccgaccatgtggaactgtcttggtgggtcaacggcaaagaggtgcacagcggcgtgtctaccgacccccagccactgaaagaacagcccgccctgaacgacagccggtactgcctgagcagcagactgagagtgtccgccaccttctggcagaacccccggaaccacttcagatgccaggtgcagttctacggcctgagcgagaacgacgagtggacccaggacagagccaagcccgtgacccagatcgtgtctgccgaagcctggggcagagccgatgatgtgattaagatccactggcaggaaaagaagtccaacaccatcctgggcagccaggaaggcaacaccatgaagaccaacgacacctacatgaagttcagctggctgaccgtgcccgagaagtccctggacaaagaacacagatgcatcgtgcggcacgaaaacaacaagaacggcgtggaccaggaaatcatcttcccacccatcaagaccgatgtgattacaatggaccccaaggacaactgctccaaggacgccaacgataccctgctgctccagctgaccaacaccagcgcctactacatgtacttgttgctgctgctgaagtccgtggtgtacttcgccatcatcacatgctgcctgctgcggagaaccgccttctgctgcaacggcgagaagtct

SEQ ID NO: 17964 - DNA, 2610 bp, synthetic construct
  source 1..2610: mol_type = other DNA
atggccttaccagtgaccgccttgctcctgccgctggccttgctgctccacgccgccaggccgctcgaggaggacctgaagaacgtgttcccacctgaggtggccgtgttcgagcctagcgaggccgagatcagccacacccagaaagccaccctcgtgtgcctggctaccggcttctaccccgaccatgtggaactgtcttggtgggtcaacggcaaagaggtgcacagcggcgtgtgtaccgacccccagccactgaaagaacagcccgccctgaacgacagccggtactgcctgagcagcagactgagagtgtccgccaccttctggcagaacccccggaaccacttcagatgccaggtgcagttctacggcctgagcgagaacgacgagtggacccaggacagagccaagcccgtgacccagatcgtgtctgccgaagcctggggcagagccgattgcggctttaccagcgagagctaccagcagggcgtgctgagcgccaccaacctgagcgtgatcggcttcagaatcctgctgctgaaagtggccggctttaacctgctgatgaccctgcggctgtggtccagcagggccaagcgatctggatctggagcaacaaacttctcactactcaaacaagcaggtgacgtggaggagaatcccgggcctactagcatggccttaccagtgaccgccttgctcctgccgctggccttgctgctccacgccgccaggccggacatccagatgacacagactacatcctccctgtctgcctctctgggagacagagtcaccatcagttgcagggcaagtcaggacattagtaaatatttaaattggtatcagcagaaaccagatggaactgttaaactcctgatctaccatacatcaagattacactcaggagtcccatcaaggttcagtggcagtgggtctggaacagattattctctcaccattagcaacctggagcaagaagatattgccacttacttttgccaacagggtaatacgcttccgtacacgttcggaggggggaccaagctggagatcacaggtggcggtggctcgggcggtggtgggtcgggtggcggcggatctgaggtgaaactgcaggagtcaggacctggcctggtggcgccctcacagagcctgtccgtcacatgcactgtctcaggggtctcattacccgactatggtgtaagctggattcgccagcctccacgaaagggtctggagtggctgggagtaatatggggtagtgaaaccacatactataattcagctctcaaatccagactgaccatcatcaaggacaactccaagagccaagttttcttaaaaatgaacagtctgcaaactgatgacacagccatttactactgtgccaaacattattactacggtggtagctatgctatggactactggggtcaaggaacctcagtcaccgtctcctcaacgcgtatccagaaccctgatcctgccgtgtaccagctgcgggatagcaagagcagcgacaagagcgtgtgtctgttcaccgacttcgacagccagaccaacgtgtcccagagcaaggactccgacgtgtacatcaccgataagtgcgtgctggacatgcggagcatggacttcaagagcaactccgccgtggcctggtccaacaagtccgatttcgcctgcgccaacgccttcaacaacagcattatccccgaggacacattcttcccaagccccgagagcagctgcgacgtgaagctggtggaaaagagcttcgagacagacaccaacctgaacttccagatcctgtacgagatcctgctgggcaaggccaccctgtacgccgtgctggtgtctgccctggtgctgatggctatggtcaagcggaaggacagccggggacgcgccaagagaagcggatctggcgtgaagcagaccctgaatttcgacctgctgaagctggctggcgacgtggaatccaacccaggcccttctagaggccatatgaccgagtacaagcccacggtgcgcctcgccacccgcgacgacgtccccagggccgtacgcaccctcgccgccgcgttcgccgactaccccgccacgcgccacaccgtcgatccggaccgccacatcgagcgggtcaccgagctgcaagaactcttcctcacgcgcgtcgggctcgacatcggcaaggtgtgggtcgcggacgacggcgccgcggtggcggtctggaccacgccggagagcgtcgaagcgggggcggtgttcgccgagatcggcccgcgcatggccgagttgagcggttcccggctggccgcgcagcaacagatggaaggcctcctggcgccgcaccggcccaaggagcccgcgtggttcctggccaccgtcggcgtctcgcccgaccaccagggcaagggtctgggcagcgccgtcgtgctccccggagtggaggcggccgagcgcgccggggtgcccgccttcctggagacctccgcgccccgcaacctccccttctacgagcggctcggcttcaccgtcaccgccgacgtcgaggtgcccgaaggaccgcgcacctggtgcatgacccgcaagcccggtgcctga

SEQ ID NO: 17965 - DNA, 2613 bp, synthetic construct
  source 1..2613: mol_type = other DNA
atggccttaccagtgaccgccttgctcctgccgctggccttgctgctccacgccgccaggccgctcgaggaggacctgaagaacgtgttcccacctgaggtggccgtgttcgagcctagcgaggccgagatcagccacacccagaaagccaccctcgtgtgcctggctaccggcttctaccccgaccatgtggaactgtcttggtgggtcaacggcaaagaggtgcacagcggcgtgtgtaccgacccccagccactgaaagaacagcccgccctgaacgacagccggtactgcctgagcagcagactgagagtgtccgccaccttctggcagaacccccggaaccacttcagatgccaggtgcagttctacggcctgagcgagaacgacgagtggacccaggacagagccaagcccgtgacccagatcgtgtctgccgaagcctggggcagagccgattgcggctttaccagcgagagctaccagcagggcgtgctgagcgccaccaacctgagcgtgatcggcttcagaatcctgctgctgaaagtggccggctttaacctgctgatgaccctgcggctgtggtccagcagggccaagcgatctggatctggagcaacaaacttctcactactcaaacaagcaggtgacgtggaggagaatcccgggcctactagcaccatggccttaccagtgaccgccttgctcctgccgctggccttgctgctccacgccgccaggccggagatcgtgatgacccagagccctgccaccctgtctctgagccctggcgaaagagccaccctgagctgtagagccagccaggacatcagcaagtacctgaactggtatcagcagaagcccggccaggcccccagactgctgatctaccacaccagcagactgcacagcggcatccccgccagattttctggctctggcagcggcaccgactacaccctgacaatcagcagcctccagcccgaggacttcgccgtgtacttctgtcagcaaggcaacaccctgccctacaccttcggccagggcaccaagctggaaatcaagggcggaggcggaagtggaggcggaggatctggcggcggaggctctcaggtgcaactccaggaatctggccctggcctcgtgaagcccagcgagacactgagcctgacctgtaccgtgtccggcgtgtccctgcctgactatggcgtgtcctggatcagacagccccctggcaagggcctggaatggatcggagtgatttggggcagcgaaaccacctactacaacagctccctgaagtccagagtgaccatctccaaggacaactccaagaaccaggtgtccctgaagctgagcagcgtgacagccgccgacaccgccgtgtattactgcgccaagcactactactacggcggcagctacgctatggactactggggccagggaaccctcgtgaccgtgtctagtacgcgtatccagaaccctgatcctgccgtgtaccagctgcgggatagcaagagcagcgacaagagcgtgtgtctgttcaccgacttcgacagccagaccaacgtgtcccagagcaaggactccgacgtgtacatcaccgataagtgcgtgctggacatgcggagcatggacttcaagagcaactccgccgtggcctggtccaacaagtccgatttcgcctgcgccaacgccttcaacaacagcattatccccgaggacacattcttcccaagccccgagagcagctgcgacgtgaagctggtggaaaagagcttcgagacagacaccaacctgaacttccagatcctgtacgagatcctgctgggcaaggccaccctgtacgccgtgctggtgtctgccctggtgctgatggctatggtcaagcggaaggacagccggggacgcgccaagagaagcggatctggcgtgaagcagaccctgaatttcgacctgctgaagctggctggcgacgtggaatccaacccaggcccttctagaggccatatgaccgagtacaagcccacggtgcgcctcgccacccgcgacgacgtccccagggccgtacgcaccctcgccgccgcgttcgccgactaccccgccacgcgccacaccgtcgatccggaccgccacatcgagcgggtcaccgagctgcaagaactcttcctcacgcgcgtcgggctcgacatcggcaaggtgtgggtcgcggacgacggcgccgcggtggcggtctggaccacgccggagagcgtcgaagcgggggcggtgttcgccgagatcggcccgcgcatggccgagttgagcggttcccggctggccgcgcagcaacagatggaaggcctcctggcgccgcaccggcccaaggagcccgcgtggttcctggccaccgtcggcgtctcgcccgaccaccagggcaagggtctgggcagcgccgtcgtgctccccggagtggaggcggccgagcgcgccggggtgcccgccttcctggagacctccgcgccccgcaacctccccttctacgagcggctcggcttcaccgtcaccgccgacgtcgaggtgcccgaaggaccgcgcacctggtgcatgacccgcaagcccggtgcctga

SEQ ID NO: 17966 - DNA, 2616 bp, synthetic construct
  source 1..2616: mol_type = other DNA
atggccttaccagtgaccgccttgctcctgccgctggccttgctgctccacgccgccaggccgctcgaggaggacctgaagaacgtgttcccacctgaggtggccgtgttcgagcctagcgaggccgagatcagccacacccagaaagccaccctcgtgtgcctggctaccggcttctaccccgaccatgtggaactgtcttggtgggtcaacggcaaagaggtgcacagcggcgtgtgtaccgacccccagccactgaaagaacagcccgccctgaacgacagccggtactgcctgagcagcagactgagagtgtccgccaccttctggcagaacccccggaaccacttcagatgccaggtgcagttctacggcctgagcgagaacgacgagtggacccaggacagagccaagcccgtgacccagatcgtgtctgccgaagcctggggcagagccgattgcggctttaccagcgagagctaccagcagggcgtgctgagcgccaccaacctgagcgtgatcggcttcagaatcctgctgctgaaagtggccggctttaacctgctgatgaccctgcggctgtggtccagcagggccaagcgatctggatctggagcaacaaacttctcactactcaaacaagcaggtgacgtggaggagaatcccgggcctactagcaccatggccttaccagtgaccgccttgctcctgccgctggccttgctgctccacgccgccaggccggacgagatcgtgctgacacagagccccgccaccctgtcactgtctccaggcgaaagagccaccctgagctgtagcgccagcagcagcgtgtcctacatgcactggtatcagcagaagcccggccaggcccccagactgctgatctacgataccagcaagctggcctccggcatccccgccagattttctggcagcggctccggcaccgacttcaccctgacaatcagcagcctggaacccgaggacgtggccgtgtactactgttttcaaggcagcgtgtaccccttcaccttcggccagggcaccaagctggaaatcaagagaggtggcggtggctcgggcggtggtgggtcgggtggcggcggatctcaggtgcagctccaggaatctggccctggcctcgtgaagcctagccagaccctgagcctgacctgtaccgtgtctggcggcagcatcagcacaagcggcatgggcgtgggctggatcagacagcaccctggcaagggcctggaatggatcggccacatttggtgggacgacgacaagcggtacaaccccgccctgaagtccagagtgaccatcagcgtggacaccagcaagaaccagttcagcctgaagctgagcagcgtgacagccgccgataccgccgtgtattattgcgcccggatggaactgtggtcctactacttcgactactggggccagggaaccctcgtgaccgtgtctagtacgcgtatccagaaccctgatcctgccgtgtaccagctgcgggatagcaagagcagcgacaagagcgtgtgtctgttcaccgacttcgacagccagaccaacgtgtcccagagcaaggactccgacgtgtacatcaccgataagtgcgtgctggacatgcggagcatggacttcaagagcaactccgccgtggcctggtccaacaagtccgatttcgcctgcgccaacgccttcaacaacagcattatccccgaggacacattcttcccaagccccgagagcagctgcgacgtgaagctggtggaaaagagcttcgagacagacaccaacctgaacttccagatcctgtacgagatcctgctgggcaaggccaccctgtacgccgtgctggtgtctgccctggtgctgatggctatggtcaagcggaaggacagccggggacgcgccaagagaagcggatctggcgtgaagcagaccctgaatttcgacctgctgaagctggctggcgacgtggaatccaacccaggcccttctagaggccatatgaccgagtacaagcccacggtgcgcctcgccacccgcgacgacgtccccagggccgtacgcaccctcgccgccgcgttcgccgactaccccgccacgcgccacaccgtcgatccggaccgccacatcgagcgggtcaccgagctgcaagaactcttcctcacgcgcgtcgggctcgacatcggcaaggtgtgggtcgcggacgacggcgccgcggtggcggtctggaccacgccggagagcgtcgaagcgggggcggtgttcgccgagatcggcccgcgcatggccgagttgagcggttcccggctggccgcgcagcaacagatggaaggcctcctggcgccgcaccggcccaaggagcccgcgtggttcctggccaccgtcggcgtctcgcccgaccaccagggcaagggtctgggcagcgccgtcgtgctccccggagtggaggcggccgagcgcgccggggtgcccgccttcctggagacctccgcgccccgcaacctccccttctacgagcggctcggcttcaccgtcaccgccgacgtcgaggtgcccgaaggaccgcgcacctggtgcatgacccgcaagcccggtgcctga

SEQ ID NO: 17967 - DNA, 2604 bp, synthetic construct
  source 1..2604: mol_type = other DNA
atggccttaccagtgaccgccttgctcctgccgctggccttgctgctccacgccgccaggccgctcgaggaggacctgaagaacgtgttcccacctgaggtggccgtgttcgagcctagcgaggccgagatcagccacacccagaaagccaccctcgtgtgcctggctaccggcttctaccccgaccatgtggaactgtcttggtgggtcaacggcaaagaggtgcacagcggcgtgtgtaccgacccccagccactgaaagaacagcccgccctgaacgacagccggtactgcctgagcagcagactgagagtgtccgccaccttctggcagaacccccggaaccacttcagatgccaggtgcagttctacggcctgagcgagaacgacgagtggacccaggacagagccaagcccgtgacccagatcgtgtctgccgaagcctggggcagagccgattgcggctttaccagcgagagctaccagcagggcgtgctgagcgccaccaacctgagcgtgatcggcttcagaatcctgctgctgaaagtggccggctttaacctgctgatgaccctgcggctgtggtccagcagggccaagcgatctggatctggagcaacaaacttctcactactcaaacaagcaggtgacgtggaggagaatcccgggcctactagcatggccttaccagtgaccgccttgctcctgccgctggccttgctgctccacgccgccaggccggacatccagatgacacagagccctagcagcctgtctgccagcgtgggagacagagtgaccatcacctgtagagccagccaggacatcagcaactacctgaactggtatcagcagaagcccggcaaggcccctaagctgctgatctactacaccagcagactgcacagcggcgtgcccagcagattttctggctctggcagcggcaccgacttcaccctgacaatatctagcctccagcctgaggacttcgccacctactattgccagcagggcaacaccctgccttacacatttggacagggcaccaaggtggaaatcaagagaggcggaggcggaagtggaggcggaggatctggcggcggaggctctgaagtgcagctggttgaatcaggtggcggcctggttcaacctggcggatctctgagactgagctgtgccgccagcggcttcaccttcagcgactactttatgagctgggtccgacaggcccctggcaaaggacttgaatgggtcgccaccatcagcaatggcggcacctacacttactaccccgacagcgtgaagggcagattcaccatctccagagacaacagcaagaacaccctgtacctccagatgaactccctgagagccgaggacaccgccgtgtactactgcgccagattcgacggctacatcttcgactattggggccagggcaccctggtcacagtctcttctacgcgtatccagaaccctgatcctgccgtgtaccagctgcgggatagcaagagcagcgacaagagcgtgtgtctgttcaccgacttcgacagccagaccaacgtgtcccagagcaaggactccgacgtgtacatcaccgataagtgcgtgctggacatgcggagcatggacttcaagagcaactccgccgtggcctggtccaacaagtccgatttcgcctgcgccaacgccttcaacaacagcattatccccgaggacacattcttcccaagccccgagagcagctgcgacgtgaagctggtggaaaagagcttcgagacagacaccaacctgaacttccagatcctgtacgagatcctgctgggcaaggccaccctgtacgccgtgctggtgtctgccctggtgctgatggctatggtcaagcggaaggacagccggggacgcgccaagagaagcggatctggcgtgaagcagaccctgaatttcgacctgctgaagctggctggcgacgtggaatccaacccaggcccttctagaggccatatgaccgagtacaagcccacggtgcgcctcgccacccgcgacgacgtccccagggccgtacgcaccctcgccgccgcgttcgccgactaccccgccacgcgccacaccgtcgatccggaccgccacatcgagcgggtcaccgagctgcaagaactcttcctcacgcgcgtcgggctcgacatcggcaaggtgtgggtcgcggacgacggcgccgcggtggcggtctggaccacgccggagagcgtcgaagcgggggcggtgttcgccgagatcggcccgcgcatggccgagttgagcggttcccggctggccgcgcagcaacagatggaaggcctcctggcgccgcaccggcccaaggagcccgcgtggttcctggccaccgtcggcgtctcgcccgaccaccagggcaagggtctgggcagcgccgtcgtgctccccggagtggaggcggccgagcgcgccggggtgcccgccttcctggagacctccgcgccccgcaacctccccttctacgagcggctcggcttcaccgtcaccgccgacgtcgaggtgcccgaaggaccgcgcacctggtgcatgacccgcaagcccggtgcctga

SEQ ID NO: 17968 - DNA, 2616 bp, synthetic construct
  source 1..2616: mol_type = other DNA
atggccttaccagtgaccgccttgctcctgccgctggccttgctgctccacgccgccaggccgctcgaggaggacctgaagaacgtgttcccacctgaggtggccgtgttcgagcctagcgaggccgagatcagccacacccagaaagccaccctcgtgtgcctggctaccggcttctaccccgaccatgtggaactgtcttggtgggtcaacggcaaagaggtgcacagcggcgtgtgtaccgacccccagccactgaaagaacagcccgccctgaacgacagccggtactgcctgagcagcagactgagagtgtccgccaccttctggcagaacccccggaaccacttcagatgccaggtgcagttctacggcctgagcgagaacgacgagtggacccaggacagagccaagcccgtgacccagatcgtgtctgccgaagcctggggcagagccgattgcggctttaccagcgagagctaccagcagggcgtgctgagcgccaccaacctgagcgtgatcggcttcagaatcctgctgctgaaagtggccggctttaacctgctgatgaccctgcggctgtggtccagcagggccaagcgatctggatctggagcaacaaacttctcactactcaaacaagcaggtgacgtggaggagaatcccgggcctactagcatggccttaccagtgaccgccttgctcctgccgctggccttgctgctccacgccgccaggccggacatccagatgacacagagccctagcagcctgtctgccagcgtgggagacagagtgaccatcacatgcaaggccagcgaccacatcaacaactggctggcctggtatcagcagaagcctggacaggcccctaagctgctgatctacggcgctaccacactggaaacaggcgtgcccagcagattttctggcagcggctctggcaccgactacaccctgacaatatccagcctccagcctgaggacttcgccacctactactgtcagcagagctggaacaccccttggacattcggccagggcaccaagctggaaatcaagagaggcggaggcggaagtggaggcggaggatctggcggcggaggctctcaagttcagcttcaacagcctggcgctgagctggtcaaacctggcgcttctgtgaagatgagctgcaaagccagcggctacgccttcagcagctactggatcaactggatgaagcagaaacccggccagggactcgaatggatcggccaaatctatcccggcgacggcgacaccaactacaacggcaagttcaagggcagagccacactgaccgccgatacctctagcagcacagcctacatgcagctgagcagcctgaccagcgaagatagcgccgtgtacttctgtgcccggtccatcacaacagtcgtgggctgcgctatggactattggggccagggaacaagcgtgaccgtgtctagtacgcgtatccagaaccctgatcctgccgtgtaccagctgcgggatagcaagagcagcgacaagagcgtgtgtctgttcaccgacttcgacagccagaccaacgtgtcccagagcaaggactccgacgtgtacatcaccgataagtgcgtgctggacatgcggagcatggacttcaagagcaactccgccgtggcctggtccaacaagtccgatttcgcctgcgccaacgccttcaacaacagcattatccccgaggacacattcttcccaagccccgagagcagctgcgacgtgaagctggtggaaaagagcttcgagacagacaccaacctgaacttccagatcctgtacgagatcctgctgggcaaggccaccctgtacgccgtgctggtgtctgccctggtgctgatggctatggtcaagcggaaggacagccggggacgcgccaagagaagcggatctggcgtgaagcagaccctgaatttcgacctgctgaagctggctggcgacgtggaatccaacccaggcccttctagaggccatatgaccgagtacaagcccacggtgcgcctcgccacccgcgacgacgtccccagggccgtacgcaccctcgccgccgcgttcgccgactaccccgccacgcgccacaccgtcgatccggaccgccacatcgagcgggtcaccgagctgcaagaactcttcctcacgcgcgtcgggctcgacatcggcaaggtgtgggtcgcggacgacggcgccgcggtggcggtctggaccacgccggagagcgtcgaagcgggggcggtgttcgccgagatcggcccgcgcatggccgagttgagcggttcccggctggccgcgcagcaacagatggaaggcctcctggcgccgcaccggcccaaggagcccgcgtggttcctggccaccgtcggcgtctcgcccgaccaccagggcaagggtctgggcagcgccgtcgtgctccccggagtggaggcggccgagcgcgccggggtgcccgccttcctggagacctccgcgccccgcaacctccccttctacgagcggctcggcttcaccgtcaccgccgacgtcgaggtgcccgaaggaccgcgcacctggtgcatgacccgcaagcccggtgcctga

SEQ ID NO: 17969 - DNA, 2622 bp, synthetic construct
  source 1..2622: mol_type = other DNA
atggccttaccagtgaccgccttgctcctgccgctggccttgctgctccacgccgccaggccgctcgaggaggacctgaagaacgtgttcccacctgaggtggccgtgttcgagcctagcgaggccgagatcagccacacccagaaagccaccctcgtgtgcctggctaccggcttctaccccgaccatgtggaactgtcttggtgggtcaacggcaaagaggtgcacagcggcgtgtgtaccgacccccagccactgaaagaacagcccgccctgaacgacagccggtactgcctgagcagcagactgagagtgtccgccaccttctggcagaacccccggaaccacttcagatgccaggtgcagttctacggcctgagcgagaacgacgagtggacccaggacagagccaagcccgtgacccagatcgtgtctgccgaagcctggggcagagccgattgcggctttaccagcgagagctaccagcagggcgtgctgagcgccaccaacctgagcgtgatcggcttcagaatcctgctgctgaaagtggccggctttaacctgctgatgaccctgcggctgtggtccagcagggccaagcgatctggatctggagcaacaaacttctcactactcaaacaagcaggtgacgtggaggagaatcccgggcctactagcatggccttaccagtgaccgccttgctcctgccgctggccttgctgctccacgccgccaggccgcagatcgtgctgtctcagtctcctgccatcctgagcgcttccccaggcgagaaagtgaccatgacctgtagagccagcagcagcgtgtcctacatgcactggtatcagcagaagcccggcagcagccctaagccttggatctacgccaccagcaatctggcctctggcgtgccagccagattttctggctctggcagcggcaccagctacagcttcacaatcagcagagtggaagccgaggacgccgccacctactattgtcagcagtggaccttcaatcctcctaccttcggcggaggcacccggctggaaatcaaaagaacagtggctgctggcggaggcggaagtggaggcggaggatctggcggcggaggctctcaggcttatctgcaacagagcggagccgaactcgtcagacctggcgcttctgtgaagatgagctgcaaggccagcggctacaccttcaccagctataatatgcactgggtcaagcagacccctcggcagggactcgaatggatcggcggaatctatcccggcaacggcgacacctcctacaaccagaagttcaagggcaaagccacactgaccgtgggcaagagcagcagcaccgcctatatgcagctcagcagcctgaccagcgaggacagcgccgtgtacttctgcgccagatacgactacaactacgctatggactactggggccagggcaccagcgtgacagttagctctgccagcacgcgtatccagaaccctgatcctgccgtgtaccagctgcgggatagcaagagcagcgacaagagcgtgtgtctgttcaccgacttcgacagccagaccaacgtgtcccagagcaaggactccgacgtgtacatcaccgataagtgcgtgctggacatgcggagcatggacttcaagagcaactccgccgtggcctggtccaacaagtccgatttcgcctgcgccaacgccttcaacaacagcattatccccgaggacacattcttcccaagccccgagagcagctgcgacgtgaagctggtggaaaagagcttcgagacagacaccaacctgaacttccagatcctgtacgagatcctgctgggcaaggccaccctgtacgccgtgctggtgtctgccctggtgctgatggctatggtcaagcggaaggacagccggggacgcgccaagagaagcggatctggcgtgaagcagaccctgaatttcgacctgctgaagctggctggcgacgtggaatccaacccaggcccttctagaggccatatgaccgagtacaagcccacggtgcgcctcgccacccgcgacgacgtccccagggccgtacgcaccctcgccgccgcgttcgccgactaccccgccacgcgccacaccgtcgatccggaccgccacatcgagcgggtcaccgagctgcaagaactcttcctcacgcgcgtcgggctcgacatcggcaaggtgtgggtcgcggacgacggcgccgcggtggcggtctggaccacgccggagagcgtcgaagcgggggcggtgttcgccgagatcggcccgcgcatggccgagttgagcggttcccggctggccgcgcagcaacagatggaaggcctcctggcgccgcaccggcccaaggagcccgcgtggttcctggccaccgtcggcgtctcgcccgaccaccagggcaagggtctgggcagcgccgtcgtgctccccggagtggaggcggccgagcgcgccggggtgcccgccttcctggagacctccgcgccccgcaacctccccttctacgagcggctcggcttcaccgtcaccgccgacgtcgaggtgcccgaaggaccgcgcacctggtgcatgacccgcaagcccggtgcctga

SEQ ID NO: 17970 - DNA, 2616 bp, synthetic construct
  source 1..2616: mol_type = other DNA
atggccttaccagtgaccgccttgctcctgccgctggccttgctgctccacgccgccaggccgctcgaggaggacctgaagaacgtgttcccacctgaggtggccgtgttcgagcctagcgaggccgagatcagccacacccagaaagccaccctcgtgtgcctggctaccggcttctaccccgaccatgtggaactgtcttggtgggtcaacggcaaagaggtgcacagcggcgtgtgtaccgacccccagccactgaaagaacagcccgccctgaacgacagccggtactgcctgagcagcagactgagagtgtccgccaccttctggcagaacccccggaaccacttcagatgccaggtgcagttctacggcctgagcgagaacgacgagtggacccaggacagagccaagcccgtgacccagatcgtgtctgccgaagcctggggcagagccgattgcggctttaccagcgagagctaccagcagggcgtgctgagcgccaccaacctgagcgtgatcggcttcagaatcctgctgctgaaagtggccggctttaacctgctgatgaccctgcggctgtggtccagcagggccaagcgatctggatctggagcaacaaacttctcactactcaaacaagcaggtgacgtggaggagaatcccgggcctactagcatggccttaccagtgaccgccttgctcctgccgctggccttgctgctccacgccgccaggccggagatcgtgctgacacagagccctgccaccctgtctctgagccctggcgaaagagccaccctgagctgtagagccagccagagcgtgtccagctacctggcctggtatcagcagaagcccggccaggctccccggctgctgatctacgatgccagcaatagagccaccggcatccccgccagattttccggctctggcagcggcaccgacttcaccctgaccatcagctccctggaacccgaggacttcgccgtgtactactgccagcagcggagcaactggcccatcacattcggccagggcacccggctggaaatcaaaggcggaggcggaagtggaggcggaggatctggcggcggaggctctgaggtgcagcttgttgagtctggcggaggactggtgcagcccgatagaagcctgagactgtcttgtgccgccagcggcttcaccttccacgattatgccatgcactgggtccgacaggcccctggcaaaggacttgaatgggtgtccaccatctcttggaacagcggcacaatcggctacgccgactctgtgaagggcagattcaccatcagccgggacaacgccaagaacagcctgtacctccagatgaactccctgagagccgaggacacagccctgtactactgcgccaaggacatccagtacggcaactactactacggcatggacgtgtggggccagggcacaacagtgacagtctcttctacgcgtatccagaaccctgatcctgccgtgtaccagctgcgggatagcaagagcagcgacaagagcgtgtgtctgttcaccgacttcgacagccagaccaacgtgtcccagagcaaggactccgacgtgtacatcaccgataagtgcgtgctggacatgcggagcatggacttcaagagcaactccgccgtggcctggtccaacaagtccgatttcgcctgcgccaacgccttcaacaacagcattatccccgaggacacattcttcccaagccccgagagcagctgcgacgtgaagctggtggaaaagagcttcgagacagacaccaacctgaacttccagatcctgtacgagatcctgctgggcaaggccaccctgtacgccgtgctggtgtctgccctggtgctgatggctatggtcaagcggaaggacagccggggacgcgccaagagaagcggatctggcgtgaagcagaccctgaatttcgacctgctgaagctggctggcgacgtggaatccaacccaggcccttctagaggccatatgaccgagtacaagcccacggtgcgcctcgccacccgcgacgacgtccccagggccgtacgcaccctcgccgccgcgttcgccgactaccccgccacgcgccacaccgtcgatccggaccgccacatcgagcgggtcaccgagctgcaagaactcttcctcacgcgcgtcgggctcgacatcggcaaggtgtgggtcgcggacgacggcgccgcggtggcggtctggaccacgccggagagcgtcgaagcgggggcggtgttcgccgagatcggcccgcgcatggccgagttgagcggttcccggctggccgcgcagcaacagatggaaggcctcctggcgccgcaccggcccaaggagcccgcgtggttcctggccaccgtcggcgtctcgcccgaccaccagggcaagggtctgggcagcgccgtcgtgctccccggagtggaggcggccgagcgcgccggggtgcccgccttcctggagacctccgcgccccgcaacctccccttctacgagcggctcggcttcaccgtcaccgccgacgtcgaggtgcccgaaggaccgcgcacctggtgcatgacccgcaagcccggtgcctga

SEQ ID NO: 17971 - DNA, 2610 bp, synthetic construct
  source 1..2610: mol_type = other DNA
atggccttaccagtgaccgccttgctcctgccgctggccttgctgctccacgccgccaggccgctcgaggaggacctgaagaacgtgttcccacctgaggtggccgtgttcgagcctagcgaggccgagatcagccacacccagaaagccaccctcgtgtgcctggctaccggcttctaccccgaccatgtggaactgtcttggtgggtcaacggcaaagaggtgcacagcggcgtgtgtaccgacccccagccactgaaagaacagcccgccctgaacgacagccggtactgcctgagcagcagactgagagtgtccgccaccttctggcagaacccccggaaccacttcagatgccaggtgcagttctacggcctgagcgagaacgacgagtggacccaggacagagccaagcccgtgacccagatcgtgtctgccgaagcctggggcagagccgattgcggctttaccagcgagagctaccagcagggcgtgctgagcgccaccaacctgagcgtgatcggcttcagaatcctgctgctgaaagtggccggctttaacctgctgatgaccctgcggctgtggtccagcagggccaagcgatctggatctggagcaacaaacttctcactactcaaacaagcaggtgacgtggaggagaatcccgggcctactagcatggccttaccagtgaccgccttgctcctgccgctggccttgctgctccacgccgccaggccggacatccagatgacccagagccccagcagcctgtctgccagcgtgggcgacagagtgaccatcacctgtagagccagccaggacgtgaacaccgccgtggcctggtatcagcagaagcctggcaaggcccccaagctgctgatctacagcgccagcttcctggaaagcggcgtgcccagcagattcagcggaagcagaagcggcaccgacttcaccctgaccatcagctccctccagcccgaggacttcgccacctactactgccagcagcactacaccacccctcccaccttcggccagaccaaggtggaaatcaagagaggcggaggcggaagtggaggcggaggatctggcggcggaggctctgaagtgcaactggtggaatctggcggcggactggtgcagcctggcggatctctgagactgagctgtgccgccagcggcttcaacatcaaggacacctacatccactgggtgcgccaggcccctggaaagggactggaatgggtggcccggatctaccccaccaacggctacaccagatacgccgacagcgtgaagggccggttcaccatcagcgccgacaccagcaagaataccgcctacctccagatgaacagcctgcgggccgaggataccgccgtgtactactgctcaagatggggaggcgacggcttctacgctatggacgtgtggggccagggcacccttgtgaccgtgtcatctacgcgtatccagaaccctgatcctgccgtgtaccagctgcgggatagcaagagcagcgacaagagcgtgtgtctgttcaccgacttcgacagccagaccaacgtgtcccagagcaaggactccgacgtgtacatcaccgataagtgcgtgctggacatgcggagcatggacttcaagagcaactccgccgtggcctggtccaacaagtccgatttcgcctgcgccaacgccttcaacaacagcattatccccgaggacacattcttcccaagccccgagagcagctgcgacgtgaagctggtggaaaagagcttcgagacagacaccaacctgaacttccagatcctgtacgagatcctgctgggcaaggccaccctgtacgccgtgctggtgtctgccctggtgctgatggctatggtcaagcggaaggacagccggggacgcgccaagagaagcggatctggcgtgaagcagaccctgaatttcgacctgctgaagctggctggcgacgtggaatccaacccaggcccttctagaggccatatgaccgagtacaagcccacggtgcgcctcgccacccgcgacgacgtccccagggccgtacgcaccctcgccgccgcgttcgccgactaccccgccacgcgccacaccgtcgatccggaccgccacatcgagcgggtcaccgagctgcaagaactcttcctcacgcgcgtcgggctcgacatcggcaaggtgtgggtcgcggacgacggcgccgcggtggcggtctggaccacgccggagagcgtcgaagcgggggcggtgttcgccgagatcggcccgcgcatggccgagttgagcggttcccggctggccgcgcagcaacagatggaaggcctcctggcgccgcaccggcccaaggagcccgcgtggttcctggccaccgtcggcgtctcgcccgaccaccagggcaagggtctgggcagcgccgtcgtgctccccggagtggaggcggccgagcgcgccggggtgcccgccttcctggagacctccgcgccccgcaacctccccttctacgagcggctcggcttcaccgtcaccgccgacgtcgaggtgcccgaaggaccgcgcacctggtgcatgacccgcaagcccggtgcctga

SEQ ID NO: 17972 - DNA, 2247 bp, synthetic construct
  source 1..2247: mol_type = other DNA
atggccttaccagtgaccgccttgctcctgccgctggccttgctgctccacgccgccaggccgctcgaggaggacctgaagaacgtgttcccacctgaggtggccgtgttcgagcctagcgaggccgagatcagccacacccagaaagccaccctcgtgtgcctggctaccggcttctaccccgaccatgtggaactgtcttggtgggtcaacggcaaagaggtgcacagcggcgtgtgtaccgacccccagccactgaaagaacagcccgccctgaacgacagccggtactgcctgagcagcagactgagagtgtccgccaccttctggcagaacccccggaaccacttcagatgccaggtgcagttctacggcctgagcgagaacgacgagtggacccaggacagagccaagcccgtgacccagatcgtgtctgccgaagcctggggcagagccgattgcggctttaccagcgagagctaccagcagggcgtgctgagcgccaccaacctgagcgtgatcggcttcagaatcctgctgctgaaagtggccggctttaacctgctgatgaccctgcggctgtggtccagcagggccaagcgatctggatctggagcaacaaacttctcactactcaaacaagcaggtgacgtggaggagaatcccgggcctactagcatggccctgcccgtgacagccctgctgctgcctctggctctgctgctgcacgccgccagacccgatgaattcgaggtgcaactggtggaaagcggcggaggcctggtgcaggctggcggatctctgagactgagctgtgccgccagcggcatcaccttcagcatcaacacaatgggctggtacagacaggcccctggcaagcagagggaactggtggccctgatctccagcatcggcgacacctactacgccgacagcgtgaagggccggttcaccatcagccgggacaacgccaagaacaccgtgtacctccagatgaacagcctgaagcccgaggacaccgccgtgtactactgcaagcggttcagaacagccgcccagggcaccgattattggggccagggaacacaagtgaccgtgtcctctacgcgtatccagaaccctgatcctgccgtgtaccagctgcgggatagcaagagcagcgacaagagcgtgtgtctgttcaccgacttcgacagccagaccaacgtgtcccagagcaaggactccgacgtgtacatcaccgataagtgcgtgctggacatgcggagcatggacttcaagagcaactccgccgtggcctggtccaacaagtccgatttcgcctgcgccaacgccttcaacaacagcattatccccgaggacacattcttcccaagccccgagagcagctgcgacgtgaagctggtggaaaagagcttcgagacagacaccaacctgaacttccagatcctgtacgagatcctgctgggcaaggccaccctgtacgccgtgctggtgtctgccctggtgctgatggctatggtcaagcggaaggacagccggggacgcgccaagagaagcggatctggcgtgaagcagaccctgaatttcgacctgctgaagctggctggcgacgtggaatccaacccaggcccttctagaggccatatgaccgagtacaagcccacggtgcgcctcgccacccgcgacgacgtccccagggccgtacgcaccctcgccgccgcgttcgccgactaccccgccacgcgccacaccgtcgatccggaccgccacatcgagcgggtcaccgagctgcaagaactcttcctcacgcgcgtcgggctcgacatcggcaaggtgtgggtcgcggacgacggcgccgcggtggcggtctggaccacgccggagagcgtcgaagcgggggcggtgttcgccgagatcggcccgcgcatggccgagttgagcggttcccggctggccgcgcagcaacagatggaaggcctcctggcgccgcaccggcccaaggagcccgcgtggttcctggccaccgtcggcgtctcgcccgaccaccagggcaagggtctgggcagcgccgtcgtgctccccggagtggaggcggccgagcgcgccggggtgcccgccttcctggagacctccgcgccccgcaacctccccttctacgagcggctcggcttcaccgtcaccgccgacgtcgaggtgcccgaaggaccgcgcacctggtgcatgacccgcaagcccggtgcctga

SEQ ID NO: 17973 - DNA, 2247 bp, synthetic construct; identical to SEQ ID NO: 17972
  source 1..2247: mol_type = other DNA

SEQ ID NO: 17974 - DNA, 3042 bp, synthetic construct
  source 1..3042: mol_type = other DNA
atggccttaccagtgaccgccttgctcctgccgctggccttgctgctccacgccgccaggccgctcgaggaggacctgaagaacgtgttcccacctgaggtggccgtgttcgagcctagcgaggccgagatcagccacacccagaaagccaccctcgtgtgcctggctaccggcttctaccccgaccatgtggaactgtcttggtgggtcaacggcaaagaggtgcacagcggcgtgtgtaccgacccccagccactgaaagaacagcccgccctgaacgacagccggtactgcctgagcagcagactgagagtgtccgccaccttctggcagaacccccggaaccacttcagatgccaggtgcagttctacggcctgagcgagaacgacgagtggacccaggacagagccaagcccgtgacccagatcgtgtctgccgaagcctggggcagagccgattgcggctttaccagcgagagctaccagcagggcgtgctgagcgccaccaacctgagcgtgatcggcttcagaatcctgctgctgaaagtggccggctttaacctgctgatgaccctgcggctgtggtccagcagggccaagcgatctggatctggagcaacaaacttctcactactcaaacaagcaggtgacgtggaggagaatcccgggcctactagcatggccttaccagtgaccgccttgctcctgccgctggccttgctgctccacgccgccaggccgcaggtccagctcgtcgagtccggcggcggcctcgtccaggccggcgactccgtcaccctctcctgcaccgcctccggccgcaccttctcctcctacgccctcgcctggttccgccagcgccccggcaaggagcgcgagttcgtcgccggcctccgctggggcggccccaccaactacgccgactccgtcaaggaccgcttcaccatctccggcgactccgccaagcacaccatgtacctccagatgaactccctcaagcccgaggacaccgccgtctactactgcggctacaaccccggcggctgggccgtcccctcccagtacgagtacgactcctggggccagggcacccaggtcaccgtctcctccggtaccggcggaggcggatctggcggcggaggtagcggtggcggaggatctgaattcgacatccagatgacacagagccctagcagcctgtctgccagcgtgggagacagagtgaccatcacatgcaaggccagcgaccacatcaacaactggctggcctggtatcagcagaagcctggacaggcccctaagctgctgatctacggcgctaccacactggaaacaggcgtgcccagcagattttctggcagcggctctggcaccgactacaccctgacaatatccagcctccagcctgaggacttcgccacctactactgtcagcagagctggaacaccccttggacattcggccagggcaccaagctggaaatcaagagaggcggaggcggaagtggaggcggaggatctggcggcggaggctctcaagttcagcttcaacagcctggcgctgagctggtcaaacctggcgcttctgtgaagatgagctgcaaagccagcggctacgccttcagcagctactggatcaactggatgaagcagaaacccggccagggactcgaatggatcggccaaatctatcccggcgacggcgacaccaactacaacggcaagttcaagggcagagccacactgaccgccgatacctctagcagcacagcctacatgcagctgagcagcctgaccagcgaagatagcgccgtgtacttctgtgcccggtccatcacaacagtcgtgggctgcgctatggactattggggccagggaacaagcgtgaccgtgtctagtacgcgtatccagaaccctgatcctgccgtgtaccagctgcgggatagcaagagcagcgacaagagcgtgtgtctgttcaccgacttcgacagccagaccaacgtgtcccagagcaaggactccgacgtgtacatcaccgataagtgcgtgctggacatgcggagcatggacttcaagagcaactccgccgtggcctggtccaacaagtccgatttcgcctgcgccaacgccttcaacaacagcattatccccgaggacacattcttcccaagccccgagagcagctgcgacgtgaagctggtggaaaagagcttcgagacagacaccaacctgaacttccagatcctgtacgagatcctgctgggcaaggccaccctgtacgccgtgctggtgtctgccctggtgctgatggctatggtcaagcggaaggacagccggggacgcgccaagagaagcggatctggcgtgaagcagaccctgaatttcgacctgctgaagctggctggcgacgtggaatccaacccaggcccttctagaggccatatgaccgagtacaagcccacggtgcgcctcgccacccgcgacgacgtccccagggccgtacgcaccctcgccgccgcgttcgccgactaccccgccacgcgccacaccgtcgatccggaccgccacatcgagcgggtcaccgagctgcaagaactcttcctcacgcgcgtcgggctcgacatcggcaaggtgtgggtcgcggacgacggcgccgcggtggcggtctggaccacgccggagagcgtcgaagcgggggcggtgttcgccgagatcggcccgcgcatggccgagttgagcggttcccggctggccgcgcagcaacagatggaaggcctcctggcgccgcaccggcccaaggagcccgcgtggttcctggccaccgtcggcgtctcgcccgaccaccagggcaagggtctgggcagcgccgtcgtgctccccggagtggaggcggccgagcgcgccggggtgcccgccttcctggagacctccgcgccccgcaacctccccttctacgagcggctcggcttcaccgtcaccgccgacgtcgaggtgcccgaaggaccgcgcacctggtgcatgacccgcaagcccggtgcctga

SEQ ID NO: 17975 - DNA, 3429 bp, synthetic construct
  source 1..3429: mol_type = other DNA
atggccttaccagtgaccgccttgctcctgccgctggccttgctgctccacgccgccaggccgctcgaggaggacctgaagaacgtgttcccacctgaggtggccgtgttcgagcctagcgaggccgagatcagccacacccagaaagccaccctcgtgtgcctggctaccggcttctaccccgaccatgtggaactgtcttggtgggtcaacggcaaagaggtgcacagcggcgtgtgtaccgacccccagccactgaaagaacagcccgccctgaacgacagccggtactgcctgagcagcagactgagagtgtccgccaccttctggcagaacccccggaaccacttcagatgccaggtgcagttctacggcctgagcgagaacgacgagtggacccaggacagagccaagcccgtgacccagatcgtgtctgccgaagcctggggcagagccgattgcggctttaccagcgagagctaccagcagggcgtgctgagcgccaccaacctgagcgtgatcggcttcagaatcctgctgctgaaagtggccggctttaacctgctgatgaccctgcggctgtggtccagcagggccaagcgatctggatctggagcaacaaacttctcactactcaaacaagcaggtgacgtggaggagaatcccgggcctactagcatggccttaccagtgaccgccttgctcctgccgctggccttgctgctccacgccgccaggccggaggttcagctgcttgagtctggcggaggactggttcaacctggcggaagcctgagactgtcttgtgccgccagcggcttcacctttagcagctacgccatgagctgggtccgacaggctcctggcaaaggactggaatgggtgtccagcatcagcggcagcggcgactacatctactacgccgatagcgtgaagggcagattcaccatcagccgggacatcagcaagaacaccctgtacctccagatgaacagcctgagagccgaggacaccgccgtgtactactgtgccaaagaaggcaccggcgctaacagcagcctggccgattatagaggccagggcacactggtcaccgtgtctagtggcggaggaagcggcggaggatctcaggtccagctcgtcgagtccggcggcggcctcgtccaggccggcgactccgtcaccctctcctgcaccgcctccggccgcaccttctcctcctacgccctcgcctggttccgccagcgccccggcaaggagcgcgagttcgtcgccggcctccgctggggcggccccaccaactacgccgactccgtcaaggaccgcttcaccatctccggcgactccgccaagcacaccatgtacctccagatgaactccctcaagcccgaggacaccgccgtctactactgcggctacaaccccggcggctgggccgtcccctcccagtacgagtacgactcctggggccagggcacccaggtcaccgtctcctccggtaccggcggaggcggatctggcggcggaggtagcggtggcggaggatctgaattcgacatccagatgacacagagccctagcagcctgtctgccagcgtgggagacagagtgaccatcacatgcaaggccagcgaccacatcaacaactggctggcctggtatcagcagaagcctggacaggcccctaagctgctgatctacggcgctaccacactggaaacaggcgtgcccagcagattttctggcagcggctctggcaccgactacaccctgacaatatccagcctccagcctgaggacttcgccacctactactgtcagcagagctggaacaccccttggacattcggccagggcaccaagctggaaatcaagagaggcggaggcggaagtggaggcggaggatctggcggcggaggctctcaagttcagcttcaacagcctggcgctgagctggtcaaacctggcgcttctgtgaagatgagctgcaaagccagcggctacgccttcagcagctactggatcaactggatgaagcagaaacccggccagggactcgaatggatcggccaaatctatcccggcgacggcgacaccaactacaacggcaagttcaagggcagagccacactgaccgccgatacctctagcagcacagcctacatgcagctgagcagcctgaccagcgaagatagcgccgtgtacttctgtgcccggtccatcacaacagtcgtgggctgcgctatggactattggggccagggaacaagcgtgaccgtgtctagtacgcgtatccagaaccctgatcctgccgtgtaccagctgcgggatagcaagagcagcgacaagagcgtgtgtctgttcaccgacttcgacagccagaccaacgtgtcccagagcaaggactccgacgtgtacatcaccgataagtgcgtgctggacatgcggagcatggacttcaagagcaactccgccgtggcctggtccaacaagtccgatttcgcctgcgccaacgccttcaacaacagcattatccccgaggacacattcttcccaagccccgagagcagctgcgacgtgaagctggtggaaaagagcttcgagacagacaccaacctgaacttccagatcctgtacgagatcctgctgggcaaggccaccctgtacgccgtgctggtgtctgccctggtgctgatggctatggtcaagcggaaggacagccggggacgcgccaagagaagcggatctggcgtgaagcagaccctgaatttcgacctgctgaagctggctggcgacgtggaatccaacccaggcccttctagaggccatatgaccgagtacaagcccacggtgcgcctcgccacccgcgacgacgtccccagggccgtacgcaccctcgccgccgcgttcgccgactaccccgccacgcgccacaccgtcgatccggaccgccacatcgagcgggtcaccgagctgcaagaactcttcctcacgcgcgtcgggctcgacatcggcaaggtgtgggtcgcggacgacggcgccgcggtggcggtctggaccacgccggagagcgtcgaagcgggggcggtgttcgccgagatcggcccgcgcatggccgagttgagcggttcccggctggccgcgcagcaacagatggaaggcctcctggcgccgcaccggcccaaggagcccgcgtggttcctggccaccgtcggcgtctcgcccgaccaccagggcaagggtctgggcagcgccgtcgtgctccccggagtggaggcggccgagcgcgccggggtgcccgccttcctggagacctccgcgccccgcaacctccccttctacgagcggctcggcttcaccgtcaccgccgacgtcgaggtgcccgaaggaccgcgcacctggtgcatgacccgcaagcccggtgcctga

SEQ ID NO: 17976 - DNA, 3423 bp, synthetic construct
  source 1..3423: mol_type = other DNA
atggccttaccagtgaccgccttgctcctgccgctggccttgctgctccacgccgccaggccgctcgaggaggacctgaagaacgtgttcccacctgaggtggccgtgttcgagcctagcgaggccgagatcagccacacccagaaagccaccctcgtgtgcctggctaccggcttctaccccgaccatgtggaactgtcttggtgggtcaacggcaaagaggtgcacagcggcgtgtgtaccgacccccagccactgaaagaacagcccgccctgaacgacagccggtactgcctgagcagcagactgagagtgtccgccaccttctggcagaacccccggaaccacttcagatgccaggtgcagttctacggcctgagcgagaacgacgagtggacccaggacagagccaagcccgtgacccagatcgtgtctgccgaagcctggggcagagccgattgcggctttaccagcgagagctaccagcagggcgtgctgagcgccaccaacctgagcgtgatcggcttcagaatcctgctgctgaaagtggccggctttaacctgctgatgaccctgcggctgtggtccagcagggccaagcgatctggatctggagcaacaaacttctcactactcaaacaagcaggtgacgtggaggagaatcccgggcctactagcatggccttaccagtgaccgccttgctcctgccgctggccttgctgctccacgccgccaggccgggcgtgacacagagccccacacacctgattaagaccagaggccagcaggccacactgagatgcagccctatcagcggccacaccagcgtgtactggtatcagcaggctctcggactgggcctccagttcctgctttggtacgacgagggcgaagagagaaaccggggcaacttccctcctcggttttccggcagacagttccccaactacagcagcgagctgaacgtgaacgccctggaactggaagatagcgccctgtacctgtgtgcctcttctcttggtggacctcgcggactggctggactgagaggggatgagcagtttttcggccctggcaccagactgaccgtgctggaaggcggaggaagcggcggaggatctcaggtccagctcgtcgagtccggcggcggcctcgtccaggccggcgactccgtcaccctctcctgcaccgcctccggccgcaccttctcctcctacgccctcgcctggttccgccagcgccccggcaaggagcgcgagttcgtcgccggcctccgctggggcggccccaccaactacgccgactccgtcaaggaccgcttcaccatctccggcgactccgccaagcacaccatgtacctccagatgaactccctcaagcccgaggacaccgccgtctactactgcggctacaaccccggcggctgggccgtcccctcccagtacgagtacgactcctggggccagggcacccaggtcaccgtctcctccggtaccggcggaggcggatctggcggcggaggtagcggtggcggaggatctgaattcgacatccagatgacacagagccctagcagcctgtctgccagcgtgggagacagagtgaccatcacatgcaaggccagcgaccacatcaacaactggctggcctggtatcagcagaagcctggacaggcccctaagctgctgatctacggcgctaccacactggaaacaggcgtgcccagcagattttctggcagcggctctggcaccgactacaccctgacaatatccagcctccagcctgaggacttcgccacctactactgtcagcagagctggaacaccccttggacattcggccagggcaccaagctggaaatcaagagaggcggaggcggaagtggaggcggaggatctggcggcggaggctctcaagttcagcttcaacagcctggcgctgagctggtcaaacctggcgcttctgtgaagatgagctgcaaagccagcggctacgccttcagcagctactggatcaactggatgaagcagaaacccggccagggactcgaatggatcggccaaatctatcccggcgacggcgacaccaactacaacggcaagttcaagggcagagccacactgaccgccgatacctctagcagcacagcctacatgcagctgagcagcctgaccagcgaagatagcgccgtgtacttctgtgcccggtccatcacaacagtcgtgggctgcgctatggactattggggccagggaacaagcgtgaccgtgtctagtacgcgtatccagaaccctgatcctgccgtgtaccagctgcgggatagcaagagcagcgacaagagcgtgtgtctgttcaccgacttcgacagccagaccaacgtgtcccagagcaaggactccgacgtgtacatcaccgataagtgcgtgctggacatgcggagcatggacttcaagagcaactccgccgtggcctggtccaacaagtccgatttcgcctgcgccaacgccttcaacaacagcattatccccgaggacacattcttcccaagccccgagagcagctgcgacgtgaagctggtggaaaagagcttcgagacagacaccaacctgaacttccagatcctgtacgagatcctgctgggcaaggccaccctgtacgccgtgctggtgtctgccctggtgctgatggctatggtcaagcggaaggacagccggggacgcgccaagagaagcggatctggcgtgaagcagaccctgaatttcgacctgctgaagctggctggcgacgtggaatccaacccaggcccttctagaggccatatgaccgagtacaagcccacggtgcgcctcgccacccgcgacgacgtccccagggccgtacgcaccctcgccgccgcgttcgccgactaccccgccacgcgccacaccgtcgatccggaccgccacatcgagcgggtcaccgagctgcaagaactcttcctcacgcgcgtcgggctcgacatcggcaaggtgtgggtcgcggacgacggcgccgcggtggcggtctggaccacgccggagagcgtcgaagcgggggcggtgttcgccgagatcggcccgcgcatggccgagttgagcggttcccggctggccgcgcagcaacagatggaaggcctcctggcgccgcaccggcccaaggagcccgcgtggttcctggccaccgtcggcgtctcgcccgaccaccagggcaagggtctgggcagcgccgtcgtgctccccggagtggaggcggccgagcgcgccggggtgcccgccttcctggagacctccgcgccccgcaacctccccttctacgagcggctcggcttcaccgtcaccgccgacgtcgaggtgcccgaaggaccgcgcacctggtgcatgacccgcaagcccggtgcctga

SEQ ID NO: 17977 - DNA, 3405 bp, synthetic construct
  source 1..3405: mol_type = other DNA
atggccttaccagtgaccgccttgctcctgccgctggccttgctgctccacgccgccaggccgctcgaggaggacctgaagaacgtgttcccacctgaggtggccgtgttcgagcctagcgaggccgagatcagccacacccagaaagccaccctcgtgtgcctggctaccggcttctaccccgaccatgtggaactgtcttggtgggtcaacggcaaagaggtgcacagcggcgtgtgtaccgacccccagccactgaaagaacagcccgccctgaacgacagccggtactgcctgagcagcagactgagagtgtccgccaccttctggcagaacccccggaaccacttcagatgccaggtgcagttctacggcctgagcgagaacgacgagtggacccaggacagagccaagcccgtgacccagatcgtgtctgccgaagcctggggcagagccgattgcggctttaccagcgagagctaccagcagggcgtgctgagcgccaccaacctgagcgtgatcggcttcagaatcctgctgctgaaagtggccggctttaacctgctgatgaccctgcggctgtggtccagcagggccaagcgatctggatctggagcaacaaacttctcactactcaaacaagcaggtgacgtggaggagaatcccgggcctactagcatggccttaccagtgaccgccttgctcctgccgctggccttgctgctccacgccgccaggccgggcgtgacacagagccccacacacctgattaagaccagaggccagcaggccacactgagatgcagccctatcagcggccacaccagcgtgtactggtatcagcaggctctcggactgggcctccagttcctgctttggtacgacgagggcgaagagagaaaccggggcaacttccctcctcggttttccggcagacagttccccaactacagcagcgagctgaacgtgaacgccctggaactggaagatagcgccctgtacctgtgtgcctcttctcttggtggacctcgcggactggctggactgagaggggatgagcagtttttcggccctggcaccagactgaccgtgctggaaggcggaggaagcggcggaggatctggcgtgacacagagccccacacacctgattaagaccagaggccagcaggccacactgagatgcagccctatcagcggccacaccagcgtgtactggtatcagcaggctctcggactgggcctccagttcctgctttggtacgacgagggcgaagagagaaaccggggcaacttccctcctcggttttccggcagacagttccccaactacagcagcgagctgaacgtgaacgccctggaactggaagatagcgccctgtacctgtgtgccagctctctcggcggagatgaactgggagccgatggcaacgagcagttctttggccctggcaccagactgaccgtgctggaaggtaccggcggaggcggatctggcggcggaggtagcggtggcggaggatctgaattcgacatccagatgacacagagccctagcagcctgtctgccagcgtgggagacagagtgaccatcacatgcaaggccagcgaccacatcaacaactggctggcctggtatcagcagaagcctggacaggcccctaagctgctgatctacggcgctaccacactggaaacaggcgtgcccagcagattttctggcagcggctctggcaccgactacaccctgacaatatccagcctccagcctgaggacttcgccacctactactgtcagcagagctggaacaccccttggacattcggccagggcaccaagctggaaatcaagagaggcggaggcggaagtggaggcggaggatctggcggcggaggctctcaagttcagcttcaacagcctggcgctgagctggtcaaacctggcgcttctgtgaagatgagctgcaaagccagcggctacgccttcagcagctactggatcaactggatgaagcagaaacccggccagggactcgaatggatcggccaaatctatcccggcgacggcgacaccaactacaacggcaagttcaagggcagagccacactgaccgccgatacctctagcagcacagcctacatgcagctgagcagcctgaccagcgaagatagcgccgtgtacttctgtgcccggtccatcacaacagtcgtgggctgcgctatggactattggggccagggaacaagcgtgaccgtgtctagtacgcgtatccagaaccctgatcctgccgtgtaccagctgcgggatagcaagagcagcgacaagagcgtgtgtctgttcaccgacttcgacagccagaccaacgtgtcccagagcaaggactccgacgtgtacatcaccgataagtgcgtgctggacatgcggagcatggacttcaagagcaactccgccgtggcctggtccaacaagtccgatttcgcctgcgccaacgccttcaacaacagcattatccccgaggacacattcttcccaagccccgagagcagctgcgacgtgaagctggtggaaaagagcttcgagacagacaccaacctgaacttccagatcctgtacgagatcctgctgggcaaggccaccctgtacgccgtgctggtgtctgccctggtgctgatggctatggtcaagcggaaggacagccggggacgcgccaagagaagcggatctggcgtgaagcagaccctgaatttcgacctgctgaagctggctggcgacgtggaatccaacccaggcccttctagaggccatatgaccgagtacaagcccacggtgcgcctcgccacccgcgacgacgtccccagggccgtacgcaccctcgccgccgcgttcgccgactaccccgccacgcgccacaccgtcgatccggaccgccacatcgagcgggtcaccgagctgcaagaactcttcctcacgcgcgtcgggctcgacatcggcaaggtgtgggtcgcggacgacggcgccgcggtggcggtctggaccacgccggagagcgtcgaagcgggggcggtgttcgccgagatcggcccgcgcatggccgagttgagcggttcccggctggccgcgcagcaacagatggaaggcctcctggcgccgcaccggcccaaggagcccgcgtggttcctggccaccgtcggcgtctcgcccgaccaccagggcaagggtctgggcagcgccgtcgtgctccccggagtggaggcggccgagcgcgccggggtgcccgccttcctggagacctccgcgccccgcaacctccccttctacgagcggctcggcttcaccgtcaccgccgacgtcgaggtgcccgaaggaccgcgcacctggtgcatgacccgcaagcccggtgcctga

SEQ ID NO: 17978 - DNA, 2265 bp, synthetic construct
  source 1..2265: mol_type = other DNA
atggccttaccagtgaccgccttgctcctgccgctggccttgctgctccacgccgccaggccgctcgaggaggacctgaagaacgtgttcccacctgaggtggccgtgttcgagcctagcgaggccgagatcagccacacccagaaagccaccctcgtgtgcctggctaccggcttctaccccgaccatgtggaactgtcttggtgggtcaacggcaaagaggtgcacagcggcgtgtgtaccgacccccagccactgaaagaacagcccgccctgaacgacagccggtactgcctgagcagcagactgagagtgtccgccaccttctggcagaacccccggaaccacttcagatgccaggtgcagttctacggcctgagcgagaacgacgagtggacccaggacagagccaagcccgtgacccagatcgtgtctgccgaagcctggggcagagccgattgcggctttaccagcgagagctaccagcagggcgtgctgagcgccaccaacctgagcgtgatcggcttcagaatcctgctgctgaaagtggccggctttaacctgctgatgaccctgcggctgtggtccagcagggccaagcgatctggatctggagcaacaaacttctcactactcaaacaagcaggtgacgtggaggagaatcccgggcctactagcatggccctgcccgtgacagccctgctgctgcctctggctctgctgctgcacgccgccagacccgatgaattcggctctgacctgggcatcaagctgctgttcgccgctgccaagggccaggacgacgaagtgcggattctgctggctgctggggccgacgtgaacgccaaggatttcgagggctacacccccctgcacgtggccgcctatgatggacacctggaaatcgtggaagtgctgctgaaggctggcgctgatgtgaatgccaaagacagccagggccggacccctctgcatgaagccgcctacagcggccatctggaaattgtggaagtgctgctgaaagccggggcagacgtgaacgctcaggacgacgctggcgagacaccagccgatctggctgcagcttggggccacgaagatatcgccgaggtgctgcagaagacgcgtatccagaaccctgatcctgccgtgtaccagctgcgggatagcaagagcagcgacaagagcgtgtgtctgttcaccgacttcgacagccagaccaacgtgtcccagagcaaggactccgacgtgtacatcaccgataagtgcgtgctggacatgcggagcatggacttcaagagcaactccgccgtggcctggtccaacaagtccgatttcgcctgcgccaacgccttcaacaacagcattatccccgaggacacattcttcccaagccccgagagcagctgcgacgtgaagctggtggaaaagagcttcgagacagacaccaacctgaacttccagatcctgtacgagatcctgctgggcaaggccaccctgtacgccgtgctggtgtctgccctggtgctgatggctatggtcaagcggaaggacagccggggacgcgccaagagaagcggatctggcgtgaagcagaccctgaatttcgacctgctgaagctggctggcgacgtggaatccaacccaggcccttctagaggccatatgaccgagtacaagcccacggtgcgcctcgccacccgcgacgacgtccccagggccgtacgcaccctcgccgccgcgttcgccgactaccccgccacgcgccacaccgtcgatccggaccgccacatcgagcgggtcaccgagctgcaagaactcttcctcacgcgcgtcgggctcgacatcggcaaggtgtgggtcgcggacgacggcgccgcggtggcggtctggaccacgccggagagcgtcgaagcgggggcggtgttcgccgagatcggcccgcgcatggccgagttgagcggttcccggctggccgcgcagcaacagatggaaggcctcctggcgccgcaccggcccaaggagcccgcgtggttcctggccaccgtcggcgtctcgcccgaccaccagggcaagggtctgggcagcgccgtcgtgctccccggagtggaggcggccgagcgcgccggggtgcccgccttcctggagacctccgcgccccgcaacctccccttctacgagcggctcggcttcaccgtcaccgccgacgtcgaggtgcccgaaggaccgcgcacctggtgcatgacccgcaagcccggtgcctga

SEQ ID NO: 17979 - DNA, 2052 bp, synthetic construct
  source 1..2052: mol_type = other DNA
atggccttaccagtgaccgccttgctcctgccgctggccttgctgctccacgccgccaggccgctcgaggaggacctgaagaacgtgttcccacctgaggtggccgtgttcgagcctagcgaggccgagatcagccacacccagaaagccaccctcgtgtgcctggctaccggcttctaccccgaccatgtggaactgtcttggtgggtcaacggcaaagaggtgcacagcggcgtgtgtaccgacccccagccactgaaagaacagcccgccctgaacgacagccggtactgcctgagcagcagactgagagtgtccgccaccttctggcagaacccccggaaccacttcagatgccaggtgcagttctacggcctgagcgagaacgacgagtggacccaggacagagccaagcccgtgacccagatcgtgtctgccgaagcctggggcagagccgattgcggctttaccagcgagagctaccagcagggcgtgctgagcgccaccaacctgagcgtgatcggcttcagaatcctgctgctgaaagtggccggctttaacctgctgatgaccctgcggctgtggtccagcagggccaagcgatctggatctggagcaacaaacttctcactactcaaacaagcaggtgacgtggaggagaatcccgggcctactagcatggactggatttggcgcatccttttccttgtcggcgctgctaccggcgcccattccttcgaaggcagcggattcgaatacgccaaagagatgcggaacgcctactgggagatcgccctgctgcccaatctgaccaaccagcagaagagagcccccatcagaaagctgtacgacgacccctcccagagcagcgagctgctgtctgaggctaaaaaactgaacgatagccagacgcgtatccagaaccctgatcctgccgtgtaccagctgcgggatagcaagagcagcgacaagagcgtgtgtctgttcaccgacttcgacagccagaccaacgtgtcccagagcaaggactccgacgtgtacatcaccgataagtgcgtgctggacatgcggagcatggacttcaagagcaactccgccgtggcctggtccaacaagtccgatttcgcctgcgccaacgccttcaacaacagcattatccccgaggacacattcttcccaagccccgagagcagctgcgacgtgaagctggtggaaaagagcttcgagacagacaccaacctgaacttccagatcctgtacgagatcctgctgggcaaggccaccctgtacgccgtgctggtgtctgccctggtgctgatggctatggtcaagcggaaggacagccggggacgcgccaagagaagcggatctggcgtgaagcagaccctgaatttcgacctgctgaagctggctggcgacgtggaatccaacccaggcccttctagaggccatatgaccgagtacaagcccacggtgcgcctcgccacccgcgacgacgtccccagggccgtacgcaccctcgccgccgcgttcgccgactaccccgccacgcgccacaccgtcgatccggaccgccacatcgagcgggtcaccgagctgcaagaactcttcctcacgcgcgtcgggctcgacatcggcaaggtgtgggtcgcggacgacggcgccgcggtggcggtctggaccacgccggagagcgtcgaagcgggggcggtgttcgccgagatcggcccgcgcatggccgagttgagcggttcccggctggccgcgcagcaacagatggaaggcctcctggcgccgcaccggcccaaggagcccgcgtggttcctggccaccgtcggcgtctcgcccgaccaccagggcaagggtctgggcagcgccgtcgtgctccccggagtggaggcggccgagcgcgccggggtgcccgccttcctggagacctccgcgccccgcaacctccccttctacgagcggctcggcttcaccgtcaccgccgacgtcgaggtgcccgaaggaccgcgcacctggtgcatgacccgcaagcccggtgcctga

SEQ ID NO: 17980 - DNA, 2718 bp, synthetic construct
  source 1..2718: mol_type = other DNA
atggccttaccagtgaccgccttgctcctgccgctggccttgctgctccacgccgccaggccgctcgaggaggacctgaagaacgtgttcccacctgaggtggccgtgttcgagcctagcgaggccgagatcagccacacccagaaagccaccctcgtgtgcctggctaccggcttctaccccgaccatgtggaactgtcttggtgggtcaacggcaaagaggtgcacagcggcgtgtgtaccgacccccagccactgaaagaacagcccgccctgaacgacagccggtactgcctgagcagcagactgagagtgtccgccaccttctggcagaacccccggaaccacttcagatgccaggtgcagttctacggcctgagcgagaacgacgagtggacccaggacagagccaagcccgtgacccagatcgtgtctgccgaagcctggggcagagccgattgcggctttaccagcgagagctaccagcagggcgtgctgagcgccaccaacctgagcgtgatcggcttcagaatcctgctgctgaaagtggccggctttaacctgctgatgaccctgcggctgtggtccagcagggccaagcgatctggatctggagcaacaaacttctcactactcaaacaagcaggtgacgtggaggagaatcccgggcctactagcatggccctgcccgtgacagccctgctgctgcctctggctctgctgctgcacgccgccagacccgatgaattcgaggtgcaactggtggaaagcggcggaggcctggtgcaggctggcggatctctgagactgagctgtgccgccagcggcatcaccttcagcatcaacacaatgggctggtacagacaggcccctggcaagcagagggaactggtggccctgatctccagcatcggcgacacctactacgccgacagcgtgaagggccggttcaccatcagccgggacaacgccaagaacaccgtgtacctccagatgaacagcctgaagcccgaggacaccgccgtgtactactgcaagcggttcagaacagccgcccagggcaccgattattggggccagggaacacaagtgaccgtgtcctctctcgagggaggaggcggctccgggggaggcggaagtggaggcggaggatctgggtctggaggaagcggatctggaggctcagggtcagggggctcaggcagtggaggctctttcgaagtgcaactggtggaatctgggggcggactggtgcagccaggcggaagtctgaggctgtcttgtgccgcctccggcagcatcttcggcttcaacgacatggcctggtatcggcaggctcccggaaaacagcgcgagctggtggctctgattagcagagtgggcgtgaccagcagcgccgactctgtgaagggcagattcacaatctccagagtgaacgccaaggatacagtgtacctccagatgaactctctgaaacctgaggatacagcagtgtactattgctacatggaccagcggctggacggcagcacactggcctactggggacagggaactcaagtgacagtgtctagcacgcgtatccagaaccctgatcctgccgtgtaccagctgcgggatagcaagagcagcgacaagagcgtgtgtctgttcaccgacttcgacagccagaccaacgtgtcccagagcaaggactccgacgtgtacatcaccgataagtgcgtgctggacatgcggagcatggacttcaagagcaactccgccgtggcctggtccaacaagtccgatttcgcctgcgccaacgccttcaacaacagcattatccccgaggacacattcttcccaagccccgagagcagctgcgacgtgaagctggtggaaaagagcttcgagacagacaccaacctgaacttccagatcctgtacgagatcctgctgggcaaggccaccctgtacgccgtgctggtgtctgccctggtgctgatggctatggtcaagcggaaggacagccggggacgcgccaagagaagcggatctggcgtgaagcagaccctgaatttcgacctgctgaagctggctggcgacgtggaatccaacccaggcccttctagaggccatatgaccgagtacaagcccacggtgcgcctcgccacccgcgacgacgtccccagggccgtacgcaccctcgccgccgcgttcgccgactaccccgccacgcgccacaccgtcgatccggaccgccacatcgagcgggtcaccgagctgcaagaactcttcctcacgcgcgtcgggctcgacatcggcaaggtgtgggtcgcggacgacggcgccgcggtggcggtctggaccacgccggagagcgtcgaagcgggggcggtgttcgccgagatcggcccgcgcatggccgagttgagcggttcccggctggccgcgcagcaacagatggaaggcctcctggcgccgcaccggcccaaggagcccgcgtggttcctggccaccgtcggcgtctcgcccgaccaccagggcaagggtctgggcagcgccgtcgtgctccccggagtggaggcggccgagcgcgccggggtgcccgccttcctggagacctccgcgccccgcaacctccccttctacgagcggctcggcttcaccgtcaccgccgacgtcgaggtgcccgaaggaccgcgcacctggtgcatgacccgcaagcccggtgcctga

SEQ ID NO: 17981 - DNA, 2460 bp, synthetic construct
  source 1..2460: mol_type = other DNA
atggccttaccagtgaccgccttgctcctgccgctggccttgctgctccacgccgccaggccgctcgaggaggacctgaagaacgtgttcccacctgaggtggccgtgttcgagcctagcgaggccgagatcagccacacccagaaagccaccctcgtgtgcctggctaccggcttctaccccgaccatgtggaactgtcttggtgggtcaacggcaaagaggtgcacagcggcgtgtgtaccgacccccagccactgaaagaacagcccgccctgaacgacagccggtactgcctgagcagcagactgagagtgtccgccaccttctggcagaacccccggaaccacttcagatgccaggtgcagttctacggcctgagcgagaacgacgagtggacccaggacagagccaagcccgtgacccagatcgtgtctgccgaagcctggggcagagccgattgcggctttaccagcgagagctaccagcagggcgtgctgagcgccaccaacctgagcgtgatcggcttcagaatcctgctgctgaaagtggccggctttaacctgctgatgaccctgcggctgtggtccagcagggccaagcgatctggatctggagcaacaaacttctcactactcaaacaagcaggtgacgtggaggagaatcccgggcctactagcatggcccttccagtcactgccttgctgttgcctctggcgctcctgctccacgccgctagaccgggcatgagaaccgaggacctgcctaaggccgtggtgttcctggaaccccagtggtacagagtgctggaaaaggacagcgtgaccctgaagtgccagggcgcctacagccccgaggacaatagcacccagtggttccacaacgagagcctgatctccagccaggccagcagctacttcatcgacgccgccaccgtggacgacagcggcgagtatagatgccagaccaacctgagcaccctgagcgaccccgtgcagctggaagtgcacatcggatggctgctgctgcaggcccccagatgggtgttcaaagaagaggaccccatccacctgagatgccactcttggaagaacaccgccctgcacaaagtgacctacctgcagaacggcaagggcagaaagtacttccaccacaacagcgacttctacatccccaaggccaccctgaaggactccggctcctacttctgcagaggcctcgtgggcagcaagaacgtgtccagcgagacagtgaacatcaccatcacccagggcctggccgtgtctaccatcagcagctttttcccacccggctaccagacgcgtatccagaaccctgatcctgccgtgtaccagctgcgggatagcaagagcagcgacaagagcgtgtgtctgttcaccgacttcgacagccagaccaacgtgtcccagagcaaggactccgacgtgtacatcaccgataagtgcgtgctggacatgcggagcatggacttcaagagcaactccgccgtggcctggtccaacaagtccgatttcgcctgcgccaacgccttcaacaacagcattatccccgaggacacattcttcccaagccccgagagcagctgcgacgtgaagctggtggaaaagagcttcgagacagacaccaacctgaacttccagatcctgtacgagatcctgctgggcaaggccaccctgtacgccgtgctggtgtctgccctggtgctgatggctatggtcaagcggaaggacagccggggacgcgccaagagaagcggatctggcgtgaagcagaccctgaatttcgacctgctgaagctggctggcgacgtggaatccaacccaggcccttctagaggccatatgaccgagtacaagcccacggtgcgcctcgccacccgcgacgacgtccccagggccgtacgcaccctcgccgccgcgttcgccgactaccccgccacgcgccacaccgtcgatccggaccgccacatcgagcgggtcaccgagctgcaagaactcttcctcacgcgcgtcgggctcgacatcggcaaggtgtgggtcgcggacgacggcgccgcggtggcggtctggaccacgccggagagcgtcgaagcgggggcggtgttcgccgagatcggcccgcgcatggccgagttgagcggttcccggctggccgcgcagcaacagatggaaggcctcctggcgccgcaccggcccaaggagcccgcgtggttcctggccaccgtcggcgtctcgcccgaccaccagggcaagggtctgggcagcgccgtcgtgctccccggagtggaggcggccgagcgcgccggggtgcccgccttcctggagacctccgcgccccgcaacctccccttctacgagcggctcggcttcaccgtcaccgccgacgtcgaggtgcccgaaggaccgcgcacctggtgcatgacccgcaagcccggtgcctga

SEQ ID NO: 17982 - DNA, 1341 bp, synthetic construct
  source 1..1341: mol_type = other DNA
atggccttaccagtgaccgccttgctcctgccgctggccttgctgctccacgccgccaggccgctcgaggaggacctgaagaacgtgttcccacctgaggtggccgtgttcgagcctagcgaggccgagatcagccacacccagaaagccaccctcgtgtgcctggctaccggcttctaccccgaccatgtggaactgtcttggtgggtcaacggcaaagaggtgcacagcggcgtgtgtaccgacccccagccactgaaagaacagcccgccctgaacgacagccggtactgcctgagcagcagactgagagtgtccgccaccttctggcagaacccccggaaccacttcagatgccaggtgcagttctacggcctgagcgagaacgacgagtggacccaggacagagccaagcccgtgacccagatcgtgtctgccgaagcctggggcagagccgattgcggctttaccagcgagagctaccagcagggcgtgctgagcgccaccaacctgagcgtgatcggcttcagaatcctgctgctgaaagtggccggctttaacctgctgatgaccctgcggctgtggtccagcagggccaagcgatctggatctggagcaacaaacttctcactactcaaacaagcaggtgacgtggaggagaatcccgggcctactagcgccaccatggccttaccagtgaccgccttgctcctgccgctggccttgctgctccacgccgccaggccgatggaccccgacctggaaatcagagccgccttcctgcggcagagaaacacagccctgagaacagaggtggccgagctggaacaagaggtgcagcggctggaaaacgaggtgtcccagtacgagacaagatacggccctctcggaggcggaaaaacgcgtatccagaaccctgatcctgccgtgtaccagctgcgggatagcaagagcagcgacaagagcgtgtgtctgttcaccgacttcgacagccagaccaacgtgtcccagagcaaggactccgacgtgtacatcaccgataagtgcgtgctggacatgcggagcatggacttcaagagcaactccgccgtggcctggtccaacaagtccgatttcgcctgcgccaacgccttcaacaacagcattatccccgaggacacattcttcccaagccccgagagcagctgcgacgtgaagctggtggaaaagagcttcgagacagacaccaacctgaacttccagatcctgtacgagatcctgctgggcaaggccaccctgtacgccgtgctggtgtctgccctggtgctgatggctatggtcaagcggaaggacagccgggga

SEQ ID NO: 17983 - DNA, 1341 bp, synthetic construct
  source 1..1341: mol_type = other DNA
atggccttaccagtgaccgccttgctcctgccgctggccttgctgctccacgccgccaggccgctcgaggaggacctgaagaacgtgttcccacctgaggtggccgtgttcgagcctagcgaggccgagatcagccacacccagaaagccaccctcgtgtgcctggctaccggcttctaccccgaccatgtggaactgtcttggtgggtcaacggcaaagaggtgcacagcggcgtgtgtaccgacccccagccactgaaagaacagcccgccctgaacgacagccggtactgcctgagcagcagactgagagtgtccgccaccttctggcagaacccccggaaccacttcagatgccaggtgcagttctacggcctgagcgagaacgacgagtggacccaggacagagccaagcccgtgacccagatcgtgtctgccgaagcctggggcagagccgattgcggctttaccagcgagagctaccagcagggcgtgctgagcgccaccaacctgagcgtgatcggcttcagaatcctgctgctgaaagtggccggctttaacctgctgatgaccctgcggctgtggtccagcagggccaagcgatctggatctggagcaacaaacttctcactactcaaacaagcaggtgacgtggaggagaatcccgggcctactagcgccaccatggccttaccagtgaccgccttgctcctgccgctggccttgctgctccacgccgccaggccgatggaccctgatctcgaaattgaggccgcctttctggaacgcgagaacactgccctggaaaccagggtcgcagagctgagacagagagtgcagagactgcggaacagagtgtctcagtaccgcaccagatatggcccactcggcggaggtaaaacgcgtatccagaaccctgatcctgccgtgtaccagctgcgggatagcaagagcagcgacaagagcgtgtgtctgttcaccgacttcgacagccagaccaacgtgtcccagagcaaggactccgacgtgtacatcaccgataagtgcgtgctggacatgcggagcatggacttcaagagcaactccgccgtggcctggtccaacaagtccgatttcgcctgcgccaacgccttcaacaacagcattatccccgaggacacattcttcccaagccccgagagcagctgcgacgtgaagctggtggaaaagagcttcgagacagacaccaacctgaacttccagatcctgtacgagatcctgctgggcaaggccaccctgtacgccgtgctggtgtctgccctggtgctgatggctatggtcaagcggaaggacagccgggga

SEQ ID NO: 17984 - DNA, 1272 bp, synthetic construct
  source 1..1272: mol_type = other DNA
atggccttaccagtgaccgccttgctcctgccgctggccttgctgctccacgccgccaggccgctcgaggaggacctgaagaacgtgttcccacctgaggtggccgtgttcgagcctagcgaggccgagatcagccacacccagaaagccaccctcgtgtgcctggctaccggcttctaccccgaccatgtggaactgtcttggtgggtcaacggcaaagaggtgcacagcggcgtgtgtaccgacccccagccactgaaagaacagcccgccctgaacgacagccggtactgcctgagcagcagactgagagtgtccgccaccttctggcagaacccccggaaccacttcagatgccaggtgcagttctacggcctgagcgagaacgacgagtggacccaggacagagccaagcccgtgacccagatcgtgtctgccgaagcctggggcagagccgattgcggctttaccagcgagagctaccagcagggcgtgctgagcgccaccaacctgagcgtgatcggcttcagaatcctgctgctgaaagtggccggctttaacctgctgatgaccctgcggctgtggtccagcagggccaagcgatctggatctggagcaacaaacttctcactactcaaacaagcaggtgacgtggaggagaatcccgggcctactagcgccaccatggccttaccagtgaccgccttgctcctgccgctggccttgctgctccacgccgccaggccggaagttgctgccctcgagaaggaggtagcagctttggaaaaagaagtcgcagcccttgagaaagaagttgcggctctggagaagacgcgtatccagaaccctgatcctgccgtgtaccagctgcgggatagcaagagcagcgacaagagcgtgtgtctgttcaccgacttcgacagccagaccaacgtgtcccagagcaaggactccgacgtgtacatcaccgataagtgcgtgctggacatgcggagcatggacttcaagagcaactccgccgtggcctggtccaacaagtccgatttcgcctgcgccaacgccttcaacaacagcattatccccgaggacacattcttcccaagccccgagagcagctgcgacgtgaagctggtggaaaagagcttcgagacagacaccaacctgaacttccagatcctgtacgagatcctgctgggcaaggccaccctgtacgccgtgctggtgtctgccctggtgctgatggctatggtcaagcggaaggacagccgggga

SEQ ID NO: 17985 - DNA, 2046 bp, synthetic construct
  source 1..2046: mol_type = other DNA
atggccttaccagtgaccgccttgctcctgccgctggccttgctgctccacgccgccaggccgctcgaggaggacctgaagaacgtgttcccacctgaggtggccgtgttcgagcctagcgaggccgagatcagccacacccagaaagccaccctcgtgtgcctggctaccggcttctaccccgaccatgtggaactgtcttggtgggtcaacggcaaagaggtgcacagcggcgtgtgtaccgacccccagccactgaaagaacagcccgccctgaacgacagccggtactgcctgagcagcagactgagagtgtccgccaccttctggcagaacccccggaaccacttcagatgccaggtgcagttctacggcctgagcgagaacgacgagtggacccaggacagagccaagcccgtgacccagatcgtgtctgccgaagcctggggcagagccgattgcggctttaccagcgagagctaccagcagggcgtgctgagcgccaccaacctgagcgtgatcggcttcagaatcctgctgctgaaagtggccggctttaacctgctgatgaccctgcggctgtggtccagcagggccaagcgatctggatctggagcaacaaacttctcactactcaaacaagcaggtgacgtggaggagaatcccgggcctactagcgccaccatggccttaccagtgaccgccttgctcctgccgctggccttgctgctccacgccgccaggccgctgttcaatcaagaggtgcagatccctctgaccgagagctactgtggcccctgtcctaagaactggatctgctacaagaacaactgctaccagttcttcgacgagagcaagaattggtacgagagccaggccagctgcatgagccagaatgccagcctgctgaaggtgtacagcaaagaggaccaggacctgctgaaactggtcaagagcgcccactggatgggccttgtgcacatccccaccaatggctcttggcagtgggaggacggcagcattctgagccctaacctgctgaccatcatcgagatgcagaagggcgactgcgccctgtacgccagcagctttaagggctacatcgagaattgcagcaccccgaacacctacatctgtatgcagagaaccgtttctggcggaggcggctctggaggaggcggaagtggcggcggaggcgacctctttaatcaagaagtccagattccactcaccgaatcctactgcggaccttgtccaaaaaattggatttgttataagaacaactgttatcaattctttgatgagtctaaaaattggtatgagtcccaggcttcctgcatgtctcagaacgcttctctgctgaaagtctactctaaagaagatcaggatctcctgaagctcgtcaagtctgcccattggatggggctcgtccacattcctaccaacggaagctggcaatgggaagatggctccatcctgtctccaaatctgctcacgattattgaaatgcagaaaggggattgtgctctctacgccagctccttcaagggatatattgagaactgtagcacgcccaatacttatatctgtatgcaacggaccgtgacgcgtatccagaaccctgatcctgccgtgtaccagctgcgggatagcaagagcagcgacaagagcgtgtgtctgttcaccgacttcgacagccagaccaacgtgtcccagagcaaggactccgacgtgtacatcaccgataagtgcgtgctggacatgcggagcatggacttcaagagcaactccgccgtggcctggtccaacaagtccgatttcgcctgcgccaacgccttcaacaacagcattatccccgaggacacattcttcccaagccccgagagcagctgcgacgtgaagctggtggaaaagagcttcgagacagacaccaacctgaacttccagatcctgtacgagatcctgctgggcaaggccaccctgtacgccgtgctggtgtctgccctggtgctgatggctatggtcaagcggaaggacagccgggga

SEQ ID NO: 17986 - DNA, 2046 bp, synthetic construct
  source 1..2046: mol_type = other DNA
atggccttaccagtgaccgccttgctcctgccgctggccttgctgctccacgccgccaggccgctcgaggaggacctgaagaacgtgttcccacctgaggtggccgtgttcgagcctagcgaggccgagatcagccacacccagaaagccaccctcgtgtgcctggctaccggcttctaccccgaccatgtggaactgtcttggtgggtcaacggcaaagaggtgcacagcggcgtgtgtaccgacccccagccactgaaagaacagcccgccctgaacgacagccggtactgcctgagcagcagactgagagtgtccgccaccttctggcagaacccccggaaccacttcagatgccaggtgcagttctacggcctgagcgagaacgacgagtggacccaggacagagccaagcccgtgacccagatcgtgtctgccgaagcctggggcagagccgattgcggctttaccagcgagagctaccagcagggcgtgctgagcgccaccaacctgagcgtgatcggcttcagaatcctgctgctgaaagtggccggctttaacctgctgatgaccctgcggctgtggtccagcagggccaagcgatctggatctggagcaacaaacttctcactactcaaacaagcaggtgacgtggaggagaatcccgggcctactagcgccaccatggccttaccagtgaccgccttgctcctgccgctggccttgctgctccacgccgccaggccgctgttcaatcaagaggtgcagatccctctgaccgagagctactgtggcccctgtcctaagaactggatctgctacaagaacaactgctaccagttcttcgacgagagcaagaattggtacgagagccaggccagctgcatgagccagaatgccagcctgctgaaggtgtacagcaaagaggaccaggacctgctgaaactggtcaagagcgcccactggatgggccttgtgcacatccccaccaatggctcttggcagtgggaggacggcagcattctgagccctaacctgctgaccatcatcgagatgcagaagggcgactgcgccctgtacgccagcagctttaagggcttcatcgagaattgcagcaccccgaacacctacatctgtatgcagagaaccgttggcggaggcggaagtggaggcggaggatctggcggcggaggctctgacctctttaatcaagaagtccagattccactcaccgaatcctactgcggaccttgtccaaaaaattggatttgttataagaacaactgttatcaattctttgatgagtctaaaaattggtatgagtcccaggcttcctgcatgtctcagaacgcttctctgctgaaagtctactctaaagaagatcaggatctcctgaagctcgtcaagtctgcccattggatggggctcgtccacattcctaccaacggaagctggcaatgggaagatggctccatcctgtctccaaatctgctcacgattattgaaatgcagaaaggggattgtgctctctacgccagctccttcaagggatttattgagaactgtagcacgcccaatacttatatctgtatgcaacggaccgtgacgcgtatccagaaccctgatcctgccgtgtaccagctgcgggatagcaagagcagcgacaagagcgtgtgtctgttcaccgacttcgacagccagaccaacgtgtcccagagcaaggactccgacgtgtacatcaccgataagtgcgtgctggacatgcggagcatggacttcaagagcaactccgccgtggcctggtccaacaagtccgatttcgcctgcgccaacgccttcaacaacagcattatccccgaggacacattcttcccaagccccgagagcagctgcgacgtgaagctggtggaaaagagcttcgagacagacaccaacctgaacttccagatcctgtacgagatcctgctgggcaaggccaccctgtacgccgtgctggtgtctgccctggtgctgatggctatggtcaagcggaaggacagccgggga

SEQ ID NO: 17987 - DNA, 2124 bp, synthetic construct
  source 1..2124: mol_type = other DNA
atggccttaccagtgaccgccttgctcctgccgctggccttgctgctccacgccgccaggccgctcgaggaggacctgaagaacgtgttcccacctgaggtggccgtgttcgagcctagcgaggccgagatcagccacacccagaaagccaccctcgtgtgcctggctaccggcttctaccccgaccatgtggaactgtcttggtgggtcaacggcaaagaggtgcacagcggcgtgtgtaccgacccccagccactgaaagaacagcccgccctgaacgacagccggtactgcctgagcagcagactgagagtgtccgccaccttctggcagaacccccggaaccacttcagatgccaggtgcagttctacggcctgagcgagaacgacgagtggacccaggacagagccaagcccgtgacccagatcgtgtctgccgaagcctggggcagagccgattgcggctttaccagcgagagctaccagcagggcgtgctgagcgccaccaacctgagcgtgatcggcttcagaatcctgctgctgaaagtggccggctttaacctgctgatgaccctgcggctgtggtccagcagggccaagcgatctggatctggagcaacaaacttctcactactcaaacaagcaggtgacgtggaggagaatcccgggcctactagcatggccttaccagtgaccgccttgctcctgccgctggccttgctgctccacgccgccaggccgatggaccccgacctggaaatcagagccgccttcctgcggcagagaaacacagccctgagaacagaggtggccgagctggaacaagaggtgcagcggctggaaaacgaggtgtcccagtacgagacaagatacggccctctcggaggcggaaaaggtaccggcggaggcggatctggcggcggaggtagcggtggcggaggatctgaattcgacatccagatgacacagagccctagcagcctgtctgccagcgtgggagacagagtgaccatcacatgcaaggccagcgaccacatcaacaactggctggcctggtatcagcagaagcctggacaggcccctaagctgctgatctacggcgctaccacactggaaacaggcgtgcccagcagattttctggcagcggctctggcaccgactacaccctgacaatatccagcctccagcctgaggacttcgccacctactactgtcagcagagctggaacaccccttggacattcggccagggcaccaagctggaaatcaagagaggcggaggcggaagtggaggcggaggatctggcggcggaggctctcaagttcagcttcaacagcctggcgctgagctggtcaaacctggcgcttctgtgaagatgagctgcaaagccagcggctacgccttcagcagctactggatcaactggatgaagcagaaacccggccagggactcgaatggatcggccaaatctatcccggcgacggcgacaccaactacaacggcaagttcaagggcagagccacactgaccgccgatacctctagcagcacagcctacatgcagctgagcagcctgaccagcgaagatagcgccgtgtacttctgtgcccggtccatcacaacagtcgtgggctgcgctatggactattggggccagggaacaagcgtgaccgtgtctagtacgcgtatccagaaccctgatcctgccgtgtaccagctgcgggatagcaagagcagcgacaagagcgtgtgtctgttcaccgacttcgacagccagaccaacgtgtcccagagcaaggactccgacgtgtacatcaccgataagtgcgtgctggacatgcggagcatggacttcaagagcaactccgccgtggcctggtccaacaagtccgatttcgcctgcgccaacgccttcaacaacagcattatccccgaggacacattcttcccaagccccgagagcagctgcgacgtgaagctggtggaaaagagcttcgagacagacaccaacctgaacttccagatcctgtacgagatcctgctgggcaaggccaccctgtacgccgtgctggtgtctgccctggtgctgatggctatggtcaagcggaaggacagccgggga

SEQ ID NO: 17988 - DNA, 2829 bp, synthetic construct
  source 1..2829: mol_type = other DNA
atggccttaccagtgaccgccttgctcctgccgctggccttgctgctccacgccgccaggccgctcgaggaggacctgaagaacgtgttcccacctgaggtggccgtgttcgagcctagcgaggccgagatcagccacacccagaaagccaccctcgtgtgcctggctaccggcttctaccccgaccatgtggaactgtcttggtgggtcaacggcaaagaggtgcacagcggcgtgtgtaccgacccccagccactgaaagaacagcccgccctgaacgacagccggtactgcctgagcagcagactgagagtgtccgccaccttctggcagaacccccggaaccacttcagatgccaggtgcagttctacggcctgagcgagaacgacgagtggacccaggacagagccaagcccgtgacccagatcgtgtctgccgaagcctggggcagagccgattgcggctttaccagcgagagctaccagcagggcgtgctgagcgccaccaacctgagcgtgatcggcttcagaatcctgctgctgaaagtggccggctttaacctgctgatgaccctgcggctgtggtccagcagggccaagcgatctggatctggagcaacaaacttctcactactcaaacaagcaggtgacgtggaggagaatcccgggcctactagcatggccttaccagtgaccgccttgctcctgccgctggccttgctgctccacgccgccaggccgctgttcaatcaagaggtgcagatccctctgaccgagagctactgtggcccctgtcctaagaactggatctgctacaagaacaactgctaccagttcttcgacgagagcaagaattggtacgagagccaggccagctgcatgagccagaatgccagcctgctgaaggtgtacagcaaagaggaccaggacctgctgaaactggtcaagagcgcccactggatgggccttgtgcacatccccaccaatggctcttggcagtgggaggacggcagcattctgagccctaacctgctgaccatcatcgagatgcagaagggcgactgcgccctgtacgccagcagctttaagggcttcatcgagaattgcagcaccccgaacacctacatctgtatgcagagaaccgttggcggaggcggaagtggaggcggaggatctggcggcggaggctctgacctctttaatcaagaagtccagattccactcaccgaatcctactgcggaccttgtccaaaaaattggatttgttataagaacaactgttatcaattctttgatgagtctaaaaattggtatgagtcccaggcttcctgcatgtctcagaacgcttctctgctgaaagtctactctaaagaagatcaggatctcctgaagctcgtcaagtctgcccattggatggggctcgtccacattcctaccaacggaagctggcaatgggaagatggctccatcctgtctccaaatctgctcacgattattgaaatgcagaaaggggattgtgctctctacgccagctccttcaagggatttattgagaactgtagcacgcccaatacttatatctgtatgcaacggaccgtgggtaccggcggaggcggatctggcggcggaggtagcggtggcggaggatctgaattcgacatccagatgacacagagccctagcagcctgtctgccagcgtgggagacagagtgaccatcacatgcaaggccagcgaccacatcaacaactggctggcctggtatcagcagaagcctggacaggcccctaagctgctgatctacggcgctaccacactggaaacaggcgtgcccagcagattttctggcagcggctctggcaccgactacaccctgacaatatccagcctccagcctgaggacttcgccacctactactgtcagcagagctggaacaccccttggacattcggccagggcaccaagctggaaatcaagagaggcggaggcggaagtggaggcggaggatctggcggcggaggctctcaagttcagcttcaacagcctggcgctgagctggtcaaacctggcgcttctgtgaagatgagctgcaaagccagcggctacgccttcagcagctactggatcaactggatgaagcagaaacccggccagggactcgaatggatcggccaaatctatcccggcgacggcgacaccaactacaacggcaagttcaagggcagagccacactgaccgccgatacctctagcagcacagcctacatgcagctgagcagcctgaccagcgaagatagcgccgtgtacttctgtgcccggtccatcacaacagtcgtgggctgcgctatggactattggggccagggaacaagcgtgaccgtgtctagtacgcgtatccagaaccctgatcctgccgtgtaccagctgcgggatagcaagagcagcgacaagagcgtgtgtctgttcaccgacttcgacagccagaccaacgtgtcccagagcaaggactccgacgtgtacatcaccgataagtgcgtgctggacatgcggagcatggacttcaagagcaactccgccgtggcctggtccaacaagtccgatttcgcctgcgccaacgccttcaacaacagcattatccccgaggacacattcttcccaagccccgagagcagctgcgacgtgaagctggtggaaaagagcttcgagacagacaccaacctgaacttccagatcctgtacgagatcctgctgggcaaggccaccctgtacgccgtgctggtgtctgccctggtgctgatggctatggtcaagcggaaggacagccgggga

SEQ ID NO: 17989 - DNA, 1944 bp, synthetic construct
  source 1..1944: mol_type = other DNA
atggccttaccagtgaccgccttgctcctgccgctggccttgctgctccacgccgccaggccgctcgaggaggacctgaagaacgtgttcccacctgaggtggccgtgttcgagcctagcgaggccgagatcagccacacccagaaagccaccctcgtgtgcctggctaccggcttctaccccgaccatgtggaactgtcttggtgggtcaacggcaaagaggtgcacagcggcgtgtgtaccgacccccagccactgaaagaacagcccgccctgaacgacagccggtactgcctgagcagcagactgagagtgtccgccaccttctggcagaacccccggaaccacttcagatgccaggtgcagttctacggcctgagcgagaacgacgagtggacccaggacagagccaagcccgtgacccagatcgtgtctgccgaagcctggggcagagccgattgcggctttaccagcgagagctaccagcagggcgtgctgagcgccaccaacctgagcgtgatcggcttcagaatcctgctgctgaaagtggccggctttaacctgctgatgaccctgcggctgtggtccagcagggccaagcgatctggatctggagcaacaaacttctcactactcaaacaagcaggtgacgtggaggagaatcccgggcctactagcatggccttaccagtgaccgccttgctcctgccgctggccttgctgctccacgccgccaggccgcagtctgtgctgacacagcctcctagtgtgtctggcgctcctggacagagagtgaccatctcttgtaccggcagcagcagcaatatcggagccggctatgacgtgcactggtatcagcagctccctggcacagcccctaaactgctgatcttcggcaacagcaacagacccagcggcgtgcccgatagattcagcggctttaagagcggcacaagcgccagcctggctatcactggactgcaagccgaggacgaggccgactacttctgccagagctacgatagcagcctgagcggcagcggagtgtttggcacaggcaccaaagtgacagtgcttggcggcggaggcggaagtggaggcggaggatctggcggcggaggctctcaaatgcaactggttcaaagcggcggtggcctggtgcaacctggaagaagtctgagactgagctgtgccgccagcggcttcaccttcgatgattacgccatgcactgggtccgacaggcccctggaaaaggactggaatgggtgtccggcatctcctggaatagcggctctatcggctacgccgacagcgtgaagggcagattcaccatcagccgggacaacgccaagaacagcctgtacctccagatgaactccctgagagccgaggatacagccctgtactactgcgccaaggacatccacagcggcagctactacggcctgctgtactacgctatggacgtgtggggccagggcacaaccgtgacagtttcttctacgcgtatccagaaccctgatcctgccgtgtaccagctgcgggatagcaagagcagcgacaagagcgtgtgtctgttcaccgacttcgacagccagaccaacgtgtcccagagcaaggactccgacgtgtacatcaccgataagtgcgtgctggacatgcggagcatggacttcaagagcaactccgccgtggcctggtccaacaagtccgatttcgcctgcgccaacgccttcaacaacagcattatccccgaggacacattcttcccaagccccgagagcagctgcgacgtgaagctggtggaaaagagcttcgagacagacaccaacctgaacttccagatcctgtacgagatcctgctgggcaaggccaccctgtacgccgtgctggtgtctgccctggtgctgatggctatggtcaagcggaaggacagccgggga

SEQ ID NO: 17990 - DNA, 1455 bp, synthetic construct
  source 1..1455: mol_type = other DNA
atggccttaccagtgaccgccttgctcctgccgctggccttgctgctccacgccgccaggccgctcgaggaggacctgaagaacgtgttcccacctgaggtggccgtgttcgagcctagcgaggccgagatcagccacacccagaaagccaccctcgtgtgcctggctaccggcttctaccccgaccatgtggaactgtcttggtgggtcaacggcaaagaggtgcacagcggcgtgtgtaccgacccccagccactgaaagaacagcccgccctgaacgacagccggtactgcctgagcagcagactgagagtgtccgccaccttctggcagaacccccggaaccacttcagatgccaggtgcagttctacggcctgagcgagaacgacgagtggacccaggacagagccaagcccgtgacccagatcgtgtctgccgaagcctggggcagagccgattgcggctttaccagcgagagctaccagcagggcgtgctgagcgccaccaacctgagcgtgatcggcttcagaatcctgctgctgaaagtggccggctttaacctgctgatgaccctgcggctgtggtccagcagggccaagcgatctggatctggagcaacaaacttctcactactcaaacaagcaggtgacgtggaggagaatcccgggcctactagcatggccttaccagtgaccgccttgctcctgccgctggccttgctgctccacgccgccaggccgatgtgtatgccctgcttcaccaccgaccatcagatggcccggaagtgcgacgattgctgtggcggaaaaggcagaggcaagtgctacggccctcagtgcttgtgtagactcgagggcggaggcggaagtggaggcggaggatctggcggcggaggctctttcgaagtgtgtatgccttgttttaccacggatcaacaaatggctcgcaagtgttctgactgctgcggaggcaaaggccggggaaagtgttatggcccacagtgtctgtgccggacgcgtatccagaaccctgatcctgccgtgtaccagctgcgggatagcaagagcagcgacaagagcgtgtgtctgttcaccgacttcgacagccagaccaacgtgtcccagagcaaggactccgacgtgtacatcaccgataagtgcgtgctggacatgcggagcatggacttcaagagcaactccgccgtggcctggtccaacaagtccgatttcgcctgcgccaacgccttcaacaacagcattatccccgaggacacattcttcccaagccccgagagcagctgcgacgtgaagctggtggaaaagagcttcgagacagacaccaacctgaacttccagatcctgtacgagatcctgctgggcaaggccaccctgtacgccgtgctggtgtctgccctggtgctgatggctatggtcaagcggaaggacagccgggga

SEQ ID NO: 17991 - DNA, 2244 bp, synthetic construct
  source 1..2244: mol_type = other DNA
atggccttaccagtgaccgccttgctcctgccgctggccttgctgctccacgccgccaggccgctcgaggaggacctgaagaacgtgttcccacctgaggtggccgtgttcgagcctagcgaggccgagatcagccacacccagaaagccaccctcgtgtgcctggctaccggcttctaccccgaccatgtggaactgtcttggtgggtcaacggcaaagaggtgcacagcggcgtgtgtaccgacccccagccactgaaagaacagcccgccctgaacgacagccggtactgcctgagcagcagactgagagtgtccgccaccttctggcagaacccccggaaccacttcagatgccaggtgcagttctacggcctgagcgagaacgacgagtggacccaggacagagccaagcccgtgacccagatcgtgtctgccgaagcctggggcagagccgattgcggctttaccagcgagagctaccagcagggcgtgctgagcgccaccaacctgagcgtgatcggcttcagaatcctgctgctgaaagtggccggctttaacctgctgatgaccctgcggctgtggtccagcagggccaagcgatctggatctggagcaacaaacttctcactactcaaacaagcaggtgacgtggaggagaatcccgggcctactagcatggccttaccagtgaccgccttgctcctgccgctggccttgctgctccacgccgccaggccgatgtgtatgccctgcttcaccaccgaccatcagatggcccggaagtgcgacgattgctgtggcggaaaaggcagaggcaagtgctacggccctcagtgcttgtgtagactcgagggcggaggcggaagtggaggcggaggatctggcggcggaggctctttcgaagtgtgtatgccttgttttaccacggatcaacaaatggctcgcaagtgttctgactgctgcggaggcaaaggccggggaaagtgttatggcccacagtgtctgtgccggggtaccggcggaggcggatctggcggcggaggtagcggtggcggaggatctgaattcgacatccagatgacacagagccctagcagcctgtctgccagcgtgggagacagagtgaccatcacatgcaaggccagcgaccacatcaacaactggctggcctggtatcagcagaagcctggacaggcccctaagctgctgatctacggcgctaccacactggaaacaggcgtgcccagcagattttctggcagcggctctggcaccgactacaccctgacaatatccagcctccagcctgaggacttcgccacctactactgtcagcagagctggaacaccccttggacattcggccagggcaccaagctggaaatcaagagaggcggaggcggaagtggaggcggaggatctggcggcggaggctctcaagttcagcttcaacagcctggcgctgagctggtcaaacctggcgcttctgtgaagatgagctgcaaagccagcggctacgccttcagcagctactggatcaactggatgaagcagaaacccggccagggactcgaatggatcggccaaatctatcccggcgacggcgacaccaactacaacggcaagttcaagggcagagccacactgaccgccgatacctctagcagcacagcctacatgcagctgagcagcctgaccagcgaagatagcgccgtgtacttctgtgcccggtccatcacaacagtcgtgggctgcgctatggactattggggccagggaacaagcgtgaccgtgtctagtacgcgtatccagaaccctgatcctgccgtgtaccagctgcgggatagcaagagcagcgacaagagcgtgtgtctgttcaccgacttcgacagccagaccaacgtgtcccagagcaaggactccgacgtgtacatcaccgataagtgcgtgctggacatgcggagcatggacttcaagagcaactccgccgtggcctggtccaacaagtccgatttcgcctgcgccaacgccttcaacaacagcattatccccgaggacacattcttcccaagccccgagagcagctgcgacgtgaagctggtggaaaagagcttcgagacagacaccaacctgaacttccagatcctgtacgagatcctgctgggcaaggccaccctgtacgccgtgctggtgtctgccctggtgctgatggctatggtcaagcggaaggacagccgggga

SEQ ID NO: 17992 - DNA, 2469 bp, synthetic construct
  source 1..2469: mol_type = other DNA
atggccttaccagtgaccgccttgctcctgccgctggccttgctgctccacgccgccaggccgctcgaggaggacctgaagaacgtgttcccacctgaggtggccgtgttcgagcctagcgaggccgagatcagccacacccagaaagccaccctcgtgtgcctggctaccggcttctaccccgaccatgtggaactgtcttggtgggtcaacggcaaagaggtgcacagcggcgtgtgtaccgacccccagccactgaaagaacagcccgccctgaacgacagccggtactgcctgagcagcagactgagagtgtccgccaccttctggcagaacccccggaaccacttcagatgccaggtgcagttctacggcctgagcgagaacgacgagtggacccaggacagagccaagcccgtgacccagatcgtgtctgccgaagcctggggcagagccgattgcggctttaccagcgagagctaccagcagggcgtgctgagcgccaccaacctgagcgtgatcggcttcagaatcctgctgctgaaagtggccggctttaacctgctgatgaccctgcggctgtggtccagcagggccaagcgatctggatctggagcaacaaacttctcactactcaaacaagcaggtgacgtggaggagaatcccgggcctactagcatggccttaccagtgaccgccttgctcctgccgctggccttgctgctccacgccgccaggccgagccccgtagctcctgcctgtgaccccagactcctaaataaactgctgcgtgactcccacctccttcacagccgactgagtcagtgtcccgacgtggaccctttgtctatccctgttctgctgcctgctgtggactttagcctgggagaatggaaaacccagacggaacagagcaaggcacaggacattctaggggcagtgtcccttctactggagggagtgatggcagcacgaggacagttggaaccctcctgcctctcatccctcctgggacagctttctgggcaggttcgcctcctcttgggggccctgcagggcctcctaggaacccagcttcctctacagggcaggaccacagctcacaaggaccccaatgccctcttcttgagcttgcaacaactgcttcggggaaaggtgcgcttcctgcttctggtagaaggtcccaccctctgtgtcagacggaccctgccaaccacagctgtcccaagcagtacttctggtaccggcggaggcggatctggcggcggaggtagcggtggcggaggatctgaattcgacatccagatgacacagagccctagcagcctgtctgccagcgtgggagacagagtgaccatcacatgcaaggccagcgaccacatcaacaactggctggcctggtatcagcagaagcctggacaggcccctaagctgctgatctacggcgctaccacactggaaacaggcgtgcccagcagattttctggcagcggctctggcaccgactacaccctgacaatatccagcctccagcctgaggacttcgccacctactactgtcagcagagctggaacaccccttggacattcggccagggcaccaagctggaaatcaagagaggcggaggcggaagtggaggcggaggatctggcggcggaggctctcaagttcagcttcaacagcctggcgctgagctggtcaaacctggcgcttctgtgaagatgagctgcaaagccagcggctacgccttcagcagctactggatcaactggatgaagcagaaacccggccagggactcgaatggatcggccaaatctatcccggcgacggcgacaccaactacaacggcaagttcaagggcagagccacactgaccgccgatacctctagcagcacagcctacatgcagctgagcagcctgaccagcgaagatagcgccgtgtacttctgtgcccggtccatcacaacagtcgtgggctgcgctatggactattggggccagggaacaagcgtgaccgtgtctagtacgcgtatccagaaccctgatcctgccgtgtaccagctgcgggatagcaagagcagcgacaagagcgtgtgtctgttcaccgacttcgacagccagaccaacgtgtcccagagcaaggactccgacgtgtacatcaccgataagtgcgtgctggacatgcggagcatggacttcaagagcaactccgccgtggcctggtccaacaagtccgatttcgcctgcgccaacgccttcaacaacagcattatccccgaggacacattcttcccaagccccgagagcagctgcgacgtgaagctggtggaaaagagcttcgagacagacaccaacctgaacttccagatcctgtacgagatcctgctgggcaaggccaccctgtacgccgtgctggtgtctgccctggtgctgatggctatggtcaagcggaaggacagccgggga

SEQ ID NO: 17993 - DNA, 2190 bp, synthetic construct
  source 1..2190: mol_type = other DNA
atggccttaccagtgaccgccttgctcctgccgctggccttgctgctccacgccgccaggccgctcgaggaggacctgaagaacgtgttcccacctgaggtggccgtgttcgagcctagcgaggccgagatcagccacacccagaaagccaccctcgtgtgcctggctaccggcttctaccccgaccatgtggaactgtcttggtgggtcaacggcaaagaggtgcacagcggcgtgtgtaccgacccccagccactgaaagaacagcccgccctgaacgacagccggtactgcctgagcagcagactgagagtgtccgccaccttctggcagaacccccggaaccacttcagatgccaggtgcagttctacggcctgagcgagaacgacgagtggacccaggacagagccaagcccgtgacccagatcgtgtctgccgaagcctggggcagagccgattgcggctttaccagcgagagctaccagcagggcgtgctgagcgccaccaacctgagcgtgatcggcttcagaatcctgctgctgaaagtggccggctttaacctgctgatgaccctgcggctgtggtccagcagggccaagcgatctggatctggagcaacaaacttctcactactcaaacaagcaggtgacgtggaggagaatcccgggcctactagcatggccttaccagtgaccgccttgctcctgccgctggccttgctgctccacgccgccaggccgatgggcagctgggaagagttcgagctgagactgaacgccatcgaggaacggctgtatgccctcggaggatctgaagccgagctggcctacttcgagtacgtgatcgccgacttcgagggcaacctgcagcggtacaaaggcaagggcaaccctgaagtggaagccctgtacttcgaggccgacgccatcttcgaggaactggtggcctacagacacaacggtaccggcggaggcggatctggcggcggaggtagcggtggcggaggatctgaattcgacatccagatgacacagagccctagcagcctgtctgccagcgtgggagacagagtgaccatcacatgcaaggccagcgaccacatcaacaactggctggcctggtatcagcagaagcctggacaggcccctaagctgctgatctacggcgctaccacactggaaacaggcgtgcccagcagattttctggcagcggctctggcaccgactacaccctgacaatatccagcctccagcctgaggacttcgccacctactactgtcagcagagctggaacaccccttggacattcggccagggcaccaagctggaaatcaagagaggcggaggcggaagtggaggcggaggatctggcggcggaggctctcaagttcagcttcaacagcctggcgctgagctggtcaaacctggcgcttctgtgaagatgagctgcaaagccagcggctacgccttcagcagctactggatcaactggatgaagcagaaacccggccagggactcgaatggatcggccaaatctatcccggcgacggcgacaccaactacaacggcaagttcaagggcagagccacactgaccgccgatacctctagcagcacagcctacatgcagctgagcagcctgaccagcgaagatagcgccgtgtacttctgtgcccggtccatcacaacagtcgtgggctgcgctatggactattggggccagggaacaagcgtgaccgtgtctagtacgcgtatccagaaccctgatcctgccgtgtaccagctgcgggatagcaagagcagcgacaagagcgtgtgtctgttcaccgacttcgacagccagaccaacgtgtcccagagcaaggactccgacgtgtacatcaccgataagtgcgtgctggacatgcggagcatggacttcaagagcaactccgccgtggcctggtccaacaagtccgatttcgcctgcgccaacgccttcaacaacagcattatccccgaggacacattcttcccaagccccgagagcagctgcgacgtgaagctggtggaaaagagcttcgagacagacaccaacctgaacttccagatcctgtacgagatcctgctgggcaaggccaccctgtacgccgtgctggtgtctgccctggtgctgatggctatggtcaagcggaaggacagccgggga

SEQ ID NO: 17994 - DNA, 2610 bp, synthetic construct
  source 1..2610: mol_type = other DNA
atggccttaccagtgaccgccttgctcctgccgctggccttgctgctccacgccgccaggccgctcgagatccagaaccctgatcctgccgtgtaccagctgcgggatagcaagagcagcgacaagagcgtgtgtctgttcaccgacttcgacagccagaccaacgtgtcccagagcaaggactccgacgtgtacatcaccgataagtgcgtgctggacatgcggagcatggacttcaagagcaactccgccgtggcctggtccaacaagtccgatttcgcctgcgccaacgccttcaacaacagcattatccccgaggacacattcttcccaagccccgagagcagctgcgacgtgaagctggtggaaaagagcttcgagacagacaccaacctgaacttccagatcctgtacgagatcctgctgggcaaggccaccctgtacgccgtgctggtgtctgccctggtgctgatggctatggtcaagcggaaggacagccggggaagggccaagcgatctggatctggagcaacaaacttctcactactcaaacaagcaggtgacgtggaggagaatcccgggcctactagcatggccttaccagtgaccgccttgctcctgccgctggccttgctgctccacgccgccaggccggacatccagatgacacagactacatcctccctgtctgcctctctgggagacagagtcaccatcagttgcagggcaagtcaggacattagtaaatatttaaattggtatcagcagaaaccagatggaactgttaaactcctgatctaccatacatcaagattacactcaggagtcccatcaaggttcagtggcagtgggtctggaacagattattctctcaccattagcaacctggagcaagaagatattgccacttacttttgccaacagggtaatacgcttccgtacacgttcggaggggggaccaagctggagatcacaggtggcggtggctcgggcggtggtgggtcgggtggcggcggatctgaggtgaaactgcaggagtcaggacctggcctggtggcgccctcacagagcctgtccgtcacatgcactgtctcaggggtctcattacccgactatggtgtaagctggattcgccagcctccacgaaagggtctggagtggctgggagtaatatggggtagtgaaaccacatactataattcagctctcaaatccagactgaccatcatcaaggacaactccaagagccaagttttcttaaaaatgaacagtctgcaaactgatgacacagccatttactactgtgccaaacattattactacggtggtagctatgctatggactactggggtcaaggaacctcagtcaccgtctcctcaacgcgtgaggacctgaagaacgtgttcccacctgaggtggccgtgttcgagcctagcgaggccgagatcagccacacccagaaagccaccctcgtgtgcctggctaccggcttctaccccgaccatgtggaactgtcttggtgggtcaacggcaaagaggtgcacagcggcgtgtgtaccgacccccagccactgaaagaacagcccgccctgaacgacagccggtactgcctgagcagcagactgagagtgtccgccaccttctggcagaacccccggaaccacttcagatgccaggtgcagttctacggcctgagcgagaacgacgagtggacccaggacagagccaagcccgtgacccagatcgtgtctgccgaagcctggggcagagccgattgcggctttaccagcgagagctaccagcagggcgtgctgagcgccaccaacctgagcgtgatcggcttcagaatcctgctgctgaaagtggccggctttaacctgctgatgaccctgcggctgtggtccagccgcgccaagagaagcggatctggcgtgaagcagaccctgaatttcgacctgctgaagctggctggcgacgtggaatccaacccaggcccttctagaggccatatgaccgagtacaagcccacggtgcgcctcgccacccgcgacgacgtccccagggccgtacgcaccctcgccgccgcgttcgccgactaccccgccacgcgccacaccgtcgatccggaccgccacatcgagcgggtcaccgagctgcaagaactcttcctcacgcgcgtcgggctcgacatcggcaaggtgtgggtcgcggacgacggcgccgcggtggcggtctggaccacgccggagagcgtcgaagcgggggcggtgttcgccgagatcggcccgcgcatggccgagttgagcggttcccggctggccgcgcagcaacagatggaaggcctcctggcgccgcaccggcccaaggagcccgcgtggttcctggccaccgtcggcgtctcgcccgaccaccagggcaagggtctgggcagcgccgtcgtgctccccggagtggaggcggccgagcgcgccggggtgcccgccttcctggagacctccgcgccccgcaacctccccttctacgagcggctcggcttcaccgtcaccgccgacgtcgaggtgcccgaaggaccgcgcacctggtgcatgacccgcaagcccggtgcctga

SEQ ID NO: 17995 - DNA, 2613 bp, synthetic construct
  source 1..2613: mol_type = other DNA
atggccttaccagtgaccgccttgctcctgccgctggccttgctgctccacgccgccaggccgctcgagatccagaaccctgatcctgccgtgtaccagctgcgggatagcaagagcagcgacaagagcgtgtgtctgttcaccgacttcgacagccagaccaacgtgtcccagagcaaggactccgacgtgtacatcaccgataagtgcgtgctggacatgcggagcatggacttcaagagcaactccgccgtggcctggtccaacaagtccgatttcgcctgcgccaacgccttcaacaacagcattatccccgaggacacattcttcccaagccccgagagcagctgcgacgtgaagctggtggaaaagagcttcgagacagacaccaacctgaacttccagatcctgtacgagatcctgctgggcaaggccaccctgtacgccgtgctggtgtctgccctggtgctgatggctatggtcaagcggaaggacagccggggaagggccaagcgatctggatctggagcaacaaacttctcactactcaaacaagcaggtgacgtggaggagaatcccgggcctactagcaccatggccttaccagtgaccgccttgctcctgccgctggccttgctgctccacgccgccaggccggagatcgtgatgacccagagccctgccaccctgtctctgagccctggcgaaagagccaccctgagctgtagagccagccaggacatcagcaagtacctgaactggtatcagcagaagcccggccaggcccccagactgctgatctaccacaccagcagactgcacagcggcatccccgccagattttctggctctggcagcggcaccgactacaccctgacaatcagcagcctccagcccgaggacttcgccgtgtacttctgtcagcaaggcaacaccctgccctacaccttcggccagggcaccaagctggaaatcaagggcggaggcggaagtggaggcggaggatctggcggcggaggctctcaggtgcaactccaggaatctggccctggcctcgtgaagcccagcgagacactgagcctgacctgtaccgtgtccggcgtgtccctgcctgactatggcgtgtcctggatcagacagccccctggcaagggcctggaatggatcggagtgatttggggcagcgaaaccacctactacaacagctccctgaagtccagagtgaccatctccaaggacaactccaagaaccaggtgtccctgaagctgagcagcgtgacagccgccgacaccgccgtgtattactgcgccaagcactactactacggcggcagctacgctatggactactggggccagggaaccctcgtgaccgtgtctagtacgcgtgaggacctgaagaacgtgttcccacctgaggtggccgtgttcgagcctagcgaggccgagatcagccacacccagaaagccaccctcgtgtgcctggctaccggcttctaccccgaccatgtggaactgtcttggtgggtcaacggcaaagaggtgcacagcggcgtgtgtaccgacccccagccactgaaagaacagcccgccctgaacgacagccggtactgcctgagcagcagactgagagtgtccgccaccttctggcagaacccccggaaccacttcagatgccaggtgcagttctacggcctgagcgagaacgacgagtggacccaggacagagccaagcccgtgacccagatcgtgtctgccgaagcctggggcagagccgattgcggctttaccagcgagagctaccagcagggcgtgctgagcgccaccaacctgagcgtgatcggcttcagaatcctgctgctgaaagtggccggctttaacctgctgatgaccctgcggctgtggtccagccgcgccaagagaagcggatctggcgtgaagcagaccctgaatttcgacctgctgaagctggctggcgacgtggaatccaacccaggcccttctagaggccatatgaccgagtacaagcccacggtgcgcctcgccacccgcgacgacgtccccagggccgtacgcaccctcgccgccgcgttcgccgactaccccgccacgcgccacaccgtcgatccggaccgccacatcgagcgggtcaccgagctgcaagaactcttcctcacgcgcgtcgggctcgacatcggcaaggtgtgggtcgcggacgacggcgccgcggtggcggtctggaccacgccggagagcgtcgaagcgggggcggtgttcgccgagatcggcccgcgcatggccgagttgagcggttcccggctggccgcgcagcaacagatggaaggcctcctggcgccgcaccggcccaaggagcccgcgtggttcctggccaccgtcggcgtctcgcccgaccaccagggcaagggtctgggcagcgccgtcgtgctccccggagtggaggcggccgagcgcgccggggtgcccgccttcctggagacctccgcgccccgcaacctccccttctacgagcggctcggcttcaccgtcaccgccgacgtcgaggtgcccgaaggaccgcgcacctggtgcatgacccgcaagcccggtgcctga

SEQ ID NO: 17996 - DNA, 2616 bp, synthetic construct
  source 1..2616: mol_type = other DNA
atggccttaccagtgaccgccttgctcctgccgctggccttgctgctccacgccgccaggccgctcgagatccagaaccctgatcctgccgtgtaccagctgcgggatagcaagagcagcgacaagagcgtgtgtctgttcaccgacttcgacagccagaccaacgtgtcccagagcaaggactccgacgtgtacatcaccgataagtgcgtgctggacatgcggagcatggacttcaagagcaactccgccgtggcctggtccaacaagtccgatttcgcctgcgccaacgccttcaacaacagcattatccccgaggacacattcttcccaagccccgagagcagctgcgacgtgaagctggtggaaaagagcttcgagacagacaccaacctgaacttccagatcctgtacgagatcctgctgggcaaggccaccctgtacgccgtgctggtgtctgccctggtgctgatggctatggtcaagcggaaggacagccggggaagggccaagcgatctggatctggagcaacaaacttctcactactcaaacaagcaggtgacgtggaggagaatcccgggcctactagcaccatggccttaccagtgaccgccttgctcctgccgctggccttgctgctccacgccgccaggccggacgagatcgtgctgacacagagccccgccaccctgtcactgtctccaggcgaaagagccaccctgagctgtagcgccagcagcagcgtgtcctacatgcactggtatcagcagaagcccggccaggcccccagactgctgatctacgataccagcaagctggcctccggcatccccgccagattttctggcagcggctccggcaccgacttcaccctgacaatcagcagcctggaacccgaggacgtggccgtgtactactgttttcaaggcagcgtgtaccccttcaccttcggccagggcaccaagctggaaatcaagagaggtggcggtggctcgggcggtggtgggtcgggtggcggcggatctcaggtgcagctccaggaatctggccctggcctcgtgaagcctagccagaccctgagcctgacctgtaccgtgtctggcggcagcatcagcacaagcggcatgggcgtgggctggatcagacagcaccctggcaagggcctggaatggatcggccacatttggtgggacgacgacaagcggtacaaccccgccctgaagtccagagtgaccatcagcgtggacaccagcaagaaccagttcagcctgaagctgagcagcgtgacagccgccgataccgccgtgtattattgcgcccggatggaactgtggtcctactacttcgactactggggccagggaaccctcgtgaccgtgtctagtacgcgtgaggacctgaagaacgtgttcccacctgaggtggccgtgttcgagcctagcgaggccgagatcagccacacccagaaagccaccctcgtgtgcctggctaccggcttctaccccgaccatgtggaactgtcttggtgggtcaacggcaaagaggtgcacagcggcgtgtgtaccgacccccagccactgaaagaacagcccgccctgaacgacagccggtactgcctgagcagcagactgagagtgtccgccaccttctggcagaacccccggaaccacttcagatgccaggtgcagttctacggcctgagcgagaacgacgagtggacccaggacagagccaagcccgtgacccagatcgtgtctgccgaagcctggggcagagccgattgcggctttaccagcgagagctaccagcagggcgtgctgagcgccaccaacctgagcgtgatcggcttcagaatcctgctgctgaaagtggccggctttaacctgctgatgaccctgcggctgtggtccagccgcgccaagagaagcggatctggcgtgaagcagaccctgaatttcgacctgctgaagctggctggcgacgtggaatccaacccaggcccttctagaggccatatgaccgagtacaagcccacggtgcgcctcgccacccgcgacgacgtccccagggccgtacgcaccctcgccgccgcgttcgccgactaccccgccacgcgccacaccgtcgatccggaccgccacatcgagcgggtcaccgagctgcaagaactcttcctcacgcgcgtcgggctcgacatcggcaaggtgtgggtcgcggacgacggcgccgcggtggcggtctggaccacgccggagagcgtcgaagcgggggcggtgttcgccgagatcggcccgcgcatggccgagttgagcggttcccggctggccgcgcagcaacagatggaaggcctcctggcgccgcaccggcccaaggagcccgcgtggttcctggccaccgtcggcgtctcgcccgaccaccagggcaagggtctgggcagcgccgtcgtgctccccggagtggaggcggccgagcgcgccggggtgcccgccttcctggagacctccgcgccccgcaacctccccttctacgagcggctcggcttcaccgtcaccgccgacgtcgaggtgcccgaaggaccgcgcacctggtgcatgacccgcaagcccggtgcctga

SEQ ID NO: 17997 - DNA, 2604 bp, synthetic construct
  source 1..2604: mol_type = other DNA
atggccttaccagtgaccgccttgctcctgccgctggccttgctgctccacgccgccaggccgctcgagatccagaaccctgatcctgccgtgtaccagctgcgggatagcaagagcagcgacaagagcgtgtgtctgttcaccgacttcgacagccagaccaacgtgtcccagagcaaggactccgacgtgtacatcaccgataagtgcgtgctggacatgcggagcatggacttcaagagcaactccgccgtggcctggtccaacaagtccgatttcgcctgcgccaacgccttcaacaacagcattatccccgaggacacattcttcccaagccccgagagcagctgcgacgtgaagctggtggaaaagagcttcgagacagacaccaacctgaacttccagatcctgtacgagatcctgctgggcaaggccaccctgtacgccgtgctggtgtctgccctggtgctgatggctatggtcaagcggaaggacagccggggaagggccaagcgatctggatctggagcaacaaacttctcactactcaaacaagcaggtgacgtggaggagaatcccgggcctactagcatggccttaccagtgaccgccttgctcctgccgctggccttgctgctccacgccgccaggccggacatccagatgacacagagccctagcagcctgtctgccagcgtgggagacagagtgaccatcacctgtagagccagccaggacatcagcaactacctgaactggtatcagcagaagcccggcaaggcccctaagctgctgatctactacaccagcagactgcacagcggcgtgcccagcagattttctggctctggcagcggcaccgacttcaccctgacaatatctagcctccagcctgaggacttcgccacctactattgccagcagggcaacaccctgccttacacatttggacagggcaccaaggtggaaatcaagagaggcggaggcggaagtggaggcggaggatctggcggcggaggctctgaagtgcagctggttgaatcaggtggcggcctggttcaacctggcggatctctgagactgagctgtgccgccagcggcttcaccttcagcgactactttatgagctgggtccgacaggcccctggcaaaggacttgaatgggtcgccaccatcagcaatggcggcacctacacttactaccccgacagcgtgaagggcagattcaccatctccagagacaacagcaagaacaccctgtacctccagatgaactccctgagagccgaggacaccgccgtgtactactgcgccagattcgacggctacatcttcgactattggggccagggcaccctggtcacagtctcttctacgcgtgaggacctgaagaacgtgttcccacctgaggtggccgtgttcgagcctagcgaggccgagatcagccacacccagaaagccaccctcgtgtgcctggctaccggcttctaccccgaccatgtggaactgtcttggtgggtcaacggcaaagaggtgcacagcggcgtgtgtaccgacccccagccactgaaagaacagcccgccctgaacgacagccggtactgcctgagcagcagactgagagtgtccgccaccttctggcagaacccccggaaccacttcagatgccaggtgcagttctacggcctgagcgagaacgacgagtggacccaggacagagccaagcccgtgacccagatcgtgtctgccgaagcctggggcagagccgattgcggctttaccagcgagagctaccagcagggcgtgctgagcgccaccaacctgagcgtgatcggcttcagaatcctgctgctgaaagtggccggctttaacctgctgatgaccctgcggctgtggtccagccgcgccaagagaagcggatctggcgtgaagcagaccctgaatttcgacctgctgaagctggctggcgacgtggaatccaacccaggcccttctagaggccatatgaccgagtacaagcccacggtgcgcctcgccacccgcgacgacgtccccagggccgtacgcaccctcgccgccgcgttcgccgactaccccgccacgcgccacaccgtcgatccggaccgccacatcgagcgggtcaccgagctgcaagaactcttcctcacgcgcgtcgggctcgacatcggcaaggtgtgggtcgcggacgacggcgccgcggtggcggtctggaccacgccggagagcgtcgaagcgggggcggtgttcgccgagatcggcccgcgcatggccgagttgagcggttcccggctggccgcgcagcaacagatggaaggcctcctggcgccgcaccggcccaaggagcccgcgtggttcctggccaccgtcggcgtctcgcccgaccaccagggcaagggtctgggcagcgccgtcgtgctccccggagtggaggcggccgagcgcgccggggtgcccgccttcctggagacctccgcgccccgcaacctccccttctacgagcggctcggcttcaccgtcaccgccgacgtcgaggtgcccgaaggaccgcgcacctggtgcatgacccgcaagcccggtgcctga

SEQ ID NO: 17998 - DNA, 2616 bp, synthetic construct
  source 1..2616: mol_type = other DNA
atggccttaccagtgaccgccttgctcctgccgctggccttgctgctccacgccgccaggccgctcgagatccagaaccctgatcctgccgtgtaccagctgcgggatagcaagagcagcgacaagagcgtgtgtctgttcaccgacttcgacagccagaccaacgtgtcccagagcaaggactccgacgtgtacatcaccgataagtgcgtgctggacatgcggagcatggacttcaagagcaactccgccgtggcctggtccaacaagtccgatttcgcctgcgccaacgccttcaacaacagcattatccccgaggacacattcttcccaagccccgagagcagctgcgacgtgaagctggtggaaaagagcttcgagacagacaccaacctgaacttccagatcctgtacgagatcctgctgggcaaggccaccctgtacgccgtgctggtgtctgccctggtgctgatggctatggtcaagcggaaggacagccggggaagggccaagcgatctggatctggagcaacaaacttctcactactcaaacaagcaggtgacgtggaggagaatcccgggcctactagcatggccttaccagtgaccgccttgctcctgccgctggccttgctgctccacgccgccaggccggacatccagatgacacagagccctagcagcctgtctgccagcgtgggagacagagtgaccatcacatgcaaggccagcgaccacatcaacaactggctggcctggtatcagcagaagcctggacaggcccctaagctgctgatctacggcgctaccacactggaaacaggcgtgcccagcagattttctggcagcggctctggcaccgactacaccctgacaatatccagcctccagcctgaggacttcgccacctactactgtcagcagagctggaacaccccttggacattcggccagggcaccaagctggaaatcaagagaggcggaggcggaagtggaggcggaggatctggcggcggaggctctcaagttcagcttcaacagcctggcgctgagctggtcaaacctggcgcttctgtgaagatgagctgcaaagccagcggctacgccttcagcagctactggatcaactggatgaagcagaaacccggccagggactcgaatggatcggccaaatctatcccggcgacggcgacaccaactacaacggcaagttcaagggcagagccacactgaccgccgatacctctagcagcacagcctacatgcagctgagcagcctgaccagcgaagatagcgccgtgtacttctgtgcccggtccatcacaacagtcgtgggctgcgctatggactattggggccagggaacaagcgtgaccgtgtctagtacgcgtgaggacctgaagaacgtgttcccacctgaggtggccgtgttcgagcctagcgaggccgagatcagccacacccagaaagccaccctcgtgtgcctggctaccggcttctaccccgaccatgtggaactgtcttggtgggtcaacggcaaagaggtgcacagcggcgtgtgtaccgacccccagccactgaaagaacagcccgccctgaacgacagccggtactgcctgagcagcagactgagagtgtccgccaccttctggcagaacccccggaaccacttcagatgccaggtgcagttctacggcctgagcgagaacgacgagtggacccaggacagagccaagcccgtgacccagatcgtgtctgccgaagcctggggcagagccgattgcggctttaccagcgagagctaccagcagggcgtgctgagcgccaccaacctgagcgtgatcggcttcagaatcctgctgctgaaagtggccggctttaacctgctgatgaccctgcggctgtggtccagccgcgccaagagaagcggatctggcgtgaagcagaccctgaatttcgacctgctgaagctggctggcgacgtggaatccaacccaggcccttctagaggccatatgaccgagtacaagcccacggtgcgcctcgccacccgcgacgacgtccccagggccgtacgcaccctcgccgccgcgttcgccgactaccccgccacgcgccacaccgtcgatccggaccgccacatcgagcgggtcaccgagctgcaagaactcttcctcacgcgcgtcgggctcgacatcggcaaggtgtgggtcgcggacgacggcgccgcggtggcggtctggaccacgccggagagcgtcgaagcgggggcggtgttcgccgagatcggcccgcgcatggccgagttgagcggttcccggctggccgcgcagcaacagatggaaggcctcctggcgccgcaccggcccaaggagcccgcgtggttcctggccaccgtcggcgtctcgcccgaccaccagggcaagggtctgggcagcgccgtcgtgctccccggagtggaggcggccgagcgcgccggggtgcccgccttcctggagacctccgcgccccgcaacctccccttctacgagcggctcggcttcaccgtcaccgccgacgtcgaggtgcccgaaggaccgcgcacctggtgcatgacccgcaagcccggtgcctga

SEQ ID NO: 17999 - DNA, 2622 bp, synthetic construct
  source 1..2622: mol_type = other DNA
atggccttaccagtgaccgccttgctcctgccgctggccttgctgctccacgccgccaggccgctcgagatccagaaccctgatcctgccgtgtaccagctgcgggatagcaagagcagcgacaagagcgtgtgtctgttcaccgacttcgacagccagaccaacgtgtcccagagcaaggactccgacgtgtacatcaccgataagtgcgtgctggacatgcggagcatggacttcaagagcaactccgccgtggcctggtccaacaagtccgatttcgcctgcgccaacgccttcaacaacagcattatccccgaggacacattcttcccaagccccgagagcagctgcgacgtgaagctggtggaaaagagcttcgagacagacaccaacctgaacttccagatcctgtacgagatcctgctgggcaaggccaccctgtacgccgtgctggtgtctgccctggtgctgatggctatggtcaagcggaaggacagccggggaagggccaagcgatctggatctggagcaacaaacttctcactactcaaacaagcaggtgacgtggaggagaatcccgggcctactagcatggccttaccagtgaccgccttgctcctgccgctggccttgctgctccacgccgccaggccgcagatcgtgctgtctcagtctcctgccatcctgagcgcttccccaggcgagaaagtgaccatgacctgtagagccagcagcagcgtgtcctacatgcactggtatcagcagaagcccggcagcagccctaagccttggatctacgccaccagcaatctggcctctggcgtgccagccagattttctggctctggcagcggcaccagctacagcttcacaatcagcagagtggaagccgaggacgccgccacctactattgtcagcagtggaccttcaatcctcctaccttcggcggaggcacccggctggaaatcaaaagaacagtggctgctggcggaggcggaagtggaggcggaggatctggcggcggaggctctcaggcttatctgcaacagagcggagccgaactcgtcagacctggcgcttctgtgaagatgagctgcaaggccagcggctacaccttcaccagctataatatgcactgggtcaagcagacccctcggcagggactcgaatggatcggcggaatctatcccggcaacggcgacacctcctacaaccagaagttcaagggcaaagccacactgaccgtgggcaagagcagcagcaccgcctatatgcagctcagcagcctgaccagcgaggacagcgccgtgtacttctgcgccagatacgactacaactacgctatggactactggggccagggcaccagcgtgacagttagctctgccagcacgcgtgaggacctgaagaacgtgttcccacctgaggtggccgtgttcgagcctagcgaggccgagatcagccacacccagaaagccaccctcgtgtgcctggctaccggcttctaccccgaccatgtggaactgtcttggtgggtcaacggcaaagaggtgcacagcggcgtgtgtaccgacccccagccactgaaagaacagcccgccctgaacgacagccggtactgcctgagcagcagactgagagtgtccgccaccttctggcagaacccccggaaccacttcagatgccaggtgcagttctacggcctgagcgagaacgacgagtggacccaggacagagccaagcccgtgacccagatcgtgtctgccgaagcctggggcagagccgattgcggctttaccagcgagagctaccagcagggcgtgctgagcgccaccaacctgagcgtgatcggcttcagaatcctgctgctgaaagtggccggctttaacctgctgatgaccctgcggctgtggtccagccgcgccaagagaagcggatctggcgtgaagcagaccctgaatttcgacctgctgaagctggctggcgacgtggaatccaacccaggcccttctagaggccatatgaccgagtacaagcccacggtgcgcctcgccacccgcgacgacgtccccagggccgtacgcaccctcgccgccgcgttcgccgactaccccgccacgcgccacaccgtcgatccggaccgccacatcgagcgggtcaccgagctgcaagaactcttcctcacgcgcgtcgggctcgacatcggcaaggtgtgggtcgcggacgacggcgccgcggtggcggtctggaccacgccggagagcgtcgaagcgggggcggtgttcgccgagatcggcccgcgcatggccgagttgagcggttcccggctggccgcgcagcaacagatggaaggcctcctggcgccgcaccggcccaaggagcccgcgtggttcctggccaccgtcggcgtctcgcccgaccaccagggcaagggtctgggcagcgccgtcgtgctccccggagtggaggcggccgagcgcgccggggtgcccgccttcctggagacctccgcgccccgcaacctccccttctacgagcggctcggcttcaccgtcaccgccgacgtcgaggtgcccgaaggaccgcgcacctggtgcatgacccgcaagcccggtgcctga

SEQ ID NO: 18000 - DNA, 2616 bp, synthetic construct
  source 1..2616: mol_type = other DNA
atggccttaccagtgaccgccttgctcctgccgctggccttgctgctccacgccgccaggccgctcgagatccagaaccctgatcctgccgtgtaccagctgcgggatagcaagagcagcgacaagagcgtgtgtctgttcaccgacttcgacagccagaccaacgtgtcccagagcaaggactccgacgtgtacatcaccgataagtgcgtgctggacatgcggagcatggacttcaagagcaactccgccgtggcctggtccaacaagtccgatttcgcctgcgccaacgccttcaacaacagcattatccccgaggacacattcttcccaagccccgagagcagctgcgacgtgaagctggtggaaaagagcttcgagacagacaccaacctgaacttccagatcctgtacgagatcctgctgggcaaggccaccctgtacgccgtgctggtgtctgccctggtgctgatggctatggtcaagcggaaggacagccggggaagggccaagcgatctggatctggagcaacaaacttctcactactcaaacaagcaggtgacgtggaggagaatcccgggcctactagcatggccttaccagtgaccgccttgctcctgccgctggccttgctgctccacgccgccaggccggagatcgtgctgacacagagccctgccaccctgtctctgagccctggcgaaagagccaccctgagctgtagagccagccagagcgtgtccagctacctggcctggtatcagcagaagcccggccaggctccccggctgctgatctacgatgccagcaatagagccaccggcatccccgccagattttccggctctggcagcggcaccgacttcaccctgaccatcagctccctggaacccgaggacttcgccgtgtactactgccagcagcggagcaactggcccatcacattcggccagggcacccggctggaaatcaaaggcggaggcggaagtggaggcggaggatctggcggcggaggctctgaggtgcagcttgttgagtctggcggaggactggtgcagcccgatagaagcctgagactgtcttgtgccgccagcggcttcaccttccacgattatgccatgcactgggtccgacaggcccctggcaaaggacttgaatgggtgtccaccatctcttggaacagcggcacaatcggctacgccgactctgtgaagggcagattcaccatcagccgggacaacgccaagaacagcctgtacctccagatgaactccctgagagccgaggacacagccctgtactactgcgccaaggacatccagtacggcaactactactacggcatggacgtgtggggccagggcacaacagtgacagtctcttctacgcgtgaggacctgaagaacgtgttcccacctgaggtggccgtgttcgagcctagcgaggccgagatcagccacacccagaaagccaccctcgtgtgcctggctaccggcttctaccccgaccatgtggaactgtcttggtgggtcaacggcaaagaggtgcacagcggcgtgtgtaccgacccccagccactgaaagaacagcccgccctgaacgacagccggtactgcctgagcagcagactgagagtgtccgccaccttctggcagaacccccggaaccacttcagatgccaggtgcagttctacggcctgagcgagaacgacgagtggacccaggacagagccaagcccgtgacccagatcgtgtctgccgaagcctggggcagagccgattgcggctttaccagcgagagctaccagcagggcgtgctgagcgccaccaacctgagcgtgatcggcttcagaatcctgctgctgaaagtggccggctttaacctgctgatgaccctgcggctgtggtccagccgcgccaagagaagcggatctggcgtgaagcagaccctgaatttcgacctgctgaagctggctggcgacgtggaatccaacccaggcccttctagaggccatatgaccgagtacaagcccacggtgcgcctcgccacccgcgacgacgtccccagggccgtacgcaccctcgccgccgcgttcgccgactaccccgccacgcgccacaccgtcgatccggaccgccacatcgagcgggtcaccgagctgcaagaactcttcctcacgcgcgtcgggctcgacatcggcaaggtgtgggtcgcggacgacggcgccgcggtggcggtctggaccacgccggagagcgtcgaagcgggggcggtgttcgccgagatcggcccgcgcatggccgagttgagcggttcccggctggccgcgcagcaacagatggaaggcctcctggcgccgcaccggcccaaggagcccgcgtggttcctggccaccgtcggcgtctcgcccgaccaccagggcaagggtctgggcagcgccgtcgtgctccccggagtggaggcggccgagcgcgccggggtgcccgccttcctggagacctccgcgccccgcaacctccccttctacgagcggctcggcttcaccgtcaccgccgacgtcgaggtgcccgaaggaccgcgcacctggtgcatgacccgcaagcccggtgcctga

SEQ ID NO: 18001 - DNA, 2610 bp, synthetic construct
  source 1..2610: mol_type = other DNA
atggccttaccagtgaccgccttgctcctgccgctggccttgctgctccacgccgccaggccgctcgagatccagaaccctgatcctgccgtgtaccagctgcgggatagcaagagcagcgacaagagcgtgtgtctgttcaccgacttcgacagccagaccaacgtgtcccagagcaaggactccgacgtgtacatcaccgataagtgcgtgctggacatgcggagcatggacttcaagagcaactccgccgtggcctggtccaacaagtccgatttcgcctgcgccaacgccttcaacaacagcattatccccgaggacacattcttcccaagccccgagagcagctgcgacgtgaagctggtggaaaagagcttcgagacagacaccaacctgaacttccagatcctgtacgagatcctgctgggcaaggccaccctgtacgccgtgctggtgtctgccctggtgctgatggctatggtcaagcggaaggacagccggggaagggccaagcgatctggatctggagcaacaaacttctcactactcaaacaagcaggtgacgtggaggagaatcccgggcctactagcatggccttaccagtgaccgccttgctcctgccgctggccttgctgctccacgccgccaggccggacatccagatgacccagagccccagcagcctgtctgccagcgtgggcgacagagtgaccatcacctgtagagccagccaggacgtgaacaccgccgtggcctggtatcagcagaagcctggcaaggcccccaagctgctgatctacagcgccagcttcctggaaagcggcgtgcccagcagattcagcggaagcagaagcggcaccgacttcaccctgaccatcagctccctccagcccgaggacttcgccacctactactgccagcagcactacaccacccctcccaccttcggccagaccaaggtggaaatcaagagaggcggaggcggaagtggaggcggaggatctggcggcggaggctctgaagtgcaactggtggaatctggcggcggactggtgcagcctggcggatctctgagactgagctgtgccgccagcggcttcaacatcaaggacacctacatccactgggtgcgccaggcccctggaaagggactggaatgggtggcccggatctaccccaccaacggctacaccagatacgccgacagcgtgaagggccggttcaccatcagcgccgacaccagcaagaataccgcctacctccagatgaacagcctgcgggccgaggataccgccgtgtactactgctcaagatggggaggcgacggcttctacgctatggacgtgtggggccagggcacccttgtgaccgtgtcatctacgcgtgaggacctgaagaacgtgttcccacctgaggtggccgtgttcgagcctagcgaggccgagatcagccacacccagaaagccaccctcgtgtgcctggctaccggcttctaccccgaccatgtggaactgtcttggtgggtcaacggcaaagaggtgcacagcggcgtgtgtaccgacccccagccactgaaagaacagcccgccctgaacgacagccggtactgcctgagcagcagactgagagtgtccgccaccttctggcagaacccccggaaccacttcagatgccaggtgcagttctacggcctgagcgagaacgacgagtggacccaggacagagccaagcccgtgacccagatcgtgtctgccgaagcctggggcagagccgattgcggctttaccagcgagagctaccagcagggcgtgctgagcgccaccaacctgagcgtgatcggcttcagaatcctgctgctgaaagtggccggctttaacctgctgatgaccctgcggctgtggtccagccgcgccaagagaagcggatctggcgtgaagcagaccctgaatttcgacctgctgaagctggctggcgacgtggaatccaacccaggcccttctagaggccatatgaccgagtacaagcccacggtgcgcctcgccacccgcgacgacgtccccagggccgtacgcaccctcgccgccgcgttcgccgactaccccgccacgcgccacaccgtcgatccggaccgccacatcgagcgggtcaccgagctgcaagaactcttcctcacgcgcgtcgggctcgacatcggcaaggtgtgggtcgcggacgacggcgccgcggtggcggtctggaccacgccggagagcgtcgaagcgggggcggtgttcgccgagatcggcccgcgcatggccgagttgagcggttcccggctggccgcgcagcaacagatggaaggcctcctggcgccgcaccggcccaaggagcccgcgtggttcctggccaccgtcggcgtctcgcccgaccaccagggcaagggtctgggcagcgccgtcgtgctccccggagtggaggcggccgagcgcgccggggtgcccgccttcctggagacctccgcgccccgcaacctccccttctacgagcggctcggcttcaccgtcaccgccgacgtcgaggtgcccgaaggaccgcgcacctggtgcatgacccgcaagcccggtgcctga

SEQ ID NO: 18002 - DNA, 2247 bp, synthetic construct
  source 1..2247: mol_type = other DNA
atggccttaccagtgaccgccttgctcctgccgctggccttgctgctccacgccgccaggccgctcgagatccagaaccctgatcctgccgtgtaccagctgcgggatagcaagagcagcgacaagagcgtgtgtctgttcaccgacttcgacagccagaccaacgtgtcccagagcaaggactccgacgtgtacatcaccgataagtgcgtgctggacatgcggagcatggacttcaagagcaactccgccgtggcctggtccaacaagtccgatttcgcctgcgccaacgccttcaacaacagcattatccccgaggacacattcttcccaagccccgagagcagctgcgacgtgaagctggtggaaaagagcttcgagacagacaccaacctgaacttccagatcctgtacgagatcctgctgggcaaggccaccctgtacgccgtgctggtgtctgccctggtgctgatggctatggtcaagcggaaggacagccggggaagggccaagcgatctggatctggagcaacaaacttctcactactcaaacaagcaggtgacgtggaggagaatcccgggcctactagcatggccctgcccgtgacagccctgctgctgcctctggctctgctgctgcacgccgccagacccgatgaattcgaggtgcaactggtggaaagcggcggaggcctggtgcaggctggcggatctctgagactgagctgtgccgccagcggcatcaccttcagcatcaacacaatgggctggtacagacaggcccctggcaagcagagggaactggtggccctgatctccagcatcggcgacacctactacgccgacagcgtgaagggccggttcaccatcagccgggacaacgccaagaacaccgtgtacctccagatgaacagcctgaagcccgaggacaccgccgtgtactactgcaagcggttcagaacagccgcccagggcaccgattattggggccagggaacacaagtgaccgtgtcctctacgcgtgaggacctgaagaacgtgttcccacctgaggtggccgtgttcgagcctagcgaggccgagatcagccacacccagaaagccaccctcgtgtgcctggctaccggcttctaccccgaccatgtggaactgtcttggtgggtcaacggcaaagaggtgcacagcggcgtgtgtaccgacccccagccactgaaagaacagcccgccctgaacgacagccggtactgcctgagcagcagactgagagtgtccgccaccttctggcagaacccccggaaccacttcagatgccaggtgcagttctacggcctgagcgagaacgacgagtggacccaggacagagccaagcccgtgacccagatcgtgtctgccgaagcctggggcagagccgattgcggctttaccagcgagagctaccagcagggcgtgctgagcgccaccaacctgagcgtgatcggcttcagaatcctgctgctgaaagtggccggctttaacctgctgatgaccctgcggctgtggtccagccgcgccaagagaagcggatctggcgtgaagcagaccctgaatttcgacctgctgaagctggctggcgacgtggaatccaacccaggcccttctagaggccatatgaccgagtacaagcccacggtgcgcctcgccacccgcgacgacgtccccagggccgtacgcaccctcgccgccgcgttcgccgactaccccgccacgcgccacaccgtcgatccggaccgccacatcgagcgggtcaccgagctgcaagaactcttcctcacgcgcgtcgggctcgacatcggcaaggtgtgggtcgcggacgacggcgccgcggtggcggtctggaccacgccggagagcgtcgaagcgggggcggtgttcgccgagatcggcccgcgcatggccgagttgagcggttcccggctggccgcgcagcaacagatggaaggcctcctggcgccgcaccggcccaaggagcccgcgtggttcctggccaccgtcggcgtctcgcccgaccaccagggcaagggtctgggcagcgccgtcgtgctccccggagtggaggcggccgagcgcgccggggtgcccgccttcctggagacctccgcgccccgcaacctccccttctacgagcggctcggcttcaccgtcaccgccgacgtcgaggtgcccgaaggaccgcgcacctggtgcatgacccgcaagcccggtgcctga

SEQ ID NO: 18003 - DNA, 2247 bp, synthetic construct; identical to SEQ ID NO: 18002
  source 1..2247: mol_type = other DNA

SEQ ID NO: 18004 - DNA, 3042 bp, synthetic construct
  source 1..3042: mol_type = other DNA
atggccttaccagtgaccgccttgctcctgccgctggccttgctgctccacgccgccaggccgctcgagatccagaaccctgatcctgccgtgtaccagctgcgggatagcaagagcagcgacaagagcgtgtgtctgttcaccgacttcgacagccagaccaacgtgtcccagagcaaggactccgacgtgtacatcaccgataagtgcgtgctggacatgcggagcatggacttcaagagcaactccgccgtggcctggtccaacaagtccgatttcgcctgcgccaacgccttcaacaacagcattatccccgaggacacattcttcccaagccccgagagcagctgcgacgtgaagctggtggaaaagagcttcgagacagacaccaacctgaacttccagatcctgtacgagatcctgctgggcaaggccaccctgtacgccgtgctggtgtctgccctggtgctgatggctatggtcaagcggaaggacagccggggaagggccaagcgatctggatctggagcaacaaacttctcactactcaaacaagcaggtgacgtggaggagaatcccgggcctactagcatggccttaccagtgaccgccttgctcctgccgctggccttgctgctccacgccgccaggccgcaggtccagctcgtcgagtccggcggcggcctcgtccaggccggcgactccgtcaccctctcctgcaccgcctccggccgcaccttctcctcctacgccctcgcctggttccgccagcgccccggcaaggagcgcgagttcgtcgccggcctccgctggggcggccccaccaactacgccgactccgtcaaggaccgcttcaccatctccggcgactccgccaagcacaccatgtacctccagatgaactccctcaagcccgaggacaccgccgtctactactgcggctacaaccccggcggctgggccgtcccctcccagtacgagtacgactcctggggccagggcacccaggtcaccgtctcctccggtaccggcggaggcggatctggcggcggaggtagcggtggcggaggatctgaattcgacatccagatgacacagagccctagcagcctgtctgccagcgtgggagacagagtgaccatcacatgcaaggccagcgaccacatcaacaactggctggcctggtatcagcagaagcctggacaggcccctaagctgctgatctacggcgctaccacactggaaacaggcgtgcccagcagattttctggcagcggctctggcaccgactacaccctgacaatatccagcctccagcctgaggacttcgccacctactactgtcagcagagctggaacaccccttggacattcggccagggcaccaagctggaaatcaagagaggcggaggcggaagtggaggcggaggatctggcggcggaggctctcaagttcagcttcaacagcctggcgctgagctggtcaaacctggcgcttctgtgaagatgagctgcaaagccagcggctacgccttcagcagctactggatcaactggatgaagcagaaacccggccagggactcgaatggatcggccaaatctatcccggcgacggcgacaccaactacaacggcaagttcaagggcagagccacactgaccgccgatacctctagcagcacagcctacatgcagctgagcagcctgaccagcgaagatagcgccgtgtacttctgtgcccggtccatcacaacagtcgtgggctgcgctatggactattggggccagggaacaagcgtgaccgtgtctagtacgcgtgaggacctgaagaacgtgttcccacctgaggtggccgtgttcgagcctagcgaggccgagatcagccacacccagaaagccaccctcgtgtgcctggctaccggcttctaccccgaccatgtggaactgtcttggtgggtcaacggcaaagaggtgcacagcggcgtgtgtaccgacccccagccactgaaagaacagcccgccctgaacgacagccggtactgcctgagcagcagactgagagtgtccgccaccttctggcagaacccccggaaccacttcagatgccaggtgcagttctacggcctgagcgagaacgacgagtggacccaggacagagccaagcccgtgacccagatcgtgtctgccgaagcctggggcagagccgattgcggctttaccagcgagagctaccagcagggcgtgctgagcgccaccaacctgagcgtgatcggcttcagaatcctgctgctgaaagtggccggctttaacctgctgatgaccctgcggctgtggtccagccgcgccaagagaagcggatctggcgtgaagcagaccctgaatttcgacctgctgaagctggctggcgacgtggaatccaacccaggcccttctagaggccatatgaccgagtacaagcccacggtgcgcctcgccacccgcgacgacgtccccagggccgtacgcaccctcgccgccgcgttcgccgactaccccgccacgcgccacaccgtcgatccggaccgccacatcgagcgggtcaccgagctgcaagaactcttcctcacgcgcgtcgggctcgacatcggcaaggtgtgggtcgcggacgacggcgccgcggtggcggtctggaccacgccggagagcgtcgaagcgggggcggtgttcgccgagatcggcccgcgcatggccgagttgagcggttcccggctggccgcgcagcaacagatggaaggcctcctggcgccgcaccggcccaaggagcccgcgtggttcctggccaccgtcggcgtctcgcccgaccaccagggcaagggtctgggcagcgccgtcgtgctccccggagtggaggcggccgagcgcgccggggtgcccgccttcctggagacctccgcgccccgcaacctccccttctacgagcggctcggcttcaccgtcaccgccgacgtcgaggtgcccgaaggaccgcgcacctggtgcatgacccgcaagcccggtgcctga

SEQ ID NO: 18005 - DNA, 3429 bp, synthetic construct
  source 1..3429: mol_type = other DNA
atggccttaccagtgaccgccttgctcctgccgctggccttgctgctccacgccgccaggccgctcgagatccagaaccctgatcctgccgtgtaccagctgcgggatagcaagagcagcgacaagagcgtgtgtctgttcaccgacttcgacagccagaccaacgtgtcccagagcaaggactccgacgtgtacatcaccgataagtgcgtgctggacatgcggagcatggacttcaagagcaactccgccgtggcctggtccaacaagtccgatttcgcctgcgccaacgccttcaacaacagcattatccccgaggacacattcttcccaagccccgagagcagctgcgacgtgaagctggtggaaaagagcttcgagacagacaccaacctgaacttccagatcctgtacgagatcctgctgggcaaggccaccctgtacgccgtgctggtgtctgccctggtgctgatggctatggtcaagcggaaggacagccggggaagggccaagcgatctggatctggagcaacaaacttctcactactcaaacaagcaggtgacgtggaggagaatcccgggcctactagcatggccttaccagtgaccgccttgctcctgccgctggccttgctgctccacgccgccaggccggaggttcagctgcttgagtctggcggaggactggttcaacctggcggaagcctgagactgtcttgtgccgccagcggcttcacctttagcagctacgccatgagctgggtccgacaggctcctggcaaaggactggaatgggtgtccagcatcagcggcagcggcgactacatctactacgccgatagcgtgaagggcagattcaccatcagccgggacatcagcaagaacaccctgtacctccagatgaacagcctgagagccgaggacaccgccgtgtactactgtgccaaagaaggcaccggcgctaacagcagcctggccgattatagaggccagggcacactggtcaccgtgtctagtggcggaggaagcggcggaggatctcaggtccagctcgtcgagtccggcggcggcctcgtccaggccggcgactccgtcaccctctcctgcaccgcctccggccgcaccttctcctcctacgccctcgcctggttccgccagcgccccggcaaggagcgcgagttcgtcgccggcctccgctggggcggccccaccaactacgccgactccgtcaaggaccgcttcaccatctccggcgactccgccaagcacaccatgtacctccagatgaactccctcaagcccgaggacaccgccgtctactactgcggctacaaccccggcggctgggccgtcccctcccagtacgagtacgactcctggggccagggcacccaggtcaccgtctcctccggtaccggcggaggcggatctggcggcggaggtagcggtggcggaggatctgaattcgacatccagatgacacagagccctagcagcctgtctgccagcgtgggagacagagtgaccatcacatgcaaggccagcgaccacatcaacaactggctggcctggtatcagcagaagcctggacaggcccctaagctgctgatctacggcgctaccacactggaaacaggcgtgcccagcagattttctggcagcggctctggcaccgactacaccctgacaatatccagcctccagcctgaggacttcgccacctactactgtcagcagagctggaacaccccttggacattcggccagggcaccaagctggaaatcaagagaggcggaggcggaagtggaggcggaggatctggcggcggaggctctcaagttcagcttcaacagcctggcgctgagctggtcaaacctggcgcttctgtgaagatgagctgcaaagccagcggctacgccttcagcagctactggatcaactggatgaagcagaaacccggccagggactcgaatggatcggccaaatctatcccggcgacggcgacaccaactacaacggcaagttcaagggcagagccacactgaccgccgatacctctagcagcacagcctacatgcagctgagcagcctgaccagcgaagatagcgccgtgtacttctgtgcccggtccatcacaacagtcgtgggctgcgctatggactattggggccagggaacaagcgtgaccgtgtctagtacgcgtgaggacctgaagaacgtgttcccacctgaggtggccgtgttcgagcctagcgaggccgagatcagccacacccagaaagccaccctcgtgtgcctggctaccggcttctaccccgaccatgtggaactgtcttggtgggtcaacggcaaagaggtgcacagcggcgtgtgtaccgacccccagccactgaaagaacagcccgccctgaacgacagccggtactgcctgagcagcagactgagagtgtccgccaccttctggcagaacccccggaaccacttcagatgccaggtgcagttctacggcctgagcgagaacgacgagtggacccaggacagagccaagcccgtgacccagatcgtgtctgccgaagcctggggcagagccgattgcggctttaccagcgagagctaccagcagggcgtgctgagcgccaccaacctgagcgtgatcggcttcagaatcctgctgctgaaagtggccggctttaacctgctgatgaccctgcggctgtggtccagccgcgccaagagaagcggatctggcgtgaagcagaccctgaatttcgacctgctgaagctggctggcgacgtggaatccaacccaggcccttctagaggccatatgaccgagtacaagcccacggtgcgcctcgccacccgcgacgacgtccccagggccgtacgcaccctcgccgccgcgttcgccgactaccccgccacgcgccacaccgtcgatccggaccgccacatcgagcgggtcaccgagctgcaagaactcttcctcacgcgcgtcgggctcgacatcggcaaggtgtgggtcgcggacgacggcgccgcggtggcggtctggaccacgccggagagcgtcgaagcgggggcggtgttcgccgagatcggcccgcgcatggccgagttgagcggttcccggctggccgcgcagcaacagatggaaggcctcctggcgccgcaccggcccaaggagcccgcgtggttcctggccaccgtcggcgtctcgcccgaccaccagggcaagggtctgggcagcgccgtcgtgctccccggagtggaggcggccgagcgcgccggggtgcccgccttcctggagacctccgcgccccgcaacctccccttctacgagcggctcggcttcaccgtcaccgccgacgtcgaggtgcccgaaggaccgcgcacctggtgcatgacccgcaagcccggtgcctga

SEQ ID NO: 18006 - DNA, 3423 bp, synthetic construct
  source 1..3423: mol_type = other DNA
atggccttaccagtgaccgccttgctcctgccgctggccttgctgctccacgccgccaggccgctcgagatccagaaccctgatcctgccgtgtaccagctgcgggatagcaagagcagcgacaagagcgtgtgtctgttcaccgacttcgacagccagaccaacgtgtcccagagcaaggactccgacgtgtacatcaccgataagtgcgtgctggacatgcggagcatggacttcaagagcaactccgccgtggcctggtccaacaagtccgatttcgcctgcgccaacgccttcaacaacagcattatccccgaggacacattcttcccaagccccgagagcagctgcgacgtgaagctggtggaaaagagcttcgagacagacaccaacctgaacttccagatcctgtacgagatcctgctgggcaaggccaccctgtacgccgtgctggtgtctgccctggtgctgatggctatggtcaagcggaaggacagccggggaagggccaagcgatctggatctggagcaacaaacttctcactactcaaacaagcaggtgacgtggaggagaatcccgggcctactagcatggccttaccagtgaccgccttgctcctgccgctggccttgctgctccacgccgccaggccgggcgtgacacagagccccacacacctgattaagaccagaggccagcaggccacactgagatgcagccctatcagcggccacaccagcgtgtactggtatcagcaggctctcggactgggcctccagttcctgctttggtacgacgagggcgaagagagaaaccggggcaacttccctcctcggttttccggcagacagttccccaactacagcagcgagctgaacgtgaacgccctggaactggaagatagcgccctgtacctgtgtgcctcttctcttggtggacctcgcggactggctggactgagaggggatgagcagtttttcggccctggcaccagactgaccgtgctggaaggcggaggaagcggcggaggatctcaggtccagctcgtcgagtccggcggcggcctcgtccaggccggcgactccgtcaccctctcctgcaccgcctccggccgcaccttctcctcctacgccctcgcctggttccgccagcgccccggcaaggagcgcgagttcgtcgccggcctccgctggggcggccccaccaactacgccgactccgtcaaggaccgcttcaccatctccggcgactccgccaagcacaccatgtacctccagatgaactccctcaagcccgaggacaccgccgtctactactgcggctacaaccccggcggctgggccgtcccctcccagtacgagtacgactcctggggccagggcacccaggtcaccgtctcctccggtaccggcggaggcggatctggcggcggaggtagcggtggcggaggatctgaattcgacatccagatgacacagagccctagcagcctgtctgccagcgtgggagacagagtgaccatcacatgcaaggccagcgaccacatcaacaactggctggcctggtatcagcagaagcctggacaggcccctaagctgctgatctacggcgctaccacactggaaacaggcgtgcccagcagattttctggcagcggctctggcaccgactacaccctgacaatatccagcctccagcctgaggacttcgccacctactactgtcagcagagctggaacaccccttggacattcggccagggcaccaagctggaaatcaagagaggcggaggcggaagtggaggcggaggatctggcggcggaggctctcaagttcagcttcaacagcctggcgctgagctggtcaaacctggcgcttctgtgaagatgagctgcaaagccagcggctacgccttcagcagctactggatcaactggatgaagcagaaacccggccagggactcgaatggatcggccaaatctatcccggcgacggcgacaccaactacaacggcaagttcaagggcagagccacactgaccgccgatacctctagcagcacagcctacatgcagctgagcagcctgaccagcgaagatagcgccgtgtacttctgtgcccggtccatcacaacagtcgtgggctgcgctatggactattggggccagggaacaagcgtgaccgtgtctagtacgcgtgaggacctgaagaacgtgttcccacctgaggtggccgtgttcgagcctagcgaggccgagatcagccacacccagaaagccaccctcgtgtgcctggctaccggcttctaccccgaccatgtggaactgtcttggtgggtcaacggcaaagaggtgcacagcggcgtgtgtaccgacccccagccactgaaagaacagcccgccctgaacgacagccggtactgcctgagcagcagactgagagtgtccgccaccttctggcagaacccccggaaccacttcagatgccaggtgcagttctacggcctgagcgagaacgacgagtggacccaggacagagccaagcccgtgacccagatcgtgtctgccgaagcctggggcagagccgattgcggctttaccagcgagagctaccagcagggcgtgctgagcgccaccaacctgagcgtgatcggcttcagaatcctgctgctgaaagtggccggctttaacctgctgatgaccctgcggctgtggtccagccgcgccaagagaagcggatctggcgtgaagcagaccctgaatttcgacctgctgaagctggctggcgacgtggaatccaacccaggcccttctagaggccatatgaccgagtacaagcccacggtgcgcctcgccacccgcgacgacgtccccagggccgtacgcaccctcgccgccgcgttcgccgactaccccgccacgcgccacaccgtcgatccggaccgccacatcgagcgggtcaccgagctgcaagaactcttcctcacgcgcgtcgggctcgacatcggcaaggtgtgggtcgcggacgacggcgccgcggtggcggtctggaccacgccggagagcgtcgaagcgggggcggtgttcgccgagatcggcccgcgcatggccgagttgagcggttcccggctggccgcgcagcaacagatggaaggcctcctggcgccgcaccggcccaaggagcccgcgtggttcctggccaccgtcggcgtctcgcccgaccaccagggcaagggtctgggcagcgccgtcgtgctccccggagtggaggcggccgagcgcgccggggtgcccgccttcctggagacctccgcgccccgcaacctccccttctacgagcggctcggcttcaccgtcaccgccgacgtcgaggtgcccgaaggaccgcgcacctggtgcatgacccgcaagcccggtgcctga

SEQ ID NO: 18007 - DNA, 2703 bp, synthetic construct
  source 1..2703: mol_type = other DNA
atggccttaccagtgaccgccttgctcctgccgctggccttgctgctccacgccgccaggccgctcgagatccagaaccctgatcctgccgtgtaccagctgcgggatagcaagagcagcgacaagagcgtgtgtctgttcaccgacttcgacagccagaccaacgtgtcccagagcaaggactccgacgtgtacatcaccgataagtgcgtgctggacatgcggagcatggacttcaagagcaactccgccgtggcctggtccaacaagtccgatttcgcctgcgccaacgccttcaacaacagcattatccccgaggacacattcttcccaagccccgagagcagctgcgacgtgaagctggtggaaaagagcttcgagacagacaccaacctgaacttccagatcctgtacgagatcctgctgggcaaggccaccctgtacgccgtgctggtgtctgccctggtgctgatggctatggtcaagcggaaggacagccggggaagggccaagcgatctggatctggagcaacaaacttctcactactcaaacaagcaggtgacgtggaggagaatcccgggcctactagcatggccttaccagtgaccgccttgctcctgccgctggccttgctgctccacgccgccaggccgggcgtgacacagagccccacacacctgattaagaccagaggccagcaggccacactgagatgcagccctatcagcggccacaccagcgtgtactggtatcagcaggctctcggactgggcctccagttcctgctttggtacgacgagggcgaagagagaaaccggggcaacttccctcctcggttttccggcagacagttccccaactacagcagcgagctgaacgtgaacgccctggaactggaagatagcgccctgtacctgtgtgcctcttctcttggtggacctcgcggactggctggactgagaggggatgagcagtttttcggccctggcaccagactgaccgtgctggaaggcggaggaagcggcggaggatctggcgtgacacagagccccacacacctgattaagaccagaggccagcaggccacactgagatgcagccctatcagcggccacaccagcgtgtactggtatcagcaggctctcggactgggcctccagttcctgctttggtacgacgagggcgaagagagaaaccggggcaacttccctcctcggttttccggcagacagttccccaactacagcagcgagctgaacgtgaacgccctggaactggaagatagcgccctgtacctgtgtgccagctctctcggcggagatgaactgggagccgatggcaacgagcagttctttggccctggcaccagactgaccgtgctggaaggtaccggcggaggcggatctggcggcggaggtagcggtggcggaggatctgaattcgacatccagatgacacagagccctagcagcctgtctgccagcgtgggagacagagtgaccatcacatgcaaggccagcgaccacatcaacaactggctggcctggtatcagcagaagcctggacaggcccctaagctgctgatctacggcgctaccacactggaaacaggcgtgcccagcagattttctggcagcggctctggcaccgactacaccctgacaatatccagcctccagcctgaggacttcgccacctactactgtcagcagagctggaacaccccttggacattcggccagggcaccaagctggaaatcaagagaggcggaggcggaagtggaggcggaggatctggcggcggaggctctcaagttcagcttcaacagcctggcgctgagctggtcaaacctggcgcttctgtgaagatgagctgcaaagccagcggctacgccttcagcagctactggatcaactggatgaagcagaaacccggccagggactcgaatggatcggccaaatctatcccggcgacggcgacaccaactacaacggcaagttcaagggcagagccacactgaccgccgatacctctagcagcacagcctacatgcagctgagcagcctgaccagcgaagatagcgccgtgtacttctgtgcccggtccatcacaacagtcgtgggctgcgctatggactattggggccagggaacaagcgtgaccgtgtctagtacgcgtgaggacctgaagaacgtgttcccacctgaggtggccgtgttcgagcctagcgaggccgagatcagccacacccagaaagccaccctcgtgtgcctggctaccggcttctaccccgaccatgtggaactgtcttggtgggtcaacggcaaagaggtgcacagcggcgtgtgtaccgacccccagccactgaaagaacagcccgccctgaacgacagccggtactgcctgagcagcagactgagagtgtccgccaccttctggcagaacccccggaaccacttcagatgccaggtgcagttctacggcctgagcgagaacgacgagtggacccaggacagagccaagcccgtgacccagatcgtgtctgccgaagcctggggcagagccgattgcggctttaccagcgagagctaccagcagggcgtgctgagcgccaccaacctgagcgtgatcggcttcagaatcctgctgctgaaagtggccggctttaacctgctgatgaccctgcggctgtggtccagc

SEQ ID NO: 18008 - DNA, 2265 bp, synthetic construct
  source 1..2265: mol_type = other DNA
atggccttaccagtgaccgccttgctcctgccgctggccttgctgctccacgccgccaggccgctcgagatccagaaccctgatcctgccgtgtaccagctgcgggatagcaagagcagcgacaagagcgtgtgtctgttcaccgacttcgacagccagaccaacgtgtcccagagcaaggactccgacgtgtacatcaccgataagtgcgtgctggacatgcggagcatggacttcaagagcaactccgccgtggcctggtccaacaagtccgatttcgcctgcgccaacgccttcaacaacagcattatccccgaggacacattcttcccaagccccgagagcagctgcgacgtgaagctggtggaaaagagcttcgagacagacaccaacctgaacttccagatcctgtacgagatcctgctgggcaaggccaccctgtacgccgtgctggtgtctgccctggtgctgatggctatggtcaagcggaaggacagccggggaagggccaagcgatctggatctggagcaacaaacttctcactactcaaacaagcaggtgacgtggaggagaatcccgggcctactagcatggccctgcccgtgacagccctgctgctgcctctggctctgctgctgcacgccgccagacccgatgaattcggctctgacctgggcatcaagctgctgttcgccgctgccaagggccaggacgacgaagtgcggattctgctggctgctggggccgacgtgaacgccaaggatttcgagggctacacccccctgcacgtggccgcctatgatggacacctggaaatcgtggaagtgctgctgaaggctggcgctgatgtgaatgccaaagacagccagggccggacccctctgcatgaagccgcctacagcggccatctggaaattgtggaagtgctgctgaaagccggggcagacgtgaacgctcaggacgacgctggcgagacaccagccgatctggctgcagcttggggccacgaagatatcgccgaggtgctgcagaagacgcgtgaggacctgaagaacgtgttcccacctgaggtggccgtgttcgagcctagcgaggccgagatcagccacacccagaaagccaccctcgtgtgcctggctaccggcttctaccccgaccatgtggaactgtcttggtgggtcaacggcaaagaggtgcacagcggcgtgtgtaccgacccccagccactgaaagaacagcccgccctgaacgacagccggtactgcctgagcagcagactgagagtgtccgccaccttctggcagaacccccggaaccacttcagatgccaggtgcagttctacggcctgagcgagaacgacgagtggacccaggacagagccaagcccgtgacccagatcgtgtctgccgaagcctggggcagagccgattgcggctttaccagcgagagctaccagcagggcgtgctgagcgccaccaacctgagcgtgatcggcttcagaatcctgctgctgaaagtggccggctttaacctgctgatgaccctgcggctgtggtccagccgcgccaagagaagcggatctggcgtgaagcagaccctgaatttcgacctgctgaagctggctggcgacgtggaatccaacccaggcccttctagaggccatatgaccgagtacaagcccacggtgcgcctcgccacccgcgacgacgtccccagggccgtacgcaccctcgccgccgcgttcgccgactaccccgccacgcgccacaccgtcgatccggaccgccacatcgagcgggtcaccgagctgcaagaactcttcctcacgcgcgtcgggctcgacatcggcaaggtgtgggtcgcggacgacggcgccgcggtggcggtctggaccacgccggagagcgtcgaagcgggggcggtgttcgccgagatcggcccgcgcatggccgagttgagcggttcccggctggccgcgcagcaacagatggaaggcctcctggcgccgcaccggcccaaggagcccgcgtggttcctggccaccgtcggcgtctcgcccgaccaccagggcaagggtctgggcagcgccgtcgtgctccccggagtggaggcggccgagcgcgccggggtgcccgccttcctggagacctccgcgccccgcaacctccccttctacgagcggctcggcttcaccgtcaccgccgacgtcgaggtgcccgaaggaccgcgcacctggtgcatgacccgcaagcccggtgcctga

SEQ ID NO: 18009 - DNA, 2052 bp, synthetic construct
  source 1..2052: mol_type = other DNA
atggccttaccagtgaccgccttgctcctgccgctggccttgctgctccacgccgccaggccgctcgagatccagaaccctgatcctgccgtgtaccagctgcgggatagcaagagcagcgacaagagcgtgtgtctgttcaccgacttcgacagccagaccaacgtgtcccagagcaaggactccgacgtgtacatcaccgataagtgcgtgctggacatgcggagcatggacttcaagagcaactccgccgtggcctggtccaacaagtccgatttcgcctgcgccaacgccttcaacaacagcattatccccgaggacacattcttcccaagccccgagagcagctgcgacgtgaagctggtggaaaagagcttcgagacagacaccaacctgaacttccagatcctgtacgagatcctgctgggcaaggccaccctgtacgccgtgctggtgtctgccctggtgctgatggctatggtcaagcggaaggacagccggggaagggccaagcgatctggatctggagcaacaaacttctcactactcaaacaagcaggtgacgtggaggagaatcccgggcctactagcatggactggatttggcgcatccttttccttgtcggcgctgctaccggcgcccattccttcgaaggcagcggattcgaatacgccaaagagatgcggaacgcctactgggagatcgccctgctgcccaatctgaccaaccagcagaagagagcccccatcagaaagctgtacgacgacccctcccagagcagcgagctgctgtctgaggctaaaaaactgaacgatagccagacgcgtgaggacctgaagaacgtgttcccacctgaggtggccgtgttcgagcctagcgaggccgagatcagccacacccagaaagccaccctcgtgtgcctggctaccggcttctaccccgaccatgtggaactgtcttggtgggtcaacggcaaagaggtgcacagcggcgtgtgtaccgacccccagccactgaaagaacagcccgccctgaacgacagccggtactgcctgagcagcagactgagagtgtccgccaccttctggcagaacccccggaaccacttcagatgccaggtgcagttctacggcctgagcgagaacgacgagtggacccaggacagagccaagcccgtgacccagatcgtgtctgccgaagcctggggcagagccgattgcggctttaccagcgagagctaccagcagggcgtgctgagcgccaccaacctgagcgtgatcggcttcagaatcctgctgctgaaagtggccggctttaacctgctgatgaccctgcggctgtggtccagccgcgccaagagaagcggatctggcgtgaagcagaccctgaatttcgacctgctgaagctggctggcgacgtggaatccaacccaggcccttctagaggccatatgaccgagtacaagcccacggtgcgcctcgccacccgcgacgacgtccccagggccgtacgcaccctcgccgccgcgttcgccgactaccccgccacgcgccacaccgtcgatccggaccgccacatcgagcgggtcaccgagctgcaagaactcttcctcacgcgcgtcgggctcgacatcggcaaggtgtgggtcgcggacgacggcgccgcggtggcggtctggaccacgccggagagcgtcgaagcgggggcggtgttcgccgagatcggcccgcgcatggccgagttgagcggttcccggctggccgcgcagcaacagatggaaggcctcctggcgccgcaccggcccaaggagcccgcgtggttcctggccaccgtcggcgtctcgcccgaccaccagggcaagggtctgggcagcgccgtcgtgctccccggagtggaggcggccgagcgcgccggggtgcccgccttcctggagacctccgcgccccgcaacctccccttctacgagcggctcggcttcaccgtcaccgccgacgtcgaggtgcccgaaggaccgcgcacctggtgcatgacccgcaagcccggtgcctga

SEQ ID NO: 18010 - DNA, 2718 bp, synthetic construct
  source 1..2718: mol_type = other DNA
atggccttaccagtgaccgccttgctcctgccgctggccttgctgctccacgccgccaggccgctcgagatccagaaccctgatcctgccgtgtaccagctgcgggatagcaagagcagcgacaagagcgtgtgtctgttcaccgacttcgacagccagaccaacgtgtcccagagcaaggactccgacgtgtacatcaccgataagtgcgtgctggacatgcggagcatggacttcaagagcaactccgccgtggcctggtccaacaagtccgatttcgcctgcgccaacgccttcaacaacagcattatccccgaggacacattcttcccaagccccgagagcagctgcgacgtgaagctggtggaaaagagcttcgagacagacaccaacctgaacttccagatcctgtacgagatcctgctgggcaaggccaccctgtacgccgtgctggtgtctgccctggtgctgatggctatggtcaagcggaaggacagccggggaagggccaagcgatctggatctggagcaacaaacttctcactactcaaacaagcaggtgacgtggaggagaatcccgggcctactagcatggccctgcccgtgacagccctgctgctgcctctggctctgctgctgcacgccgccagacccgatgaattcgaggtgcaactggtggaaagcggcggaggcctggtgcaggctggcggatctctgagactgagctgtgccgccagcggcatcaccttcagcatcaacacaatgggctggtacagacaggcccctggcaagcagagggaactggtggccctgatctccagcatcggcgacacctactacgccgacagcgtgaagggccggttcaccatcagccgggacaacgccaagaacaccgtgtacctccagatgaacagcctgaagcccgaggacaccgccgtgtactactgcaagcggttcagaacagccgcccagggcaccgattattggggccagggaacacaagtgaccgtgtcctctctcgagggaggaggcggctccgggggaggcggaagtggaggcggaggatctgggtctggaggaagcggatctggaggctcagggtcagggggctcaggcagtggaggctctttcgaagtgcaactggtggaatctgggggcggactggtgcagccaggcggaagtctgaggctgtcttgtgccgcctccggcagcatcttcggcttcaacgacatggcctggtatcggcaggctcccggaaaacagcgcgagctggtggctctgattagcagagtgggcgtgaccagcagcgccgactctgtgaagggcagattcacaatctccagagtgaacgccaaggatacagtgtacctccagatgaactctctgaaacctgaggatacagcagtgtactattgctacatggaccagcggctggacggcagcacactggcctactggggacagggaactcaagtgacagtgtctagcacgcgtgaggacctgaagaacgtgttcccacctgaggtggccgtgttcgagcctagcgaggccgagatcagccacacccagaaagccaccctcgtgtgcctggctaccggcttctaccccgaccatgtggaactgtcttggtgggtcaacggcaaagaggtgcacagcggcgtgtgtaccgacccccagccactgaaagaacagcccgccctgaacgacagccggtactgcctgagcagcagactgagagtgtccgccaccttctggcagaacccccggaaccacttcagatgccaggtgcagttctacggcctgagcgagaacgacgagtggacccaggacagagccaagcccgtgacccagatcgtgtctgccgaagcctggggcagagccgattgcggctttaccagcgagagctaccagcagggcgtgctgagcgccaccaacctgagcgtgatcggcttcagaatcctgctgctgaaagtggccggctttaacctgctgatgaccctgcggctgtggtccagccgcgccaagagaagcggatctggcgtgaagcagaccctgaatttcgacctgctgaagctggctggcgacgtggaatccaacccaggcccttctagaggccatatgaccgagtacaagcccacggtgcgcctcgccacccgcgacgacgtccccagggccgtacgcaccctcgccgccgcgttcgccgactaccccgccacgcgccacaccgtcgatccggaccgccacatcgagcgggtcaccgagctgcaagaactcttcctcacgcgcgtcgggctcgacatcggcaaggtgtgggtcgcggacgacggcgccgcggtggcggtctggaccacgccggagagcgtcgaagcgggggcggtgttcgccgagatcggcccgcgcatggccgagttgagcggttcccggctggccgcgcagcaacagatggaaggcctcctggcgccgcaccggcccaaggagcccgcgtggttcctggccaccgtcggcgtctcgcccgaccaccagggcaagggtctgggcagcgccgtcgtgctccccggagtggaggcggccgagcgcgccggggtgcccgccttcctggagacctccgcgccccgcaacctccccttctacgagcggctcggcttcaccgtcaccgccgacgtcgaggtgcccgaaggaccgcgcacctggtgcatgacccgcaagcccggtgcctga

SEQ ID NO: 18011 - DNA, 2460 bp, synthetic construct
  source 1..2460: mol_type = other DNA
atggccttaccagtgaccgccttgctcctgccgctggccttgctgctccacgccgccaggccgctcgagatccagaaccctgatcctgccgtgtaccagctgcgggatagcaagagcagcgacaagagcgtgtgtctgttcaccgacttcgacagccagaccaacgtgtcccagagcaaggactccgacgtgtacatcaccgataagtgcgtgctggacatgcggagcatggacttcaagagcaactccgccgtggcctggtccaacaagtccgatttcgcctgcgccaacgccttcaacaacagcattatccccgaggacacattcttcccaagccccgagagcagctgcgacgtgaagctggtggaaaagagcttcgagacagacaccaacctgaacttccagatcctgtacgagatcctgctgggcaaggccaccctgtacgccgtgctggtgtctgccctggtgctgatggctatggtcaagcggaaggacagccggggaagggccaagcgatctggatctggagcaacaaacttctcactactcaaacaagcaggtgacgtggaggagaatcccgggcctactagcatggcccttccagtcactgccttgctgttgcctctggcgctcctgctccacgccgctagaccgggcatgagaaccgaggacctgcctaaggccgtggtgttcctggaaccccagtggtacagagtgctggaaaaggacagcgtgaccctgaagtgccagggcgcctacagccccgaggacaatagcacccagtggttccacaacgagagcctgatctccagccaggccagcagctacttcatcgacgccgccaccgtggacgacagcggcgagtatagatgccagaccaacctgagcaccctgagcgaccccgtgcagctggaagtgcacatcggatggctgctgctgcaggcccccagatgggtgttcaaagaagaggaccccatccacctgagatgccactcttggaagaacaccgccctgcacaaagtgacctacctgcagaacggcaagggcagaaagtacttccaccacaacagcgacttctacatccccaaggccaccctgaaggactccggctcctacttctgcagaggcctcgtgggcagcaagaacgtgtccagcgagacagtgaacatcaccatcacccagggcctggccgtgtctaccatcagcagctttttcccacccggctaccagacgcgtgaggacctgaagaacgtgttcccacctgaggtggccgtgttcgagcctagcgaggccgagatcagccacacccagaaagccaccctcgtgtgcctggctaccggcttctaccccgaccatgtggaactgtcttggtgggtcaacggcaaagaggtgcacagcggcgtgtgtaccgacccccagccactgaaagaacagcccgccctgaacgacagccggtactgcctgagcagcagactgagagtgtccgccaccttctggcagaacccccggaaccacttcagatgccaggtgcagttctacggcctgagcgagaacgacgagtggacccaggacagagccaagcccgtgacccagatcgtgtctgccgaagcctggggcagagccgattgcggctttaccagcgagagctaccagcagggcgtgctgagcgccaccaacctgagcgtgatcggcttcagaatcctgctgctgaaagtggccggctttaacctgctgatgaccctgcggctgtggtccagccgcgccaagagaagcggatctggcgtgaagcagaccctgaatttcgacctgctgaagctggctggcgacgtggaatccaacccaggcccttctagaggccatatgaccgagtacaagcccacggtgcgcctcgccacccgcgacgacgtccccagggccgtacgcaccctcgccgccgcgttcgccgactaccccgccacgcgccacaccgtcgatccggaccgccacatcgagcgggtcaccgagctgcaagaactcttcctcacgcgcgtcgggctcgacatcggcaaggtgtgggtcgcggacgacggcgccgcggtggcggtctggaccacgccggagagcgtcgaagcgggggcggtgttcgccgagatcggcccgcgcatggccgagttgagcggttcccggctggccgcgcagcaacagatggaaggcctcctggcgccgcaccggcccaaggagcccgcgtggttcctggccaccgtcggcgtctcgcccgaccaccagggcaagggtctgggcagcgccgtcgtgctccccggagtggaggcggccgagcgcgccggggtgcccgccttcctggagacctccgcgccccgcaacctccccttctacgagcggctcggcttcaccgtcaccgccgacgtcgaggtgcccgaaggaccgcgcacctggtgcatgacccgcaagcccggtgcctga

SEQ ID NO: 18012 - DNA, 1341 bp, synthetic construct
  source 1..1341: mol_type = other DNA
atggccttaccagtgaccgccttgctcctgccgctggccttgctgctccacgccgccaggccgctcgagatccagaaccctgatcctgccgtgtaccagctgcgggatagcaagagcagcgacaagagcgtgtgtctgttcaccgacttcgacagccagaccaacgtgtcccagagcaaggactccgacgtgtacatcaccgataagtgcgtgctggacatgcggagcatggacttcaagagcaactccgccgtggcctggtccaacaagtccgatttcgcctgcgccaacgccttcaacaacagcattatccccgaggacacattcttcccaagccccgagagcagctgcgacgtgaagctggtggaaaagagcttcgagacagacaccaacctgaacttccagatcctgtacgagatcctgctgggcaaggccaccctgtacgccgtgctggtgtctgccctggtgctgatggctatggtcaagcggaaggacagccggggaagggccaagcgatctggatctggagcaacaaacttctcactactcaaacaagcaggtgacgtggaggagaatcccgggcctactagcgccaccatggccttaccagtgaccgccttgctcctgccgctggccttgctgctccacgccgccaggccgatggaccccgacctggaaatcagagccgccttcctgcggcagagaaacacagccctgagaacagaggtggccgagctggaacaagaggtgcagcggctggaaaacgaggtgtcccagtacgagacaagatacggccctctcggaggcggaaaaacgcgtgaggacctgaagaacgtgttcccacctgaggtggccgtgttcgagcctagcgaggccgagatcagccacacccagaaagccaccctcgtgtgcctggctaccggcttctaccccgaccatgtggaactgtcttggtgggtcaacggcaaagaggtgcacagcggcgtgtgtaccgacccccagccactgaaagaacagcccgccctgaacgacagccggtactgcctgagcagcagactgagagtgtccgccaccttctggcagaacccccggaaccacttcagatgccaggtgcagttctacggcctgagcgagaacgacgagtggacccaggacagagccaagcccgtgacccagatcgtgtctgccgaagcctggggcagagccgattgcggctttaccagcgagagctaccagcagggcgtgctgagcgccaccaacctgagcgtgatcggcttcagaatcctgctgctgaaagtggccggctttaacctgctgatgaccctgcggctgtggtccagc

SEQ ID NO: 18013 - DNA, 1341 bp, synthetic construct
  source 1..1341: mol_type = other DNA
atggccttaccagtgaccgccttgctcctgccgctggccttgctgctccacgccgccaggccgctcgagatccagaaccctgatcctgccgtgtaccagctgcgggatagcaagagcagcgacaagagcgtgtgtctgttcaccgacttcgacagccagaccaacgtgtcccagagcaaggactccgacgtgtacatcaccgataagtgcgtgctggacatgcggagcatggacttcaagagcaactccgccgtggcctggtccaacaagtccgatttcgcctgcgccaacgccttcaacaacagcattatccccgaggacacattcttcccaagccccgagagcagctgcgacgtgaagctggtggaaaagagcttcgagacagacaccaacctgaacttccagatcctgtacgagatcctgctgggcaaggccaccctgtacgccgtgctggtgtctgccctggtgctgatggctatggtcaagcggaaggacagccggggaagggccaagcgatctggatctggagcaacaaacttctcactactcaaacaagcaggtgacgtggaggagaatcccgggcctactagcgccaccatggccttaccagtgaccgccttgctcctgccgctggccttgctgctccacgccgccaggccgatggaccctgatctcgaaattgaggccgcctttctggaacgcgagaacactgccctggaaaccagggtcgcagagctgagacagagagtgcagagactgcggaacagagtgtctcagtaccgcaccagatatggcccactcggcggaggtaaaacgcgtgaggacctgaagaacgtgttcccacctgaggtggccgtgttcgagcctagcgaggccgagatcagccacacccagaaagccaccctcgtgtgcctggctaccggcttctaccccgaccatgtggaactgtcttggtgggtcaacggcaaagaggtgcacagcggcgtgtgtaccgacccccagccactgaaagaacagcccgccctgaacgacagccggtactgcctgagcagcagactgagagtgtccgccaccttctggcagaacccccggaaccacttcagatgccaggtgcagttctacggcctgagcgagaacgacgagtggacccaggacagagccaagcccgtgacccagatcgtgtctgccgaagcctggggcagagccgattgcggctttaccagcgagagctaccagcagggcgtgctgagcgccaccaacctgagcgtgatcggcttcagaatcctgctgctgaaagtggccggctttaacctgctgatgaccctgcggctgtggtccagc

SEQ ID NO: 18014 - DNA, 2046 bp, synthetic construct
  source 1..2046: mol_type = other DNA
atggccttaccagtgaccgccttgctcctgccgctggccttgctgctccacgccgccaggccgctcgagatccagaaccctgatcctgccgtgtaccagctgcgggatagcaagagcagcgacaagagcgtgtgtctgttcaccgacttcgacagccagaccaacgtgtcccagagcaaggactccgacgtgtacatcaccgataagtgcgtgctggacatgcggagcatggacttcaagagcaactccgccgtggcctggtccaacaagtccgatttcgcctgcgccaacgccttcaacaacagcattatccccgaggacacattcttcccaagccccgagagcagctgcgacgtgaagctggtggaaaagagcttcgagacagacaccaacctgaacttccagatcctgtacgagatcctgctgggcaaggccaccctgtacgccgtgctggtgtctgccctggtgctgatggctatggtcaagcggaaggacagccggggaagggccaagcgatctggatctggagcaacaaacttctcactactcaaacaagcaggtgacgtggaggagaatcccgggcctactagcgccaccatggccttaccagtgaccgccttgctcctgccgctggccttgctgctccacgccgccaggccgctgttcaatcaagaggtgcagatccctctgaccgagagctactgtggcccctgtcctaagaactggatctgctacaagaacaactgctaccagttcttcgacgagagcaagaattggtacgagagccaggccagctgcatgagccagaatgccagcctgctgaaggtgtacagcaaagaggaccaggacctgctgaaactggtcaagagcgcccactggatgggccttgtgcacatccccaccaatggctcttggcagtgggaggacggcagcattctgagccctaacctgctgaccatcatcgagatgcagaagggcgactgcgccctgtacgccagcagctttaagggctacatcgagaattgcagcaccccgaacacctacatctgtatgcagagaaccgtttctggcggaggcggctctggaggaggcggaagtggcggcggaggcgacctctttaatcaagaagtccagattccactcaccgaatcctactgcggaccttgtccaaaaaattggatttgttataagaacaactgttatcaattctttgatgagtctaaaaattggtatgagtcccaggcttcctgcatgtctcagaacgcttctctgctgaaagtctactctaaagaagatcaggatctcctgaagctcgtcaagtctgcccattggatggggctcgtccacattcctaccaacggaagctggcaatgggaagatggctccatcctgtctccaaatctgctcacgattattgaaatgcagaaaggggattgtgctctctacgccagctccttcaagggatatattgagaactgtagcacgcccaatacttatatctgtatgcaacggaccgtgacgcgtgaggacctgaagaacgtgttcccacctgaggtggccgtgttcgagcctagcgaggccgagatcagccacacccagaaagccaccctcgtgtgcctggctaccggcttctaccccgaccatgtggaactgtcttggtgggtcaacggcaaagaggtgcacagcggcgtgtgtaccgacccccagccactgaaagaacagcccgccctgaacgacagccggtactgcctgagcagcagactgagagtgtccgccaccttctggcagaacccccggaaccacttcagatgccaggtgcagttctacggcctgagcgagaacgacgagtggacccaggacagagccaagcccgtgacccagatcgtgtctgccgaagcctggggcagagccgattgcggctttaccagcgagagctaccagcagggcgtgctgagcgccaccaacctgagcgtgatcggcttcagaatcctgctgctgaaagtggccggctttaacctgctgatgaccctgcggctgtggtccagc

SEQ ID NO: 18015 - DNA, 2046 bp, synthetic construct
  source 1..2046: mol_type = other DNA
atggccttaccagtgaccgccttgctcctgccgctggccttgctgctccacgccgccaggccgctcgagatccagaaccctgatcctgccgtgtaccagctgcgggatagcaagagcagcgacaagagcgtgtgtctgttcaccgacttcgacagccagaccaacgtgtcccagagcaaggactccgacgtgtacatcaccgataagtgcgtgctggacatgcggagcatggacttcaagagcaactccgccgtggcctggtccaacaagtccgatttcgcctgcgccaacgccttcaacaacagcattatccccgaggacacattcttcccaagccccgagagcagctgcgacgtgaagctggtggaaaagagcttcgagacagacaccaacctgaacttccagatcctgtacgagatcctgctgggcaaggccaccctgtacgccgtgctggtgtctgccctggtgctgatggctatggtcaagcggaaggacagccggggaagggccaagcgatctggatctggagcaacaaacttctcactactcaaacaagcaggtgacgtggaggagaatcccgggcctactagcgccaccatggccttaccagtgaccgccttgctcctgccgctggccttgctgctccacgccgccaggccgctgttcaatcaagaggtgcagatccctctgaccgagagctactgtggcccctgtcctaagaactggatctgctacaagaacaactgctaccagttcttcgacgagagcaagaattggtacgagagccaggccagctgcatgagccagaatgccagcctgctgaaggtgtacagcaaagaggaccaggacctgctgaaactggtcaagagcgcccactggatgggccttgtgcacatccccaccaatggctcttggcagtgggaggacggcagcattctgagccctaacctgctgaccatcatcgagatgcagaagggcgactgcgccctgtacgccagcagctttaagggcttcatcgagaattgcagcaccccgaacacctacatctgtatgcagagaaccgttggcggaggcggaagtggaggcggaggatctggcggcggaggctctgacctctttaatcaagaagtccagattccactcaccgaatcctactgcggaccttgtccaaaaaattggatttgttataagaacaactgttatcaattctttgatgagtctaaaaattggtatgagtcccaggcttcctgcatgtctcagaacgcttctctgctgaaagtctactctaaagaagatcaggatctcctgaagctcgtcaagtctgcccattggatggggctcgtccacattcctaccaacggaagctggcaatgggaagatggctccatcctgtctccaaatctgctcacgattattgaaatgcagaaaggggattgtgctctctacgccagctccttcaagggatttattgagaactgtagcacgcccaatacttatatctgtatgcaacggaccgtgacgcgtgaggacctgaagaacgtgttcccacctgaggtggccgtgttcgagcctagcgaggccgagatcagccacacccagaaagccaccctcgtgtgcctggctaccggcttctaccccgaccatgtggaactgtcttggtgggtcaacggcaaagaggtgcacagcggcgtgtgtaccgacccccagccactgaaagaacagcccgccctgaacgacagccggtactgcctgagcagcagactgagagtgtccgccaccttctggcagaacccccggaaccacttcagatgccaggtgcagttctacggcctgagcgagaacgacgagtggacccaggacagagccaagcccgtgacccagatcgtgtctgccgaagcctggggcagagccgattgcggctttaccagcgagagctaccagcagggcgtgctgagcgccaccaacctgagcgtgatcggcttcagaatcctgctgctgaaagtggccggctttaacctgctgatgaccctgcggctgtggtccagc

SEQ ID NO: 18016 - DNA, 2124 bp, synthetic construct
  source 1..2124: mol_type = other DNA
atggccttaccagtgaccgccttgctcctgccgctggccttgctgctccacgccgccaggccgctcgagatccagaaccctgatcctgccgtgtaccagctgcgggatagcaagagcagcgacaagagcgtgtgtctgttcaccgacttcgacagccagaccaacgtgtcccagagcaaggactccgacgtgtacatcaccgataagtgcgtgctggacatgcggagcatggacttcaagagcaactccgccgtggcctggtccaacaagtccgatttcgcctgcgccaacgccttcaacaacagcattatccccgaggacacattcttcccaagccccgagagcagctgcgacgtgaagctggtggaaaagagcttcgagacagacaccaacctgaacttccagatcctgtacgagatcctgctgggcaaggccaccctgtacgccgtgctggtgtctgccctggtgctgatggctatggtcaagcggaaggacagccggggaagggccaagcgatctggatctggagcaacaaacttctcactactcaaacaagcaggtgacgtggaggagaatcccgggcctactagcatggccttaccagtgaccgccttgctcctgccgctggccttgctgctccacgccgccaggccgatggaccccgacctggaaatcagagccgccttcctgcggcagagaaacacagccctgagaacagaggtggccgagctggaacaagaggtgcagcggctggaaaacgaggtgtcccagtacgagacaagatacggccctctcggaggcggaaaaggtaccggcggaggcggatctggcggcggaggtagcggtggcggaggatctgaattcgacatccagatgacacagagccctagcagcctgtctgccagcgtgggagacagagtgaccatcacatgcaaggccagcgaccacatcaacaactggctggcctggtatcagcagaagcctggacaggcccctaagctgctgatctacggcgctaccacactggaaacaggcgtgcccagcagattttctggcagcggctctggcaccgactacaccctgacaatatccagcctccagcctgaggacttcgccacctactactgtcagcagagctggaacaccccttggacattcggccagggcaccaagctggaaatcaagagaggcggaggcggaagtggaggcggaggatctggcggcggaggctctcaagttcagcttcaacagcctggcgctgagctggtcaaacctggcgcttctgtgaagatgagctgcaaagccagcggctacgccttcagcagctactggatcaactggatgaagcagaaacccggccagggactcgaatggatcggccaaatctatcccggcgacggcgacaccaactacaacggcaagttcaagggcagagccacactgaccgccgatacctctagcagcacagcctacatgcagctgagcagcctgaccagcgaagatagcgccgtgtacttctgtgcccggtccatcacaacagtcgtgggctgcgctatggactattggggccagggaacaagcgtgaccgtgtctagtacgcgtgaggacctgaagaacgtgttcccacctgaggtggccgtgttcgagcctagcgaggccgagatcagccacacccagaaagccaccctcgtgtgcctggctaccggcttctaccccgaccatgtggaactgtcttggtgggtcaacggcaaagaggtgcacagcggcgtgtgtaccgacccccagccactgaaagaacagcccgccctgaacgacagccggtactgcctgagcagcagactgagagtgtccgccaccttctggcagaacccccggaaccacttcagatgccaggtgcagttctacggcctgagcgagaacgacgagtggacccaggacagagccaagcccgtgacccagatcgtgtctgccgaagcctggggcagagccgattgcggctttaccagcgagagctaccagcagggcgtgctgagcgccaccaacctgagcgtgatcggcttcagaatcctgctgctgaaagtggccggctttaacctgctgatgaccctgcggctgtggtccagc

SEQ ID NO: 18017 - DNA, 2829 bp, synthetic construct
  source 1..2829: mol_type = other DNA
atggccttaccagtgaccgccttgctcctgccgctggccttgctgctccacgccgccaggccgctcgagatccagaaccctgatcctgccgtgtaccagctgcgggatagcaagagcagcgacaagagcgtgtgtctgttcaccgacttcgacagccagaccaacgtgtcccagagcaaggactccgacgtgtacatcaccgataagtgcgtgctggacatgcggagcatggacttcaagagcaactccgccgtggcctggtccaacaagtccgatttcgcctgcgccaacgccttcaacaacagcattatccccgaggacacattcttcccaagccccgagagcagctgcgacgtgaagctggtggaaaagagcttcgagacagacaccaacctgaacttccagatcctgtacgagatcctgctgggcaaggccaccctgtacgccgtgctggtgtctgccctggtgctgatggctatggtcaagcggaaggacagccggggaagggccaagcgatctggatctggagcaacaaacttctcactactcaaacaagcaggtgacgtggaggagaatcccgggcctactagcatggccttaccagtgaccgccttgctcctgccgctggccttgctgctccacgccgccaggccgctgttcaatcaagaggtgcagatccctctgaccgagagctactgtggcccctgtcctaagaactggatctgctacaagaacaactgctaccagttcttcgacgagagcaagaattggtacgagagccaggccagctgcatgagccagaatgccagcctgctgaaggtgtacagcaaagaggaccaggacctgctgaaactggtcaagagcgcccactggatgggccttgtgcacatccccaccaatggctcttggcagtgggaggacggcagcattctgagccctaacctgctgaccatcatcgagatgcagaagggcgactgcgccctgtacgccagcagctttaagggcttcatcgagaattgcagcaccccgaacacctacatctgtatgcagagaaccgttggcggaggcggaagtggaggcggaggatctggcggcggaggctctgacctctttaatcaagaagtccagattccactcaccgaatcctactgcggaccttgtccaaaaaattggatttgttataagaacaactgttatcaattctttgatgagtctaaaaattggtatgagtcccaggcttcctgcatgtctcagaacgcttctctgctgaaagtctactctaaagaagatcaggatctcctgaagctcgtcaagtctgcccattggatggggctcgtccacattcctaccaacggaagctggcaatgggaagatggctccatcctgtctccaaatctgctcacgattattgaaatgcagaaaggggattgtgctctctacgccagctccttcaagggatttattgagaactgtagcacgcccaatacttatatctgtatgcaacggaccgtgggtaccggcggaggcggatctggcggcggaggtagcggtggcggaggatctgaattcgacatccagatgacacagagccctagcagcctgtctgccagcgtgggagacagagtgaccatcacatgcaaggccagcgaccacatcaacaactggctggcctggtatcagcagaagcctggacaggcccctaagctgctgatctacggcgctaccacactggaaacaggcgtgcccagcagattttctggcagcggctctggcaccgactacaccctgacaatatccagcctccagcctgaggacttcgccacctactactgtcagcagagctggaacaccccttggacattcggccagggcaccaagctggaaatcaagagaggcggaggcggaagtggaggcggaggatctggcggcggaggctctcaagttcagcttcaacagcctggcgctgagctggtcaaacctggcgcttctgtgaagatgagctgcaaagccagcggctacgccttcagcagctactggatcaactggatgaagcagaaacccggccagggactcgaatggatcggccaaatctatcccggcgacggcgacaccaactacaacggcaagttcaagggcagagccacactgaccgccgatacctctagcagcacagcctacatgcagctgagcagcctgaccagcgaagatagcgccgtgtacttctgtgcccggtccatcacaacagtcgtgggctgcgctatggactattggggccagggaacaagcgtgaccgtgtctagtacgcgtgaggacctgaagaacgtgttcccacctgaggtggccgtgttcgagcctagcgaggccgagatcagccacacccagaaagccaccctcgtgtgcctggctaccggcttctaccccgaccatgtggaactgtcttggtgggtcaacggcaaagaggtgcacagcggcgtgtgtaccgacccccagccactgaaagaacagcccgccctgaacgacagccggtactgcctgagcagcagactgagagtgtccgccaccttctggcagaacccccggaaccacttcagatgccaggtgcagttctacggcctgagcgagaacgacgagtggacccaggacagagccaagcccgtgacccagatcgtgtctgccgaagcctggggcagagccgattgcggctttaccagcgagagctaccagcagggcgtgctgagcgccaccaacctgagcgtgatcggcttcagaatcctgctgctgaaagtggccggctttaacctgctgatgaccctgcggctgtggtccagc

SEQ ID NO: 18018 - DNA, 1944 bp, synthetic construct
  source 1..1944: mol_type = other DNA
atggccttaccagtgaccgccttgctcctgccgctggccttgctgctccacgccgccaggccgctcgagatccagaaccctgatcctgccgtgtaccagctgcgggatagcaagagcagcgacaagagcgtgtgtctgttcaccgacttcgacagccagaccaacgtgtcccagagcaaggactccgacgtgtacatcaccgataagtgcgtgctggacatgcggagcatggacttcaagagcaactccgccgtggcctggtccaacaagtccgatttcgcctgcgccaacgccttcaacaacagcattatccccgaggacacattcttcccaagccccgagagcagctgcgacgtgaagctggtggaaaagagcttcgagacagacaccaacctgaacttccagatcctgtacgagatcctgctgggcaaggccaccctgtacgccgtgctggtgtctgccctggtgctgatggctatggtcaagcggaaggacagccggggaagggccaagcgatctggatctggagcaacaaacttctcactactcaaacaagcaggtgacgtggaggagaatcccgggcctactagcatggccttaccagtgaccgccttgctcctgccgctggccttgctgctccacgccgccaggccgcagtctgtgctgacacagcctcctagtgtgtctggcgctcctggacagagagtgaccatctcttgtaccggcagcagcagcaatatcggagccggctatgacgtgcactggtatcagcagctccctggcacagcccctaaactgctgatcttcggcaacagcaacagacccagcggcgtgcccgatagattcagcggctttaagagcggcacaagcgccagcctggctatcactggactgcaagccgaggacgaggccgactacttctgccagagctacgatagcagcctgagcggcagcggagtgtttggcacaggcaccaaagtgacagtgcttggcggcggaggcggaagtggaggcggaggatctggcggcggaggctctcaaatgcaactggttcaaagcggcggtggcctggtgcaacctggaagaagtctgagactgagctgtgccgccagcggcttcaccttcgatgattacgccatgcactgggtccgacaggcccctggaaaaggactggaatgggtgtccggcatctcctggaatagcggctctatcggctacgccgacagcgtgaagggcagattcaccatcagccgggacaacgccaagaacagcctgtacctccagatgaactccctgagagccgaggatacagccctgtactactgcgccaaggacatccacagcggcagctactacggcctgctgtactacgctatggacgtgtggggccagggcacaaccgtgacagtttcttctacgcgtgaggacctgaagaacgtgttcccacctgaggtggccgtgttcgagcctagcgaggccgagatcagccacacccagaaagccaccctcgtgtgcctggctaccggcttctaccccgaccatgtggaactgtcttggtgggtcaacggcaaagaggtgcacagcggcgtgtgtaccgacccccagccactgaaagaacagcccgccctgaacgacagccggtactgcctgagcagcagactgagagtgtccgccaccttctggcagaacccccggaaccacttcagatgccaggtgcagttctacggcctgagcgagaacgacgagtggacccaggacagagccaagcccgtgacccagatcgtgtctgccgaagcctggggcagagccgattgcggctttaccagcgagagctaccagcagggcgtgctgagcgccaccaacctgagcgtgatcggcttcagaatcctgctgctgaaagtggccggctttaacctgctgatgaccctgcggctgtggtccagc

SEQ ID NO: 18019 - DNA, 1455 bp, synthetic construct
  source 1..1455: mol_type = other DNA
atggccttaccagtgaccgccttgctcctgccgctggccttgctgctccacgccgccaggccgctcgagatccagaaccctgatcctgccgtgtaccagctgcgggatagcaagagcagcgacaagagcgtgtgtctgttcaccgacttcgacagccagaccaacgtgtcccagagcaaggactccgacgtgtacatcaccgataagtgcgtgctggacatgcggagcatggacttcaagagcaactccgccgtggcctggtccaacaagtccgatttcgcctgcgccaacgccttcaacaacagcattatccccgaggacacattcttcccaagccccgagagcagctgcgacgtgaagctggtggaaaagagcttcgagacagacaccaacctgaacttccagatcctgtacgagatcctgctgggcaaggccaccctgtacgccgtgctggtgtctgccctggtgctgatggctatggtcaagcggaaggacagccggggaagggccaagcgatctggatctggagcaacaaacttctcactactcaaacaagcaggtgacgtggaggagaatcccgggcctactagcatggccttaccagtgaccgccttgctcctgccgctggccttgctgctccacgccgccaggccgatgtgtatgccctgcttcaccaccgaccatcagatggcccggaagtgcgacgattgctgtggcggaaaaggcagaggcaagtgctacggccctcagtgcttgtgtagactcgagggcggaggcggaagtggaggcggaggatctggcggcggaggctctttcgaagtgtgtatgccttgttttaccacggatcaacaaatggctcgcaagtgttctgactgctgcggaggcaaaggccggggaaagtgttatggcccacagtgtctgtgccggacgcgtgaggacctgaagaacgtgttcccacctgaggtggccgtgttcgagcctagcgaggccgagatcagccacacccagaaagccaccctcgtgtgcctggctaccggcttctaccccgaccatgtggaactgtcttggtgggtcaacggcaaagaggtgcacagcggcgtgtgtaccgacccccagccactgaaagaacagcccgccctgaacgacagccggtactgcctgagcagcagactgagagtgtccgccaccttctggcagaacccccggaaccacttcagatgccaggtgcagttctacggcctgagcgagaacgacgagtggacccaggacagagccaagcccgtgacccagatcgtgtctgccgaagcctggggcagagccgattgcggctttaccagcgagagctaccagcagggcgtgctgagcgccaccaacctgagcgtgatcggcttcagaatcctgctgctgaaagtggccggctttaacctgctgatgaccctgcggctgtggtccagc

SEQ ID NO: 18020 - DNA, 2085 bp, synthetic construct
  source 1..2085: mol_type = other DNA
atggccttaccagtgaccgccttgctcctgccgctggccttgctgctccacgccgccaggccgctcgagatccagaaccctgatcctgccgtgtaccagctgcgggatagcaagagcagcgacaagagcgtgtgtctgttcaccgacttcgacagccagaccaacgtgtcccagagcaaggactccgacgtgtacatcaccgataagtgcgtgctggacatgcggagcatggacttcaagagcaactccgccgtggcctggtccaacaagtccgatttcgcctgcgccaacgccttcaacaacagcattatccccgaggacacattcttcccaagccccgagagcagctgcgacgtgaagctggtggaaaagagcttcgagacagacaccaacctgaacttccagatcctgtacgagatcctgctgggcaaggccaccctgtacgccgtgctggtgtctgccctggtgctgatggctatggtcaagcggaaggacagccggggaagggccaagcgatctggatctggagcaacaaacttctcactactcaaacaagcaggtgacgtggaggagaatcccgggcctactagcatggccttaccagtgaccgccttgctcctgccgctggccttgctgctccacgccgccaggccgttcgaagtgtgtatgccttgttttaccacggatcaacaaatggctcgcaagtgttctgactgctgcggaggcaaaggccggggaaagtgttatggcccacagtgtctgtgccggggtaccggcggaggcggatctggcggcggaggtagcggtggcggaggatctgaattcgacatccagatgacacagagccctagcagcctgtctgccagcgtgggagacagagtgaccatcacatgcaaggccagcgaccacatcaacaactggctggcctggtatcagcagaagcctggacaggcccctaagctgctgatctacggcgctaccacactggaaacaggcgtgcccagcagattttctggcagcggctctggcaccgactacaccctgacaatatccagcctccagcctgaggacttcgccacctactactgtcagcagagctggaacaccccttggacattcggccagggcaccaagctggaaatcaagagaggcggaggcggaagtggaggcggaggatctggcggcggaggctctcaagttcagcttcaacagcctggcgctgagctggtcaaacctggcgcttctgtgaagatgagctgcaaagccagcggctacgccttcagcagctactggatcaactggatgaagcagaaacccggccagggactcgaatggatcggccaaatctatcccggcgacggcgacaccaactacaacggcaagttcaagggcagagccacactgaccgccgatacctctagcagcacagcctacatgcagctgagcagcctgaccagcgaagatagcgccgtgtacttctgtgcccggtccatcacaacagtcgtgggctgcgctatggactattggggccagggaacaagcgtgaccgtgtctagtacgcgtgaggacctgaagaacgtgttcccacctgaggtggccgtgttcgagcctagcgaggccgagatcagccacacccagaaagccaccctcgtgtgcctggctaccggcttctaccccgaccatgtggaactgtcttggtgggtcaacggcaaagaggtgcacagcggcgtgtgtaccgacccccagccactgaaagaacagcccgccctgaacgacagccggtactgcctgagcagcagactgagagtgtccgccaccttctggcagaacccccggaaccacttcagatgccaggtgcagttctacggcctgagcgagaacgacgagtggacccaggacagagccaagcccgtgacccagatcgtgtctgccgaagcctggggcagagccgattgcggctttaccagcgagagctaccagcagggcgtgctgagcgccaccaacctgagcgtgatcggcttcagaatcctgctgctgaaagtggccggctttaacctgctgatgaccctgcggctgtggtccagc

SEQ ID NO: 18021 - DNA, 2475 bp, synthetic construct
  source 1..2475: mol_type = other DNA
atggccttaccagtgaccgccttgctcctgccgctggccttgctgctccacgccgccaggccgctcgagatccagaaccctgatcctgccgtgtaccagctgcgggatagcaagagcagcgacaagagcgtgtgtctgttcaccgacttcgacagccagaccaacgtgtcccagagcaaggactccgacgtgtacatcaccgataagtgcgtgctggacatgcggagcatggacttcaagagcaactccgccgtggcctggtccaacaagtccgatttcgcctgcgccaacgccttcaacaacagcattatccccgaggacacattcttcccaagccccgagagcagctgcgacgtgaagctggtggaaaagagcttcgagacagacaccaacctgaacttccagatcctgtacgagatcctgctgggcaaggccaccctgtacgccgtgctggtgtctgccctggtgctgatggctatggtcaagcggaaggacagccggggaagggccaagcgatctggatctggagcaacaaacttctcactactcaaacaagcaggtgacgtggaggagaatcccgggcctactagcatggccttaccagtgaccgccttgctcctgccgctggccttgctgctccacgccgccaggccgttcgaaagccccgtagctcctgcctgtgaccccagactcctaaataaactgctgcgtgactcccacctccttcacagccgactgagtcagtgtcccgacgtggaccctttgtctatccctgttctgctgcctgctgtggactttagcctgggagaatggaaaacccagacggaacagagcaaggcacaggacattctaggggcagtgtcccttctactggagggagtgatggcagcacgaggacagttggaaccctcctgcctctcatccctcctgggacagctttctgggcaggttcgcctcctcttgggggccctgcagggcctcctaggaacccagcttcctctacagggcaggaccacagctcacaaggaccccaatgccctcttcttgagcttgcaacaactgcttcggggaaaggtgcgcttcctgcttctggtagaaggtcccaccctctgtgtcagacggaccctgccaaccacagctgtcccaagcagtacttctggtaccggcggaggcggatctggcggcggaggtagcggtggcggaggatctgaattcgacatccagatgacacagagccctagcagcctgtctgccagcgtgggagacagagtgaccatcacatgcaaggccagcgaccacatcaacaactggctggcctggtatcagcagaagcctggacaggcccctaagctgctgatctacggcgctaccacactggaaacaggcgtgcccagcagattttctggcagcggctctggcaccgactacaccctgacaatatccagcctccagcctgaggacttcgccacctactactgtcagcagagctggaacaccccttggacattcggccagggcaccaagctggaaatcaagagaggcggaggcggaagtggaggcggaggatctggcggcggaggctctcaagttcagcttcaacagcctggcgctgagctggtcaaacctggcgcttctgtgaagatgagctgcaaagccagcggctacgccttcagcagctactggatcaactggatgaagcagaaacccggccagggactcgaatggatcggccaaatctatcccggcgacggcgacaccaactacaacggcaagttcaagggcagagccacactgaccgccgatacctctagcagcacagcctacatgcagctgagcagcctgaccagcgaagatagcgccgtgtacttctgtgcccggtccatcacaacagtcgtgggctgcgctatggactattggggccagggaacaagcgtgaccgtgtctagtacgcgtgaggacctgaagaacgtgttcccacctgaggtggccgtgttcgagcctagcgaggccgagatcagccacacccagaaagccaccctcgtgtgcctggctaccggcttctaccccgaccatgtggaactgtcttggtgggtcaacggcaaagaggtgcacagcggcgtgtgtaccgacccccagccactgaaagaacagcccgccctgaacgacagccggtactgcctgagcagcagactgagagtgtccgccaccttctggcagaacccccggaaccacttcagatgccaggtgcagttctacggcctgagcgagaacgacgagtggacccaggacagagccaagcccgtgacccagatcgtgtctgccgaagcctggggcagagccgattgcggctttaccagcgagagctaccagcagggcgtgctgagcgccaccaacctgagcgtgatcggcttcagaatcctgctgctgaaagtggccggctttaacctgctgatgaccctgcggctgtggtccagc

SEQ ID NO: 18022 - DNA, 2196 bp, synthetic construct
  source 1..2196: mol_type = other DNA
atggccttaccagtgaccgccttgctcctgccgctggccttgctgctccacgccgccaggccgctcgagatccagaaccctgatcctgccgtgtaccagctgcgggatagcaagagcagcgacaagagcgtgtgtctgttcaccgacttcgacagccagaccaacgtgtcccagagcaaggactccgacgtgtacatcaccgataagtgcgtgctggacatgcggagcatggacttcaagagcaactccgccgtggcctggtccaacaagtccgatttcgcctgcgccaacgccttcaacaacagcattatccccgaggacacattcttcccaagccccgagagcagctgcgacgtgaagctggtggaaaagagcttcgagacagacaccaacctgaacttccagatcctgtacgagatcctgctgggcaaggccaccctgtacgccgtgctggtgtctgccctggtgctgatggctatggtcaagcggaaggacagccggggaagggccaagcgatctggatctggagcaacaaacttctcactactcaaacaagcaggtgacgtggaggagaatcccgggcctactagcatggccttaccagtgaccgccttgctcctgccgctggccttgctgctccacgccgccaggccgttcgaaatgggcagctgggaagagttcgagctgagactgaacgccatcgaggaacggctgtatgccctcggaggatctgaagccgagctggcctacttcgagtacgtgatcgccgacttcgagggcaacctgcagcggtacaaaggcaagggcaaccctgaagtggaagccctgtacttcgaggccgacgccatcttcgaggaactggtggcctacagacacaacggtaccggcggaggcggatctggcggcggaggtagcggtggcggaggatctgaattcgacatccagatgacacagagccctagcagcctgtctgccagcgtgggagacagagtgaccatcacatgcaaggccagcgaccacatcaacaactggctggcctggtatcagcagaagcctggacaggcccctaagctgctgatctacggcgctaccacactggaaacaggcgtgcccagcagattttctggcagcggctctggcaccgactacaccctgacaatatccagcctccagcctgaggacttcgccacctactactgtcagcagagctggaacaccccttggacattcggccagggcaccaagctggaaatcaagagaggcggaggcggaagtggaggcggaggatctggcggcggaggctctcaagttcagcttcaacagcctggcgctgagctggtcaaacctggcgcttctgtgaagatgagctgcaaagccagcggctacgccttcagcagctactggatcaactggatgaagcagaaacccggccagggactcgaatggatcggccaaatctatcccggcgacggcgacaccaactacaacggcaagttcaagggcagagccacactgaccgccgatacctctagcagcacagcctacatgcagctgagcagcctgaccagcgaagatagcgccgtgtacttctgtgcccggtccatcacaacagtcgtgggctgcgctatggactattggggccagggaacaagcgtgaccgtgtctagtacgcgtgaggacctgaagaacgtgttcccacctgaggtggccgtgttcgagcctagcgaggccgagatcagccacacccagaaagccaccctcgtgtgcctggctaccggcttctaccccgaccatgtggaactgtcttggtgggtcaacggcaaagaggtgcacagcggcgtgtgtaccgacccccagccactgaaagaacagcccgccctgaacgacagccggtactgcctgagcagcagactgagagtgtccgccaccttctggcagaacccccggaaccacttcagatgccaggtgcagttctacggcctgagcgagaacgacgagtggacccaggacagagccaagcccgtgacccagatcgtgtctgccgaagcctggggcagagccgattgcggctttaccagcgagagctaccagcagggcgtgctgagcgccaccaacctgagcgtgatcggcttcagaatcctgctgctgaaagtggccggctttaacctgctgatgaccctgcggctgtggtccagc

SEQ ID NO: 18023 - DNA, 2697 bp, synthetic construct
  source 1..2697: mol_type = other DNA
atggccttaccagtgaccgccttgctcctgccgctggccttgctgctccacgccgccaggccgctcgaggaggaggacctgaagaacgtgttcccacctgaggtggccgtgttcgagcctagcgaggccgagatcagccacacccagaaagccaccctcgtgtgcctggctaccggcttctaccccgaccatgtggaactgtcttggtgggtcaacggcaaagaggtgcacagcggcgtgtgtaccgacccccagccactgaaagaacagcccgccctgaacgacagccggtactgcctgagcagcagactgagagtgtccgccaccttctggcagaacccccggaaccacttcagatgccaggtgcagttctacggcctgagcgagaacgacgagtggacccaggacagagccaagcccgtgacccagatcgtgtctgccgaagcctggggcagagccgattgcggctttaccagcgagagctaccagcagggcgtgctgagcgccaccaacctgagcgtgatcggcttcagaatcctgctgctgaaagtggccggctttaacctgctgatgaccctgcggctgtggtccagcagggccaagcgatctggatctggagcaacaaacttctcactactcaaacaagcaggtgacgtggaggagaatcccgggcctactagcatggccttaccagtgaccgccttgctcctgccgctggccttgctgctccacgccgccaggccggacatccagatgacacagactacatcctccctgtctgcctctctgggagacagagtcaccatcagttgcagggcaagtcaggacattagtaaatatttaaattggtatcagcagaaaccagatggaactgttaaactcctgatctaccatacatcaagattacactcaggagtcccatcaaggttcagtggcagtgggtctggaacagattattctctcaccattagcaacctggagcaagaagatattgccacttacttttgccaacagggtaatacgcttccgtacacgttcggaggggggaccaagctggagatcacaggtggcggtggctcgggcggtggtgggtcgggtggcggcggatctgaggtgaaactgcaggagtcaggacctggcctggtggcgccctcacagagcctgtccgtcacatgcactgtctcaggggtctcattacccgactatggtgtaagctggattcgccagcctccacgaaagggtctggagtggctgggagtaatatggggtagtgaaaccacatactataattcagctctcaaatccagactgaccatcatcaaggacaactccaagagccaagttttcttaaaaatgaacagtctgcaaactgatgacacagccatttactactgtgccaaacattattactacggtggtagctatgctatggactactggggtcaaggaacctcagtcaccgtctcctcaacgcgtggacagcctaaggccaatcctaccgtgacactgttccctccaagcagcgaagaactccaggccaacaaggccacacttgtgtgcctgatctccgacttctaccctggggctgtgacagtggcttggaaggccgatggatctcctgtgaaagccggcgtggaaaccaccaagccatccaagcagagcaacaacaaatacgccgccagctcctacctgagcctgacacctgagcagtggaagtcccacagatcctacagctgccaagtgacccacgaaggcagcaccgtggaaaagacagtggcccctacagagtgcagccccatcaagaccgatgtgattacaatggaccccaaggacaactgctccaaggacgccaacgataccctgctgctccagctgaccaacaccagcgcctactacatgtacttgttgctgctgctgaagtccgtggtgtacttcgccatcatcacatgctgcctgctgcggagaaccgccttctgctgcaacggcgagaagtctcgcgccaagagaagcggatctggcgtgaagcagaccctgaatttcgacctgctgaagctggctggcgacgtggaatccaacccaggcccttctagaggccatatgaccgagtacaagcccacggtgcgcctcgccacccgcgacgacgtccccagggccgtacgcaccctcgccgccgcgttcgccgactaccccgccacgcgccacaccgtcgatccggaccgccacatcgagcgggtcaccgagctgcaagaactcttcctcacgcgcgtcgggctcgacatcggcaaggtgtgggtcgcggacgacggcgccgcggtggcggtctggaccacgccggagagcgtcgaagcgggggcggtgttcgccgagatcggcccgcgcatggccgagttgagcggttcccggctggccgcgcagcaacagatggaaggcctcctggcgccgcaccggcccaaggagcccgcgtggttcctggccaccgtcggcgtctcgcccgaccaccagggcaagggtctgggcagcgccgtcgtgctccccggagtggaggcggccgagcgcgccggggtgcccgccttcctggagacctccgcgccccgcaacctccccttctacgagcggctcggcttcaccgtcaccgccgacgtcgaggtgcccgaaggaccgcgcacctggtgcatgacccgcaagcccggtgcctga

SEQ ID NO: 18024 - DNA, 2700 bp, synthetic construct
  source 1..2700: mol_type = other DNA
atggccttaccagtgaccgccttgctcctgccgctggccttgctgctccacgccgccaggccgctcgaggaggaggacctgaagaacgtgttcccacctgaggtggccgtgttcgagcctagcgaggccgagatcagccacacccagaaagccaccctcgtgtgcctggctaccggcttctaccccgaccatgtggaactgtcttggtgggtcaacggcaaagaggtgcacagcggcgtgtgtaccgacccccagccactgaaagaacagcccgccctgaacgacagccggtactgcctgagcagcagactgagagtgtccgccaccttctggcagaacccccggaaccacttcagatgccaggtgcagttctacggcctgagcgagaacgacgagtggacccaggacagagccaagcccgtgacccagatcgtgtctgccgaagcctggggcagagccgattgcggctttaccagcgagagctaccagcagggcgtgctgagcgccaccaacctgagcgtgatcggcttcagaatcctgctgctgaaagtggccggctttaacctgctgatgaccctgcggctgtggtccagcagggccaagcgatctggatctggagcaacaaacttctcactactcaaacaagcaggtgacgtggaggagaatcccgggcctactagcaccatggccttaccagtgaccgccttgctcctgccgctggccttgctgctccacgccgccaggccggagatcgtgatgacccagagccctgccaccctgtctctgagccctggcgaaagagccaccctgagctgtagagccagccaggacatcagcaagtacctgaactggtatcagcagaagcccggccaggcccccagactgctgatctaccacaccagcagactgcacagcggcatccccgccagattttctggctctggcagcggcaccgactacaccctgacaatcagcagcctccagcccgaggacttcgccgtgtacttctgtcagcaaggcaacaccctgccctacaccttcggccagggcaccaagctggaaatcaagggcggaggcggaagtggaggcggaggatctggcggcggaggctctcaggtgcaactccaggaatctggccctggcctcgtgaagcccagcgagacactgagcctgacctgtaccgtgtccggcgtgtccctgcctgactatggcgtgtcctggatcagacagccccctggcaagggcctggaatggatcggagtgatttggggcagcgaaaccacctactacaacagctccctgaagtccagagtgaccatctccaaggacaactccaagaaccaggtgtccctgaagctgagcagcgtgacagccgccgacaccgccgtgtattactgcgccaagcactactactacggcggcagctacgctatggactactggggccagggaaccctcgtgaccgtgtctagtacgcgtggacagcctaaggccaatcctaccgtgacactgttccctccaagcagcgaagaactccaggccaacaaggccacacttgtgtgcctgatctccgacttctaccctggggctgtgacagtggcttggaaggccgatggatctcctgtgaaagccggcgtggaaaccaccaagccatccaagcagagcaacaacaaatacgccgccagctcctacctgagcctgacacctgagcagtggaagtcccacagatcctacagctgccaagtgacccacgaaggcagcaccgtggaaaagacagtggcccctacagagtgcagccccatcaagaccgatgtgattacaatggaccccaaggacaactgctccaaggacgccaacgataccctgctgctccagctgaccaacaccagcgcctactacatgtacttgttgctgctgctgaagtccgtggtgtacttcgccatcatcacatgctgcctgctgcggagaaccgccttctgctgcaacggcgagaagtctcgcgccaagagaagcggatctggcgtgaagcagaccctgaatttcgacctgctgaagctggctggcgacgtggaatccaacccaggcccttctagaggccatatgaccgagtacaagcccacggtgcgcctcgccacccgcgacgacgtccccagggccgtacgcaccctcgccgccgcgttcgccgactaccccgccacgcgccacaccgtcgatccggaccgccacatcgagcgggtcaccgagctgcaagaactcttcctcacgcgcgtcgggctcgacatcggcaaggtgtgggtcgcggacgacggcgccgcggtggcggtctggaccacgccggagagcgtcgaagcgggggcggtgttcgccgagatcggcccgcgcatggccgagttgagcggttcccggctggccgcgcagcaacagatggaaggcctcctggcgccgcaccggcccaaggagcccgcgtggttcctggccaccgtcggcgtctcgcccgaccaccagggcaagggtctgggcagcgccgtcgtgctccccggagtggaggcggccgagcgcgccggggtgcccgccttcctggagacctccgcgccccgcaacctccccttctacgagcggctcggcttcaccgtcaccgccgacgtcgaggtgcccgaaggaccgcgcacctggtgcatgacccgcaagcccggtgcctga

SEQ ID NO: 18025 - DNA, 2703 bp, synthetic construct
  source 1..2703: mol_type = other DNA
atggccttaccagtgaccgccttgctcctgccgctggccttgctgctccacgccgccaggccgctcgaggaggaggacctgaagaacgtgttcccacctgaggtggccgtgttcgagcctagcgaggccgagatcagccacacccagaaagccaccctcgtgtgcctggctaccggcttctaccccgaccatgtggaactgtcttggtgggtcaacggcaaagaggtgcacagcggcgtgtgtaccgacccccagccactgaaagaacagcccgccctgaacgacagccggtactgcctgagcagcagactgagagtgtccgccaccttctggcagaacccccggaaccacttcagatgccaggtgcagttctacggcctgagcgagaacgacgagtggacccaggacagagccaagcccgtgacccagatcgtgtctgccgaagcctggggcagagccgattgcggctttaccagcgagagctaccagcagggcgtgctgagcgccaccaacctgagcgtgatcggcttcagaatcctgctgctgaaagtggccggctttaacctgctgatgaccctgcggctgtggtccagcagggccaagcgatctggatctggagcaacaaacttctcactactcaaacaagcaggtgacgtggaggagaatcccgggcctactagcaccatggccttaccagtgaccgccttgctcctgccgctggccttgctgctccacgccgccaggccggacgagatcgtgctgacacagagccccgccaccctgtcactgtctccaggcgaaagagccaccctgagctgtagcgccagcagcagcgtgtcctacatgcactggtatcagcagaagcccggccaggcccccagactgctgatctacgataccagcaagctggcctccggcatccccgccagattttctggcagcggctccggcaccgacttcaccctgacaatcagcagcctggaacccgaggacgtggccgtgtactactgttttcaaggcagcgtgtaccccttcaccttcggccagggcaccaagctggaaatcaagagaggtggcggtggctcgggcggtggtgggtcgggtggcggcggatctcaggtgcagctccaggaatctggccctggcctcgtgaagcctagccagaccctgagcctgacctgtaccgtgtctggcggcagcatcagcacaagcggcatgggcgtgggctggatcagacagcaccctggcaagggcctggaatggatcggccacatttggtgggacgacgacaagcggtacaaccccgccctgaagtccagagtgaccatcagcgtggacaccagcaagaaccagttcagcctgaagctgagcagcgtgacagccgccgataccgccgtgtattattgcgcccggatggaactgtggtcctactacttcgactactggggccagggaaccctcgtgaccgtgtctagtacgcgtggacagcctaaggccaatcctaccgtgacactgttccctccaagcagcgaagaactccaggccaacaaggccacacttgtgtgcctgatctccgacttctaccctggggctgtgacagtggcttggaaggccgatggatctcctgtgaaagccggcgtggaaaccaccaagccatccaagcagagcaacaacaaatacgccgccagctcctacctgagcctgacacctgagcagtggaagtcccacagatcctacagctgccaagtgacccacgaaggcagcaccgtggaaaagacagtggcccctacagagtgcagccccatcaagaccgatgtgattacaatggaccccaaggacaactgctccaaggacgccaacgataccctgctgctccagctgaccaacaccagcgcctactacatgtacttgttgctgctgctgaagtccgtggtgtacttcgccatcatcacatgctgcctgctgcggagaaccgccttctgctgcaacggcgagaagtctcgcgccaagagaagcggatctggcgtgaagcagaccctgaatttcgacctgctgaagctggctggcgacgtggaatccaacccaggcccttctagaggccatatgaccgagtacaagcccacggtgcgcctcgccacccgcgacgacgtccccagggccgtacgcaccctcgccgccgcgttcgccgactaccccgccacgcgccacaccgtcgatccggaccgccacatcgagcgggtcaccgagctgcaagaactcttcctcacgcgcgtcgggctcgacatcggcaaggtgtgggtcgcggacgacggcgccgcggtggcggtctggaccacgccggagagcgtcgaagcgggggcggtgttcgccgagatcggcccgcgcatggccgagttgagcggttcccggctggccgcgcagcaacagatggaaggcctcctggcgccgcaccggcccaaggagcccgcgtggttcctggccaccgtcggcgtctcgcccgaccaccagggcaagggtctgggcagcgccgtcgtgctccccggagtggaggcggccgagcgcgccggggtgcccgccttcctggagacctccgcgccccgcaacctccccttctacgagcggctcggcttcaccgtcaccgccgacgtcgaggtgcccgaaggaccgcgcacctggtgcatgacccgcaagcccggtgcctga

SEQ ID NO: 18026 - DNA, 2691 bp, synthetic construct
  source 1..2691: mol_type = other DNA
atggccttaccagtgaccgccttgctcctgccgctggccttgctgctccacgccgccaggccgctcgaggaggaggacctgaagaacgtgttcccacctgaggtggccgtgttcgagcctagcgaggccgagatcagccacacccagaaagccaccctcgtgtgcctggctaccggcttctaccccgaccatgtggaactgtcttggtgggtcaacggcaaagaggtgcacagcggcgtgtgtaccgacccccagccactgaaagaacagcccgccctgaacgacagccggtactgcctgagcagcagactgagagtgtccgccaccttctggcagaacccccggaaccacttcagatgccaggtgcagttctacggcctgagcgagaacgacgagtggacccaggacagagccaagcccgtgacccagatcgtgtctgccgaagcctggggcagagccgattgcggctttaccagcgagagctaccagcagggcgtgctgagcgccaccaacctgagcgtgatcggcttcagaatcctgctgctgaaagtggccggctttaacctgctgatgaccctgcggctgtggtccagcagggccaagcgatctggatctggagcaacaaacttctcactactcaaacaagcaggtgacgtggaggagaatcccgggcctactagcatggccttaccagtgaccgccttgctcctgccgctggccttgctgctccacgccgccaggccggacatccagatgacacagagccctagcagcctgtctgccagcgtgggagacagagtgaccatcacctgtagagccagccaggacatcagcaactacctgaactggtatcagcagaagcccggcaaggcccctaagctgctgatctactacaccagcagactgcacagcggcgtgcccagcagattttctggctctggcagcggcaccgacttcaccctgacaatatctagcctccagcctgaggacttcgccacctactattgccagcagggcaacaccctgccttacacatttggacagggcaccaaggtggaaatcaagagaggcggaggcggaagtggaggcggaggatctggcggcggaggctctgaagtgcagctggttgaatcaggtggcggcctggttcaacctggcggatctctgagactgagctgtgccgccagcggcttcaccttcagcgactactttatgagctgggtccgacaggcccctggcaaaggacttgaatgggtcgccaccatcagcaatggcggcacctacacttactaccccgacagcgtgaagggcagattcaccatctccagagacaacagcaagaacaccctgtacctccagatgaactccctgagagccgaggacaccgccgtgtactactgcgccagattcgacggctacatcttcgactattggggccagggcaccctggtcacagtctcttctacgcgtggacagcctaaggccaatcctaccgtgacactgttccctccaagcagcgaagaactccaggccaacaaggccacacttgtgtgcctgatctccgacttctaccctggggctgtgacagtggcttggaaggccgatggatctcctgtgaaagccggcgtggaaaccaccaagccatccaagcagagcaacaacaaatacgccgccagctcctacctgagcctgacacctgagcagtggaagtcccacagatcctacagctgccaagtgacccacgaaggcagcaccgtggaaaagacagtggcccctacagagtgcagccccatcaagaccgatgtgattacaatggaccccaaggacaactgctccaaggacgccaacgataccctgctgctccagctgaccaacaccagcgcctactacatgtacttgttgctgctgctgaagtccgtggtgtacttcgccatcatcacatgctgcctgctgcggagaaccgccttctgctgcaacggcgagaagtctcgcgccaagagaagcggatctggcgtgaagcagaccctgaatttcgacctgctgaagctggctggcgacgtggaatccaacccaggcccttctagaggccatatgaccgagtacaagcccacggtgcgcctcgccacccgcgacgacgtccccagggccgtacgcaccctcgccgccgcgttcgccgactaccccgccacgcgccacaccgtcgatccggaccgccacatcgagcgggtcaccgagctgcaagaactcttcctcacgcgcgtcgggctcgacatcggcaaggtgtgggtcgcggacgacggcgccgcggtggcggtctggaccacgccggagagcgtcgaagcgggggcggtgttcgccgagatcggcccgcgcatggccgagttgagcggttcccggctggccgcgcagcaacagatggaaggcctcctggcgccgcaccggcccaaggagcccgcgtggttcctggccaccgtcggcgtctcgcccgaccaccagggcaagggtctgggcagcgccgtcgtgctccccggagtggaggcggccgagcgcgccggggtgcccgccttcctggagacctccgcgccccgcaacctccccttctacgagcggctcggcttcaccgtcaccgccgacgtcgaggtgcccgaaggaccgcgcacctggtgcatgacccgcaagcccggtgcctga

SEQ ID NO: 18027 - DNA, 2703 bp, synthetic construct
  source 1..2703: mol_type = other DNA
atggccttaccagtgaccgccttgctcctgccgctggccttgctgctccacgccgccaggccgctcgaggaggaggacctgaagaacgtgttcccacctgaggtggccgtgttcgagcctagcgaggccgagatcagccacacccagaaagccaccctcgtgtgcctggctaccggcttctaccccgaccatgtggaactgtcttggtgggtcaacggcaaagaggtgcacagcggcgtgtgtaccgacccccagccactgaaagaacagcccgccctgaacgacagccggtactgcctgagcagcagactgagagtgtccgccaccttctggcagaacccccggaaccacttcagatgccaggtgcagttctacggcctgagcgagaacgacgagtggacccaggacagagccaagcccgtgacccagatcgtgtctgccgaagcctggggcagagccgattgcggctttaccagcgagagctaccagcagggcgtgctgagcgccaccaacctgagcgtgatcggcttcagaatcctgctgctgaaagtggccggctttaacctgctgatgaccctgcggctgtggtccagcagggccaagcgatctggatctggagcaacaaacttctcactactcaaacaagcaggtgacgtggaggagaatcccgggcctactagcatggccttaccagtgaccgccttgctcctgccgctggccttgctgctccacgccgccaggccggacatccagatgacacagagccctagcagcctgtctgccagcgtgggagacagagtgaccatcacatgcaaggccagcgaccacatcaacaactggctggcctggtatcagcagaagcctggacaggcccctaagctgctgatctacggcgctaccacactggaaacaggcgtgcccagcagattttctggcagcggctctggcaccgactacaccctgacaatatccagcctccagcctgaggacttcgccacctactactgtcagcagagctggaacaccccttggacattcggccagggcaccaagctggaaatcaagagaggcggaggcggaagtggaggcggaggatctggcggcggaggctctcaagttcagcttcaacagcctggcgctgagctggtcaaacctggcgcttctgtgaagatgagctgcaaagccagcggctacgccttcagcagctactggatcaactggatgaagcagaaacccggccagggactcgaatggatcggccaaatctatcccggcgacggcgacaccaactacaacggcaagttcaagggcagagccacactgaccgccgatacctctagcagcacagcctacatgcagctgagcagcctgaccagcgaagatagcgccgtgtacttctgtgcccggtccatcacaacagtcgtgggctgcgctatggactattggggccagggaacaagcgtgaccgtgtctagtacgcgtggacagcctaaggccaatcctaccgtgacactgttccctccaagcagcgaagaactccaggccaacaaggccacacttgtgtgcctgatctccgacttctaccctggggctgtgacagtggcttggaaggccgatggatctcctgtgaaagccggcgtggaaaccaccaagccatccaagcagagcaacaacaaatacgccgccagctcctacctgagcctgacacctgagcagtggaagtcccacagatcctacagctgccaagtgacccacgaaggcagcaccgtggaaaagacagtggcccctacagagtgcagccccatcaagaccgatgtgattacaatggaccccaaggacaactgctccaaggacgccaacgataccctgctgctccagctgaccaacaccagcgcctactacatgtacttgttgctgctgctgaagtccgtggtgtacttcgccatcatcacatgctgcctgctgcggagaaccgccttctgctgcaacggcgagaagtctcgcgccaagagaagcggatctggcgtgaagcagaccctgaatttcgacctgctgaagctggctggcgacgtggaatccaacccaggcccttctagaggccatatgaccgagtacaagcccacggtgcgcctcgccacccgcgacgacgtccccagggccgtacgcaccctcgccgccgcgttcgccgactaccccgccacgcgccacaccgtcgatccggaccgccacatcgagcgggtcaccgagctgcaagaactcttcctcacgcgcgtcgggctcgacatcggcaaggtgtgggtcgcggacgacggcgccgcggtggcggtctggaccacgccggagagcgtcgaagcgggggcggtgttcgccgagatcggcccgcgcatggccgagttgagcggttcccggctggccgcgcagcaacagatggaaggcctcctggcgccgcaccggcccaaggagcccgcgtggttcctggccaccgtcggcgtctcgcccgaccaccagggcaagggtctgggcagcgccgtcgtgctccccggagtggaggcggccgagcgcgccggggtgcccgccttcctggagacctccgcgccccgcaacctccccttctacgagcggctcggcttcaccgtcaccgccgacgtcgaggtgcccgaaggaccgcgcacctggtgcatgacccgcaagcccggtgcctga

SEQ ID NO: 18028 - DNA, 2709 bp, synthetic construct
  source 1..2709: mol_type = other DNA
atggccttaccagtgaccgccttgctcctgccgctggccttgctgctccacgccgccaggccgctcgaggaggaggacctgaagaacgtgttcccacctgaggtggccgtgttcgagcctagcgaggccgagatcagccacacccagaaagccaccctcgtgtgcctggctaccggcttctaccccgaccatgtggaactgtcttggtgggtcaacggcaaagaggtgcacagcggcgtgtgtaccgacccccagccactgaaagaacagcccgccctgaacgacagccggtactgcctgagcagcagactgagagtgtccgccaccttctggcagaacccccggaaccacttcagatgccaggtgcagttctacggcctgagcgagaacgacgagtggacccaggacagagccaagcccgtgacccagatcgtgtctgccgaagcctggggcagagccgattgcggctttaccagcgagagctaccagcagggcgtgctgagcgccaccaacctgagcgtgatcggcttcagaatcctgctgctgaaagtggccggctttaacctgctgatgaccctgcggctgtggtccagcagggccaagcgatctggatctggagcaacaaacttctcactactcaaacaagcaggtgacgtggaggagaatcccgggcctactagcatggccttaccagtgaccgccttgctcctgccgctggccttgctgctccacgccgccaggccgcagatcgtgctgtctcagtctcctgccatcctgagcgcttccccaggcgagaaagtgaccatgacctgtagagccagcagcagcgtgtcctacatgcactggtatcagcagaagcccggcagcagccctaagccttggatctacgccaccagcaatctggcctctggcgtgccagccagattttctggctctggcagcggcaccagctacagcttcacaatcagcagagtggaagccgaggacgccgccacctactattgtcagcagtggaccttcaatcctcctaccttcggcggaggcacccggctggaaatcaaaagaacagtggctgctggcggaggcggaagtggaggcggaggatctggcggcggaggctctcaggcttatctgcaacagagcggagccgaactcgtcagacctggcgcttctgtgaagatgagctgcaaggccagcggctacaccttcaccagctataatatgcactgggtcaagcagacccctcggcagggactcgaatggatcggcggaatctatcccggcaacggcgacacctcctacaaccagaagttcaagggcaaagccacactgaccgtgggcaagagcagcagcaccgcctatatgcagctcagcagcctgaccagcgaggacagcgccgtgtacttctgcgccagatacgactacaactacgctatggactactggggccagggcaccagcgtgacagttagctctgccagcacgcgtggacagcctaaggccaatcctaccgtgacactgttccctccaagcagcgaagaactccaggccaacaaggccacacttgtgtgcctgatctccgacttctaccctggggctgtgacagtggcttggaaggccgatggatctcctgtgaaagccggcgtggaaaccaccaagccatccaagcagagcaacaacaaatacgccgccagctcctacctgagcctgacacctgagcagtggaagtcccacagatcctacagctgccaagtgacccacgaaggcagcaccgtggaaaagacagtggcccctacagagtgcagccccatcaagaccgatgtgattacaatggaccccaaggacaactgctccaaggacgccaacgataccctgctgctccagctgaccaacaccagcgcctactacatgtacttgttgctgctgctgaagtccgtggtgtacttcgccatcatcacatgctgcctgctgcggagaaccgccttctgctgcaacggcgagaagtctcgcgccaagagaagcggatctggcgtgaagcagaccctgaatttcgacctgctgaagctggctggcgacgtggaatccaacccaggcccttctagaggccatatgaccgagtacaagcccacggtgcgcctcgccacccgcgacgacgtccccagggccgtacgcaccctcgccgccgcgttcgccgactaccccgccacgcgccacaccgtcgatccggaccgccacatcgagcgggtcaccgagctgcaagaactcttcctcacgcgcgtcgggctcgacatcggcaaggtgtgggtcgcggacgacggcgccgcggtggcggtctggaccacgccggagagcgtcgaagcgggggcggtgttcgccgagatcggcccgcgcatggccgagttgagcggttcccggctggccgcgcagcaacagatggaaggcctcctggcgccgcaccggcccaaggagcccgcgtggttcctggccaccgtcggcgtctcgcccgaccaccagggcaagggtctgggcagcgccgtcgtgctccccggagtggaggcggccgagcgcgccggggtgcccgccttcctggagacctccgcgccccgcaacctccccttctacgagcggctcggcttcaccgtcaccgccgacgtcgaggtgcccgaaggaccgcgcacctggtgcatgacccgcaagcccggtgcctga

SEQ ID NO: 18029 - DNA, 2703 bp, synthetic construct
  source 1..2703: mol_type = other DNA
atggccttaccagtgaccgccttgctcctgccgctggccttgctgctccacgccgccaggccgctcgaggaggaggacctgaagaacgtgttcccacctgaggtggccgtgttcgagcctagcgaggccgagatcagccacacccagaaagccaccctcgtgtgcctggctaccggcttctaccccgaccatgtggaactgtcttggtgggtcaacggcaaagaggtgcacagcggcgtgtgtaccgacccccagccactgaaagaacagcccgccctgaacgacagccggtactgcctgagcagcagactgagagtgtccgccaccttctggcagaacccccggaaccacttcagatgccaggtgcagttctacggcctgagcgagaacgacgagtggacccaggacagagccaagcccgtgacccagatcgtgtctgccgaagcctggggcagagccgattgcggctttaccagcgagagctaccagcagggcgtgctgagcgccaccaacctgagcgtgatcggcttcagaatcctgctgctgaaagtggccggctttaacctgctgatgaccctgcggctgtggtccagcagggccaagcgatctggatctggagcaacaaacttctcactactcaaacaagcaggtgacgtggaggagaatcccgggcctactagcatggccttaccagtgaccgccttgctcctgccgctggccttgctgctccacgccgccaggccggagatcgtgctgacacagagccctgccaccctgtctctgagccctggcgaaagagccaccctgagctgtagagccagccagagcgtgtccagctacctggcctggtatcagcagaagcccggccaggctccccggctgctgatctacgatgccagcaatagagccaccggcatccccgccagattttccggctctggcagcggcaccgacttcaccctgaccatcagctccctggaacccgaggacttcgccgtgtactactgccagcagcggagcaactggcccatcacattcggccagggcacccggctggaaatcaaaggcggaggcggaagtggaggcggaggatctggcggcggaggctctgaggtgcagcttgttgagtctggcggaggactggtgcagcccgatagaagcctgagactgtcttgtgccgccagcggcttcaccttccacgattatgccatgcactgggtccgacaggcccctggcaaaggacttgaatgggtgtccaccatctcttggaacagcggcacaatcggctacgccgactctgtgaagggcagattcaccatcagccgggacaacgccaagaacagcctgtacctccagatgaactccctgagagccgaggacacagccctgtactactgcgccaaggacatccagtacggcaactactactacggcatggacgtgtggggccagggcacaacagtgacagtctcttctacgcgtggacagcctaaggccaatcctaccgtgacactgttccctccaagcagcgaagaactccaggccaacaaggccacacttgtgtgcctgatctccgacttctaccctggggctgtgacagtggcttggaaggccgatggatctcctgtgaaagccggcgtggaaaccaccaagccatccaagcagagcaacaacaaatacgccgccagctcctacctgagcctgacacctgagcagtggaagtcccacagatcctacagctgccaagtgacccacgaaggcagcaccgtggaaaagacagtggcccctacagagtgcagccccatcaagaccgatgtgattacaatggaccccaaggacaactgctccaaggacgccaacgataccctgctgctccagctgaccaacaccagcgcctactacatgtacttgttgctgctgctgaagtccgtggtgtacttcgccatcatcacatgctgcctgctgcggagaaccgccttctgctgcaacggcgagaagtctcgcgccaagagaagcggatctggcgtgaagcagaccctgaatttcgacctgctgaagctggctggcgacgtggaatccaacccaggcccttctagaggccatatgaccgagtacaagcccacggtgcgcctcgccacccgcgacgacgtccccagggccgtacgcaccctcgccgccgcgttcgccgactaccccgccacgcgccacaccgtcgatccggaccgccacatcgagcgggtcaccgagctgcaagaactcttcctcacgcgcgtcgggctcgacatcggcaaggtgtgggtcgcggacgacggcgccgcggtggcggtctggaccacgccggagagcgtcgaagcgggggcggtgttcgccgagatcggcccgcgcatggccgagttgagcggttcccggctggccgcgcagcaacagatggaaggcctcctggcgccgcaccggcccaaggagcccgcgtggttcctggccaccgtcggcgtctcgcccgaccaccagggcaagggtctgggcagcgccgtcgtgctccccggagtggaggcggccgagcgcgccggggtgcccgccttcctggagacctccgcgccccgcaacctccccttctacgagcggctcggcttcaccgtcaccgccgacgtcgaggtgcccgaaggaccgcgcacctggtgcatgacccgcaagcccggtgcctga

SEQ ID NO: 18030 - DNA, 2697 bp, synthetic construct
  source 1..2697: mol_type = other DNA
atggccttaccagtgaccgccttgctcctgccgctggccttgctgctccacgccgccaggccgctcgaggaggaggacctgaagaacgtgttcccacctgaggtggccgtgttcgagcctagcgaggccgagatcagccacacccagaaagccaccctcgtgtgcctggctaccggcttctaccccgaccatgtggaactgtcttggtgggtcaacggcaaagaggtgcacagcggcgtgtgtaccgacccccagccactgaaagaacagcccgccctgaacgacagccggtactgcctgagcagcagactgagagtgtccgccaccttctggcagaacccccggaaccacttcagatgccaggtgcagttctacggcctgagcgagaacgacgagtggacccaggacagagccaagcccgtgacccagatcgtgtctgccgaagcctggggcagagccgattgcggctttaccagcgagagctaccagcagggcgtgctgagcgccaccaacctgagcgtgatcggcttcagaatcctgctgctgaaagtggccggctttaacctgctgatgaccctgcggctgtggtccagcagggccaagcgatctggatctggagcaacaaacttctcactactcaaacaagcaggtgacgtggaggagaatcccgggcctactagcatggccttaccagtgaccgccttgctcctgccgctggccttgctgctccacgccgccaggccggacatccagatgacccagagccccagcagcctgtctgccagcgtgggcgacagagtgaccatcacctgtagagccagccaggacgtgaacaccgccgtggcctggtatcagcagaagcctggcaaggcccccaagctgctgatctacagcgccagcttcctggaaagcggcgtgcccagcagattcagcggaagcagaagcggcaccgacttcaccctgaccatcagctccctccagcccgaggacttcgccacctactactgccagcagcactacaccacccctcccaccttcggccagaccaaggtggaaatcaagagaggcggaggcggaagtggaggcggaggatctggcggcggaggctctgaagtgcaactggtggaatctggcggcggactggtgcagcctggcggatctctgagactgagctgtgccgccagcggcttcaacatcaaggacacctacatccactgggtgcgccaggcccctggaaagggactggaatgggtggcccggatctaccccaccaacggctacaccagatacgccgacagcgtgaagggccggttcaccatcagcgccgacaccagcaagaataccgcctacctccagatgaacagcctgcgggccgaggataccgccgtgtactactgctcaagatggggaggcgacggcttctacgctatggacgtgtggggccagggcacccttgtgaccgtgtcatctacgcgtggacagcctaaggccaatcctaccgtgacactgttccctccaagcagcgaagaactccaggccaacaaggccacacttgtgtgcctgatctccgacttctaccctggggctgtgacagtggcttggaaggccgatggatctcctgtgaaagccggcgtggaaaccaccaagccatccaagcagagcaacaacaaatacgccgccagctcctacctgagcctgacacctgagcagtggaagtcccacagatcctacagctgccaagtgacccacgaaggcagcaccgtggaaaagacagtggcccctacagagtgcagccccatcaagaccgatgtgattacaatggaccccaaggacaactgctccaaggacgccaacgataccctgctgctccagctgaccaacaccagcgcctactacatgtacttgttgctgctgctgaagtccgtggtgtacttcgccatcatcacatgctgcctgctgcggagaaccgccttctgctgcaacggcgagaagtctcgcgccaagagaagcggatctggcgtgaagcagaccctgaatttcgacctgctgaagctggctggcgacgtggaatccaacccaggcccttctagaggccatatgaccgagtacaagcccacggtgcgcctcgccacccgcgacgacgtccccagggccgtacgcaccctcgccgccgcgttcgccgactaccccgccacgcgccacaccgtcgatccggaccgccacatcgagcgggtcaccgagctgcaagaactcttcctcacgcgcgtcgggctcgacatcggcaaggtgtgggtcgcggacgacggcgccgcggtggcggtctggaccacgccggagagcgtcgaagcgggggcggtgttcgccgagatcggcccgcgcatggccgagttgagcggttcccggctggccgcgcagcaacagatggaaggcctcctggcgccgcaccggcccaaggagcccgcgtggttcctggccaccgtcggcgtctcgcccgaccaccagggcaagggtctgggcagcgccgtcgtgctccccggagtggaggcggccgagcgcgccggggtgcccgccttcctggagacctccgcgccccgcaacctccccttctacgagcggctcggcttcaccgtcaccgccgacgtcgaggtgcccgaaggaccgcgcacctggtgcatgacccgcaagcccggtgcctga

SEQ ID NO: 18031 - DNA, 2334 bp, synthetic construct
  source 1..2334: mol_type = other DNA
atggccttaccagtgaccgccttgctcctgccgctggccttgctgctccacgccgccaggccgctcgaggaggaggacctgaagaacgtgttcccacctgaggtggccgtgttcgagcctagcgaggccgagatcagccacacccagaaagccaccctcgtgtgcctggctaccggcttctaccccgaccatgtggaactgtcttggtgggtcaacggcaaagaggtgcacagcggcgtgtgtaccgacccccagccactgaaagaacagcccgccctgaacgacagccggtactgcctgagcagcagactgagagtgtccgccaccttctggcagaacccccggaaccacttcagatgccaggtgcagttctacggcctgagcgagaacgacgagtggacccaggacagagccaagcccgtgacccagatcgtgtctgccgaagcctggggcagagccgattgcggctttaccagcgagagctaccagcagggcgtgctgagcgccaccaacctgagcgtgatcggcttcagaatcctgctgctgaaagtggccggctttaacctgctgatgaccctgcggctgtggtccagcagggccaagcgatctggatctggagcaacaaacttctcactactcaaacaagcaggtgacgtggaggagaatcccgggcctactagcatggccctgcccgtgacagccctgctgctgcctctggctctgctgctgcacgccgccagacccgatgaattcgaggtgcaactggtggaaagcggcggaggcctggtgcaggctggcggatctctgagactgagctgtgccgccagcggcatcaccttcagcatcaacacaatgggctggtacagacaggcccctggcaagcagagggaactggtggccctgatctccagcatcggcgacacctactacgccgacagcgtgaagggccggttcaccatcagccgggacaacgccaagaacaccgtgtacctccagatgaacagcctgaagcccgaggacaccgccgtgtactactgcaagcggttcagaacagccgcccagggcaccgattattggggccagggaacacaagtgaccgtgtcctctacgcgtggacagcctaaggccaatcctaccgtgacactgttccctccaagcagcgaagaactccaggccaacaaggccacacttgtgtgcctgatctccgacttctaccctggggctgtgacagtggcttggaaggccgatggatctcctgtgaaagccggcgtggaaaccaccaagccatccaagcagagcaacaacaaatacgccgccagctcctacctgagcctgacacctgagcagtggaagtcccacagatcctacagctgccaagtgacccacgaaggcagcaccgtggaaaagacagtggcccctacagagtgcagccccatcaagaccgatgtgattacaatggaccccaaggacaactgctccaaggacgccaacgataccctgctgctccagctgaccaacaccagcgcctactacatgtacttgttgctgctgctgaagtccgtggtgtacttcgccatcatcacatgctgcctgctgcggagaaccgccttctgctgcaacggcgagaagtctcgcgccaagagaagcggatctggcgtgaagcagaccctgaatttcgacctgctgaagctggctggcgacgtggaatccaacccaggcccttctagaggccatatgaccgagtacaagcccacggtgcgcctcgccacccgcgacgacgtccccagggccgtacgcaccctcgccgccgcgttcgccgactaccccgccacgcgccacaccgtcgatccggaccgccacatcgagcgggtcaccgagctgcaagaactcttcctcacgcgcgtcgggctcgacatcggcaaggtgtgggtcgcggacgacggcgccgcggtggcggtctggaccacgccggagagcgtcgaagcgggggcggtgttcgccgagatcggcccgcgcatggccgagttgagcggttcccggctggccgcgcagcaacagatggaaggcctcctggcgccgcaccggcccaaggagcccgcgtggttcctggccaccgtcggcgtctcgcccgaccaccagggcaagggtctgggcagcgccgtcgtgctccccggagtggaggcggccgagcgcgccggggtgcccgccttcctggagacctccgcgccccgcaacctccccttctacgagcggctcggcttcaccgtcaccgccgacgtcgaggtgcccgaaggaccgcgcacctggtgcatgacccgcaagcccggtgcctga

SEQ ID NO: 18032 - DNA, 2334 bp, synthetic construct; identical to SEQ ID NO: 18031
  source 1..2334: mol_type = other DNA

SEQ ID NO: 18033 - DNA, 3129 bp, synthetic construct
  source 1..3129: mol_type = other DNA
atggccttaccagtgaccgccttgctcctgccgctggccttgctgctccacgccgccaggccgctcgaggaggaggacctgaagaacgtgttcccacctgaggtggccgtgttcgagcctagcgaggccgagatcagccacacccagaaagccaccctcgtgtgcctggctaccggcttctaccccgaccatgtggaactgtcttggtgggtcaacggcaaagaggtgcacagcggcgtgtgtaccgacccccagccactgaaagaacagcccgccctgaacgacagccggtactgcctgagcagcagactgagagtgtccgccaccttctggcagaacccccggaaccacttcagatgccaggtgcagttctacggcctgagcgagaacgacgagtggacccaggacagagccaagcccgtgacccagatcgtgtctgccgaagcctggggcagagccgattgcggctttaccagcgagagctaccagcagggcgtgctgagcgccaccaacctgagcgtgatcggcttcagaatcctgctgctgaaagtggccggctttaacctgctgatgaccctgcggctgtggtccagcagggccaagcgatctggatctggagcaacaaacttctcactactcaaacaagcaggtgacgtggaggagaatcccgggcctactagcatggccttaccagtgaccgccttgctcctgccgctggccttgctgctccacgccgccaggccgcaggtccagctcgtcgagtccggcggcggcctcgtccaggccggcgactccgtcaccctctcctgcaccgcctccggccgcaccttctcctcctacgccctcgcctggttccgccagcgccccggcaaggagcgcgagttcgtcgccggcctccgctggggcggccccaccaactacgccgactccgtcaaggaccgcttcaccatctccggcgactccgccaagcacaccatgtacctccagatgaactccctcaagcccgaggacaccgccgtctactactgcggctacaaccccggcggctgggccgtcccctcccagtacgagtacgactcctggggccagggcacccaggtcaccgtctcctccggtaccggcggaggcggatctggcggcggaggtagcggtggcggaggatctgaattcgacatccagatgacacagagccctagcagcctgtctgccagcgtgggagacagagtgaccatcacatgcaaggccagcgaccacatcaacaactggctggcctggtatcagcagaagcctggacaggcccctaagctgctgatctacggcgctaccacactggaaacaggcgtgcccagcagattttctggcagcggctctggcaccgactacaccctgacaatatccagcctccagcctgaggacttcgccacctactactgtcagcagagctggaacaccccttggacattcggccagggcaccaagctggaaatcaagagaggcggaggcggaagtggaggcggaggatctggcggcggaggctctcaagttcagcttcaacagcctggcgctgagctggtcaaacctggcgcttctgtgaagatgagctgcaaagccagcggctacgccttcagcagctactggatcaactggatgaagcagaaacccggccagggactcgaatggatcggccaaatctatcccggcgacggcgacaccaactacaacggcaagttcaagggcagagccacactgaccgccgatacctctagcagcacagcctacatgcagctgagcagcctgaccagcgaagatagcgccgtgtacttctgtgcccggtccatcacaacagtcgtgggctgcgctatggactattggggccagggaacaagcgtgaccgtgtctagtacgcgtggacagcctaaggccaatcctaccgtgacactgttccctccaagcagcgaagaactccaggccaacaaggccacacttgtgtgcctgatctccgacttctaccctggggctgtgacagtggcttggaaggccgatggatctcctgtgaaagccggcgtggaaaccaccaagccatccaagcagagcaacaacaaatacgccgccagctcctacctgagcctgacacctgagcagtggaagtcccacagatcctacagctgccaagtgacccacgaaggcagcaccgtggaaaagacagtggcccctacagagtgcagccccatcaagaccgatgtgattacaatggaccccaaggacaactgctccaaggacgccaacgataccctgctgctccagctgaccaacaccagcgcctactacatgtacttgttgctgctgctgaagtccgtggtgtacttcgccatcatcacatgctgcctgctgcggagaaccgccttctgctgcaacggcgagaagtctcgcgccaagagaagcggatctggcgtgaagcagaccctgaatttcgacctgctgaagctggctggcgacgtggaatccaacccaggcccttctagaggccatatgaccgagtacaagcccacggtgcgcctcgccacccgcgacgacgtccccagggccgtacgcaccctcgccgccgcgttcgccgactaccccgccacgcgccacaccgtcgatccggaccgccacatcgagcgggtcaccgagctgcaagaactcttcctcacgcgcgtcgggctcgacatcggcaaggtgtgggtcgcggacgacggcgccgcggtggcggtctggaccacgccggagagcgtcgaagcgggggcggtgttcgccgagatcggcccgcgcatggccgagttgagcggttcccggctggccgcgcagcaacagatggaaggcctcctggcgccgcaccggcccaaggagcccgcgtggttcctggccaccgtcggcgtctcgcccgaccaccagggcaagggtctgggcagcgccgtcgtgctccccggagtggaggcggccgagcgcgccggggtgcccgccttcctggagacctccgcgccccgcaacctccccttctacgagcggctcggcttcaccgtcaccgccgacgtcgaggtgcccgaaggaccgcgcacctggtgcatgacccgcaagcccggtgcctga

SEQ ID NO: 18034 - DNA, 3516 bp, synthetic construct
  source 1..3516: mol_type = other DNA
atggccttaccagtgaccgccttgctcctgccgctggccttgctgctccacgccgccaggccgctcgaggaggaggacctgaagaacgtgttcccacctgaggtggccgtgttcgagcctagcgaggccgagatcagccacacccagaaagccaccctcgtgtgcctggctaccggcttctaccccgaccatgtggaactgtcttggtgggtcaacggcaaagaggtgcacagcggcgtgtgtaccgacccccagccactgaaagaacagcccgccctgaacgacagccggtactgcctgagcagcagactgagagtgtccgccaccttctggcagaacccccggaaccacttcagatgccaggtgcagttctacggcctgagcgagaacgacgagtggacccaggacagagccaagcccgtgacccagatcgtgtctgccgaagcctggggcagagccgattgcggctttaccagcgagagctaccagcagggcgtgctgagcgccaccaacctgagcgtgatcggcttcagaatcctgctgctgaaagtggccggctttaacctgctgatgaccctgcggctgtggtccagcagggccaagcgatctggatctggagcaacaaacttctcactactcaaacaagcaggtgacgtggaggagaatcccgggcctactagcatggccttaccagtgaccgccttgctcctgccgctggccttgctgctccacgccgccaggccggaggttcagctgcttgagtctggcggaggactggttcaacctggcggaagcctgagactgtcttgtgccgccagcggcttcacctttagcagctacgccatgagctgggtccgacaggctcctggcaaaggactggaatgggtgtccagcatcagcggcagcggcgactacatctactacgccgatagcgtgaagggcagattcaccatcagccgggacatcagcaagaacaccctgtacctccagatgaacagcctgagagccgaggacaccgccgtgtactactgtgccaaagaaggcaccggcgctaacagcagcctggccgattatagaggccagggcacactggtcaccgtgtctagtggcggaggaagcggcggaggatctcaggtccagctcgtcgagtccggcggcggcctcgtccaggccggcgactccgtcaccctctcctgcaccgcctccggccgcaccttctcctcctacgccctcgcctggttccgccagcgccccggcaaggagcgcgagttcgtcgccggcctccgctggggcggccccaccaactacgccgactccgtcaaggaccgcttcaccatctccggcgactccgccaagcacaccatgtacctccagatgaactccctcaagcccgaggacaccgccgtctactactgcggctacaaccccggcggctgggccgtcccctcccagtacgagtacgactcctggggccagggcacccaggtcaccgtctcctccggtaccggcggaggcggatctggcggcggaggtagcggtggcggaggatctgaattcgacatccagatgacacagagccctagcagcctgtctgccagcgtgggagacagagtgaccatcacatgcaaggccagcgaccacatcaacaactggctggcctggtatcagcagaagcctggacaggcccctaagctgctgatctacggcgctaccacactggaaacaggcgtgcccagcagattttctggcagcggctctggcaccgactacaccctgacaatatccagcctccagcctgaggacttcgccacctactactgtcagcagagctggaacaccccttggacattcggccagggcaccaagctggaaatcaagagaggcggaggcggaagtggaggcggaggatctggcggcggaggctctcaagttcagcttcaacagcctggcgctgagctggtcaaacctggcgcttctgtgaagatgagctgcaaagccagcggctacgccttcagcagctactggatcaactggatgaagcagaaacccggccagggactcgaatggatcggccaaatctatcccggcgacggcgacaccaactacaacggcaagttcaagggcagagccacactgaccgccgatacctctagcagcacagcctacatgcagctgagcagcctgaccagcgaagatagcgccgtgtacttctgtgcccggtccatcacaacagtcgtgggctgcgctatggactattggggccagggaacaagcgtgaccgtgtctagtacgcgtggacagcctaaggccaatcctaccgtgacactgttccctccaagcagcgaagaactccaggccaacaaggccacacttgtgtgcctgatctccgacttctaccctggggctgtgacagtggcttggaaggccgatggatctcctgtgaaagccggcgtggaaaccaccaagccatccaagcagagcaacaacaaatacgccgccagctcctacctgagcctgacacctgagcagtggaagtcccacagatcctacagctgccaagtgacccacgaaggcagcaccgtggaaaagacagtggcccctacagagtgcagccccatcaagaccgatgtgattacaatggaccccaaggacaactgctccaaggacgccaacgataccctgctgctccagctgaccaacaccagcgcctactacatgtacttgttgctgctgctgaagtccgtggtgtacttcgccatcatcacatgctgcctgctgcggagaaccgccttctgctgcaacggcgagaagtctcgcgccaagagaagcggatctggcgtgaagcagaccctgaatttcgacctgctgaagctggctggcgacgtggaatccaacccaggcccttctagaggccatatgaccgagtacaagcccacggtgcgcctcgccacccgcgacgacgtccccagggccgtacgcaccctcgccgccgcgttcgccgactaccccgccacgcgccacaccgtcgatccggaccgccacatcgagcgggtcaccgagctgcaagaactcttcctcacgcgcgtcgggctcgacatcggcaaggtgtgggtcgcggacgacggcgccgcggtggcggtctggaccacgccggagagcgtcgaagcgggggcggtgttcgccgagatcggcccgcgcatggccgagttgagcggttcccggctggccgcgcagcaacagatggaaggcctcctggcgccgcaccggcccaaggagcccgcgtggttcctggccaccgtcggcgtctcgcccgaccaccagggcaagggtctgggcagcgccgtcgtgctccccggagtggaggcggccgagcgcgccggggtgcccgccttcctggagacctccgcgccccgcaacctccccttctacgagcggctcggcttcaccgtcaccgccgacgtcgaggtgcccgaaggaccgcgcacctggtgcatgacccgcaagcccggtgcctga

SEQ ID NO: 18035 - DNA, 3510 bp, synthetic construct
  source 1..3510: mol_type = other DNA
atggccttaccagtgaccgccttgctcctgccgctggccttgctgctccacgccgccaggccgctcgaggaggaggacctgaagaacgtgttcccacctgaggtggccgtgttcgagcctagcgaggccgagatcagccacacccagaaagccaccctcgtgtgcctggctaccggcttctaccccgaccatgtggaactgtcttggtgggtcaacggcaaagaggtgcacagcggcgtgtgtaccgacccccagccactgaaagaacagcccgccctgaacgacagccggtactgcctgagcagcagactgagagtgtccgccaccttctggcagaacccccggaaccacttcagatgccaggtgcagttctacggcctgagcgagaacgacgagtggacccaggacagagccaagcccgtgacccagatcgtgtctgccgaagcctggggcagagccgattgcggctttaccagcgagagctaccagcagggcgtgctgagcgccaccaacctgagcgtgatcggcttcagaatcctgctgctgaaagtggccggctttaacctgctgatgaccctgcggctgtggtccagcagggccaagcgatctggatctggagcaacaaacttctcactactcaaacaagcaggtgacgtggaggagaatcccgggcctactagcatggccttaccagtgaccgccttgctcctgccgctggccttgctgctccacgccgccaggccgggcgtgacacagagccccacacacctgattaagaccagaggccagcaggccacactgagatgcagccctatcagcggccacaccagcgtgtactggtatcagcaggctctcggactgggcctccagttcctgctttggtacgacgagggcgaagagagaaaccggggcaacttccctcctcggttttccggcagacagttccccaactacagcagcgagctgaacgtgaacgccctggaactggaagatagcgccctgtacctgtgtgcctcttctcttggtggacctcgcggactggctggactgagaggggatgagcagtttttcggccctggcaccagactgaccgtgctggaaggcggaggaagcggcggaggatctcaggtccagctcgtcgagtccggcggcggcctcgtccaggccggcgactccgtcaccctctcctgcaccgcctccggccgcaccttctcctcctacgccctcgcctggttccgccagcgccccggcaaggagcgcgagttcgtcgccggcctccgctggggcggccccaccaactacgccgactccgtcaaggaccgcttcaccatctccggcgactccgccaagcacaccatgtacctccagatgaactccctcaagcccgaggacaccgccgtctactactgcggctacaaccccggcggctgggccgtcccctcccagtacgagtacgactcctggggccagggcacccaggtcaccgtctcctccggtaccggcggaggcggatctggcggcggaggtagcggtggcggaggatctgaattcgacatccagatgacacagagccctagcagcctgtctgccagcgtgggagacagagtgaccatcacatgcaaggccagcgaccacatcaacaactggctggcctggtatcagcagaagcctggacaggcccctaagctgctgatctacggcgctaccacactggaaacaggcgtgcccagcagattttctggcagcggctctggcaccgactacaccctgacaatatccagcctccagcctgaggacttcgccacctactactgtcagcagagctggaacaccccttggacattcggccagggcaccaagctggaaatcaagagaggcggaggcggaagtggaggcggaggatctggcggcggaggctctcaagttcagcttcaacagcctggcgctgagctggtcaaacctggcgcttctgtgaagatgagctgcaaagccagcggctacgccttcagcagctactggatcaactggatgaagcagaaacccggccagggactcgaatggatcggccaaatctatcccggcgacggcgacaccaactacaacggcaagttcaagggcagagccacactgaccgccgatacctctagcagcacagcctacatgcagctgagcagcctgaccagcgaagatagcgccgtgtacttctgtgcccggtccatcacaacagtcgtgggctgcgctatggactattggggccagggaacaagcgtgaccgtgtctagtacgcgtggacagcctaaggccaatcctaccgtgacactgttccctccaagcagcgaagaactccaggccaacaaggccacacttgtgtgcctgatctccgacttctaccctggggctgtgacagtggcttggaaggccgatggatctcctgtgaaagccggcgtggaaaccaccaagccatccaagcagagcaacaacaaatacgccgccagctcctacctgagcctgacacctgagcagtggaagtcccacagatcctacagctgccaagtgacccacgaaggcagcaccgtggaaaagacagtggcccctacagagtgcagccccatcaagaccgatgtgattacaatggaccccaaggacaactgctccaaggacgccaacgataccctgctgctccagctgaccaacaccagcgcctactacatgtacttgttgctgctgctgaagtccgtggtgtacttcgccatcatcacatgctgcctgctgcggagaaccgccttctgctgcaacggcgagaagtctcgcgccaagagaagcggatctggcgtgaagcagaccctgaatttcgacctgctgaagctggctggcgacgtggaatccaacccaggcccttctagaggccatatgaccgagtacaagcccacggtgcgcctcgccacccgcgacgacgtccccagggccgtacgcaccctcgccgccgcgttcgccgactaccccgccacgcgccacaccgtcgatccggaccgccacatcgagcgggtcaccgagctgcaagaactcttcctcacgcgcgtcgggctcgacatcggcaaggtgtgggtcgcggacgacggcgccgcggtggcggtctggaccacgccggagagcgtcgaagcgggggcggtgttcgccgagatcggcccgcgcatggccgagttgagcggttcccggctggccgcgcagcaacagatggaaggcctcctggcgccgcaccggcccaaggagcccgcgtggttcctggccaccgtcggcgtctcgcccgaccaccagggcaagggtctgggcagcgccgtcgtgctccccggagtggaggcggccgagcgcgccggggtgcccgccttcctggagacctccgcgccccgcaacctccccttctacgagcggctcggcttcaccgtcaccgccgacgtcgaggtgcccgaaggaccgcgcacctggtgcatgacccgcaagcccggtgcctga

SEQ ID NO: 18036 - DNA, 3492 bp, synthetic construct
  source 1..3492: mol_type = other DNA
atggccttaccagtgaccgccttgctcctgccgctggccttgctgctccacgccgccaggccgctcgaggaggaggacctgaagaacgtgttcccacctgaggtggccgtgttcgagcctagcgaggccgagatcagccacacccagaaagccaccctcgtgtgcctggctaccggcttctaccccgaccatgtggaactgtcttggtgggtcaacggcaaagaggtgcacagcggcgtgtgtaccgacccccagccactgaaagaacagcccgccctgaacgacagccggtactgcctgagcagcagactgagagtgtccgccaccttctggcagaacccccggaaccacttcagatgccaggtgcagttctacggcctgagcgagaacgacgagtggacccaggacagagccaagcccgtgacccagatcgtgtctgccgaagcctggggcagagccgattgcggctttaccagcgagagctaccagcagggcgtgctgagcgccaccaacctgagcgtgatcggcttcagaatcctgctgctgaaagtggccggctttaacctgctgatgaccctgcggctgtggtccagcagggccaagcgatctggatctggagcaacaaacttctcactactcaaacaagcaggtgacgtggaggagaatcccgggcctactagcatggccttaccagtgaccgccttgctcctgccgctggccttgctgctccacgccgccaggccgggcgtgacacagagccccacacacctgattaagaccagaggccagcaggccacactgagatgcagccctatcagcggccacaccagcgtgtactggtatcagcaggctctcggactgggcctccagttcctgctttggtacgacgagggcgaagagagaaaccggggcaacttccctcctcggttttccggcagacagttccccaactacagcagcgagctgaacgtgaacgccctggaactggaagatagcgccctgtacctgtgtgcctcttctcttggtggacctcgcggactggctggactgagaggggatgagcagtttttcggccctggcaccagactgaccgtgctggaaggcggaggaagcggcggaggatctggcgtgacacagagccccacacacctgattaagaccagaggccagcaggccacactgagatgcagccctatcagcggccacaccagcgtgtactggtatcagcaggctctcggactgggcctccagttcctgctttggtacgacgagggcgaagagagaaaccggggcaacttccctcctcggttttccggcagacagttccccaactacagcagcgagctgaacgtgaacgccctggaactggaagatagcgccctgtacctgtgtgccagctctctcggcggagatgaactgggagccgatggcaacgagcagttctttggccctggcaccagactgaccgtgctggaaggtaccggcggaggcggatctggcggcggaggtagcggtggcggaggatctgaattcgacatccagatgacacagagccctagcagcctgtctgccagcgtgggagacagagtgaccatcacatgcaaggccagcgaccacatcaacaactggctggcctggtatcagcagaagcctggacaggcccctaagctgctgatctacggcgctaccacactggaaacaggcgtgcccagcagattttctggcagcggctctggcaccgactacaccctgacaatatccagcctccagcctgaggacttcgccacctactactgtcagcagagctggaacaccccttggacattcggccagggcaccaagctggaaatcaagagaggcggaggcggaagtggaggcggaggatctggcggcggaggctctcaagttcagcttcaacagcctggcgctgagctggtcaaacctggcgcttctgtgaagatgagctgcaaagccagcggctacgccttcagcagctactggatcaactggatgaagcagaaacccggccagggactcgaatggatcggccaaatctatcccggcgacggcgacaccaactacaacggcaagttcaagggcagagccacactgaccgccgatacctctagcagcacagcctacatgcagctgagcagcctgaccagcgaagatagcgccgtgtacttctgtgcccggtccatcacaacagtcgtgggctgcgctatggactattggggccagggaacaagcgtgaccgtgtctagtacgcgtggacagcctaaggccaatcctaccgtgacactgttccctccaagcagcgaagaactccaggccaacaaggccacacttgtgtgcctgatctccgacttctaccctggggctgtgacagtggcttggaaggccgatggatctcctgtgaaagccggcgtggaaaccaccaagccatccaagcagagcaacaacaaatacgccgccagctcctacctgagcctgacacctgagcagtggaagtcccacagatcctacagctgccaagtgacccacgaaggcagcaccgtggaaaagacagtggcccctacagagtgcagccccatcaagaccgatgtgattacaatggaccccaaggacaactgctccaaggacgccaacgataccctgctgctccagctgaccaacaccagcgcctactacatgtacttgttgctgctgctgaagtccgtggtgtacttcgccatcatcacatgctgcctgctgcggagaaccgccttctgctgcaacggcgagaagtctcgcgccaagagaagcggatctggcgtgaagcagaccctgaatttcgacctgctgaagctggctggcgacgtggaatccaacccaggcccttctagaggccatatgaccgagtacaagcccacggtgcgcctcgccacccgcgacgacgtccccagggccgtacgcaccctcgccgccgcgttcgccgactaccccgccacgcgccacaccgtcgatccggaccgccacatcgagcgggtcaccgagctgcaagaactcttcctcacgcgcgtcgggctcgacatcggcaaggtgtgggtcgcggacgacggcgccgcggtggcggtctggaccacgccggagagcgtcgaagcgggggcggtgttcgccgagatcggcccgcgcatggccgagttgagcggttcccggctggccgcgcagcaacagatggaaggcctcctggcgccgcaccggcccaaggagcccgcgtggttcctggccaccgtcggcgtctcgcccgaccaccagggcaagggtctgggcagcgccgtcgtgctccccggagtggaggcggccgagcgcgccggggtgcccgccttcctggagacctccgcgccccgcaacctccccttctacgagcggctcggcttcaccgtcaccgccgacgtcgaggtgcccgaaggaccgcgcacctggtgcatgacccgcaagcccggtgcctga

SEQ ID NO: 18037 - DNA, 2352 bp, synthetic construct
  source 1..2352: mol_type = other DNA
atggccttaccagtgaccgccttgctcctgccgctggccttgctgctccacgccgccaggccgctcgaggaggaggacctgaagaacgtgttcccacctgaggtggccgtgttcgagcctagcgaggccgagatcagccacacccagaaagccaccctcgtgtgcctggctaccggcttctaccccgaccatgtggaactgtcttggtgggtcaacggcaaagaggtgcacagcggcgtgtgtaccgacccccagccactgaaagaacagcccgccctgaacgacagccggtactgcctgagcagcagactgagagtgtccgccaccttctggcagaacccccggaaccacttcagatgccaggtgcagttctacggcctgagcgagaacgacgagtggacccaggacagagccaagcccgtgacccagatcgtgtctgccgaagcctggggcagagccgattgcggctttaccagcgagagctaccagcagggcgtgctgagcgccaccaacctgagcgtgatcggcttcagaatcctgctgctgaaagtggccggctttaacctgctgatgaccctgcggctgtggtccagcagggccaagcgatctggatctggagcaacaaacttctcactactcaaacaagcaggtgacgtggaggagaatcccgggcctactagcatggccctgcccgtgacagccctgctgctgcctctggctctgctgctgcacgccgccagacccgatgaattcggctctgacctgggcatcaagctgctgttcgccgctgccaagggccaggacgacgaagtgcggattctgctggctgctggggccgacgtgaacgccaaggatttcgagggctacacccccctgcacgtggccgcctatgatggacacctggaaatcgtggaagtgctgctgaaggctggcgctgatgtgaatgccaaagacagccagggccggacccctctgcatgaagccgcctacagcggccatctggaaattgtggaagtgctgctgaaagccggggcagacgtgaacgctcaggacgacgctggcgagacaccagccgatctggctgcagcttggggccacgaagatatcgccgaggtgctgcagaagacgcgtggacagcctaaggccaatcctaccgtgacactgttccctccaagcagcgaagaactccaggccaacaaggccacacttgtgtgcctgatctccgacttctaccctggggctgtgacagtggcttggaaggccgatggatctcctgtgaaagccggcgtggaaaccaccaagccatccaagcagagcaacaacaaatacgccgccagctcctacctgagcctgacacctgagcagtggaagtcccacagatcctacagctgccaagtgacccacgaaggcagcaccgtggaaaagacagtggcccctacagagtgcagccccatcaagaccgatgtgattacaatggaccccaaggacaactgctccaaggacgccaacgataccctgctgctccagctgaccaacaccagcgcctactacatgtacttgttgctgctgctgaagtccgtggtgtacttcgccatcatcacatgctgcctgctgcggagaaccgccttctgctgcaacggcgagaagtctcgcgccaagagaagcggatctggcgtgaagcagaccctgaatttcgacctgctgaagctggctggcgacgtggaatccaacccaggcccttctagaggccatatgaccgagtacaagcccacggtgcgcctcgccacccgcgacgacgtccccagggccgtacgcaccctcgccgccgcgttcgccgactaccccgccacgcgccacaccgtcgatccggaccgccacatcgagcgggtcaccgagctgcaagaactcttcctcacgcgcgtcgggctcgacatcggcaaggtgtgggtcgcggacgacggcgccgcggtggcggtctggaccacgccggagagcgtcgaagcgggggcggtgttcgccgagatcggcccgcgcatggccgagttgagcggttcccggctggccgcgcagcaacagatggaaggcctcctggcgccgcaccggcccaaggagcccgcgtggttcctggccaccgtcggcgtctcgcccgaccaccagggcaagggtctgggcagcgccgtcgtgctccccggagtggaggcggccgagcgcgccggggtgcccgccttcctggagacctccgcgccccgcaacctccccttctacgagcggctcggcttcaccgtcaccgccgacgtcgaggtgcccgaaggaccgcgcacctggtgcatgacccgcaagcccggtgcctga

SEQ ID NO: 18038 - DNA, 2139 bp, synthetic construct
  source 1..2139: mol_type = other DNA
atggccttaccagtgaccgccttgctcctgccgctggccttgctgctccacgccgccaggccgctcgaggaggaggacctgaagaacgtgttcccacctgaggtggccgtgttcgagcctagcgaggccgagatcagccacacccagaaagccaccctcgtgtgcctggctaccggcttctaccccgaccatgtggaactgtcttggtgggtcaacggcaaagaggtgcacagcggcgtgtgtaccgacccccagccactgaaagaacagcccgccctgaacgacagccggtactgcctgagcagcagactgagagtgtccgccaccttctggcagaacccccggaaccacttcagatgccaggtgcagttctacggcctgagcgagaacgacgagtggacccaggacagagccaagcccgtgacccagatcgtgtctgccgaagcctggggcagagccgattgcggctttaccagcgagagctaccagcagggcgtgctgagcgccaccaacctgagcgtgatcggcttcagaatcctgctgctgaaagtggccggctttaacctgctgatgaccctgcggctgtggtccagcagggccaagcgatctggatctggagcaacaaacttctcactactcaaacaagcaggtgacgtggaggagaatcccgggcctactagcatggactggatttggcgcatccttttccttgtcggcgctgctaccggcgcccattccttcgaaggcagcggattcgaatacgccaaagagatgcggaacgcctactgggagatcgccctgctgcccaatctgaccaaccagcagaagagagcccccatcagaaagctgtacgacgacccctcccagagcagcgagctgctgtctgaggctaaaaaactgaacgatagccagacgcgtggacagcctaaggccaatcctaccgtgacactgttccctccaagcagcgaagaactccaggccaacaaggccacacttgtgtgcctgatctccgacttctaccctggggctgtgacagtggcttggaaggccgatggatctcctgtgaaagccggcgtggaaaccaccaagccatccaagcagagcaacaacaaatacgccgccagctcctacctgagcctgacacctgagcagtggaagtcccacagatcctacagctgccaagtgacccacgaaggcagcaccgtggaaaagacagtggcccctacagagtgcagccccatcaagaccgatgtgattacaatggaccccaaggacaactgctccaaggacgccaacgataccctgctgctccagctgaccaacaccagcgcctactacatgtacttgttgctgctgctgaagtccgtggtgtacttcgccatcatcacatgctgcctgctgcggagaaccgccttctgctgcaacggcgagaagtctcgcgccaagagaagcggatctggcgtgaagcagaccctgaatttcgacctgctgaagctggctggcgacgtggaatccaacccaggcccttctagaggccatatgaccgagtacaagcccacggtgcgcctcgccacccgcgacgacgtccccagggccgtacgcaccctcgccgccgcgttcgccgactaccccgccacgcgccacaccgtcgatccggaccgccacatcgagcgggtcaccgagctgcaagaactcttcctcacgcgcgtcgggctcgacatcggcaaggtgtgggtcgcggacgacggcgccgcggtggcggtctggaccacgccggagagcgtcgaagcgggggcggtgttcgccgagatcggcccgcgcatggccgagttgagcggttcccggctggccgcgcagcaacagatggaaggcctcctggcgccgcaccggcccaaggagcccgcgtggttcctggccaccgtcggcgtctcgcccgaccaccagggcaagggtctgggcagcgccgtcgtgctccccggagtggaggcggccgagcgcgccggggtgcccgccttcctggagacctccgcgccccgcaacctccccttctacgagcggctcggcttcaccgtcaccgccgacgtcgaggtgcccgaaggaccgcgcacctggtgcatgacccgcaagcccggtgcctga

SEQ ID NO: 18039 - DNA, 2805 bp, synthetic construct
  source 1..2805: mol_type = other DNA
atggccttaccagtgaccgccttgctcctgccgctggccttgctgctccacgccgccaggccgctcgaggaggaggacctgaagaacgtgttcccacctgaggtggccgtgttcgagcctagcgaggccgagatcagccacacccagaaagccaccctcgtgtgcctggctaccggcttctaccccgaccatgtggaactgtcttggtgggtcaacggcaaagaggtgcacagcggcgtgtgtaccgacccccagccactgaaagaacagcccgccctgaacgacagccggtactgcctgagcagcagactgagagtgtccgccaccttctggcagaacccccggaaccacttcagatgccaggtgcagttctacggcctgagcgagaacgacgagtggacccaggacagagccaagcccgtgacccagatcgtgtctgccgaagcctggggcagagccgattgcggctttaccagcgagagctaccagcagggcgtgctgagcgccaccaacctgagcgtgatcggcttcagaatcctgctgctgaaagtggccggctttaacctgctgatgaccctgcggctgtggtccagcagggccaagcgatctggatctggagcaacaaacttctcactactcaaacaagcaggtgacgtggaggagaatcccgggcctactagcatggccctgcccgtgacagccctgctgctgcctctggctctgctgctgcacgccgccagacccgatgaattcgaggtgcaactggtggaaagcggcggaggcctggtgcaggctggcggatctctgagactgagctgtgccgccagcggcatcaccttcagcatcaacacaatgggctggtacagacaggcccctggcaagcagagggaactggtggccctgatctccagcatcggcgacacctactacgccgacagcgtgaagggccggttcaccatcagccgggacaacgccaagaacaccgtgtacctccagatgaacagcctgaagcccgaggacaccgccgtgtactactgcaagcggttcagaacagccgcccagggcaccgattattggggccagggaacacaagtgaccgtgtcctctctcgagggaggaggcggctccgggggaggcggaagtggaggcggaggatctgggtctggaggaagcggatctggaggctcagggtcagggggctcaggcagtggaggctctttcgaagtgcaactggtggaatctgggggcggactggtgcagccaggcggaagtctgaggctgtcttgtgccgcctccggcagcatcttcggcttcaacgacatggcctggtatcggcaggctcccggaaaacagcgcgagctggtggctctgattagcagagtgggcgtgaccagcagcgccgactctgtgaagggcagattcacaatctccagagtgaacgccaaggatacagtgtacctccagatgaactctctgaaacctgaggatacagcagtgtactattgctacatggaccagcggctggacggcagcacactggcctactggggacagggaactcaagtgacagtgtctagcacgcgtggacagcctaaggccaatcctaccgtgacactgttccctccaagcagcgaagaactccaggccaacaaggccacacttgtgtgcctgatctccgacttctaccctggggctgtgacagtggcttggaaggccgatggatctcctgtgaaagccggcgtggaaaccaccaagccatccaagcagagcaacaacaaatacgccgccagctcctacctgagcctgacacctgagcagtggaagtcccacagatcctacagctgccaagtgacccacgaaggcagcaccgtggaaaagacagtggcccctacagagtgcagccccatcaagaccgatgtgattacaatggaccccaaggacaactgctccaaggacgccaacgataccctgctgctccagctgaccaacaccagcgcctactacatgtacttgttgctgctgctgaagtccgtggtgtacttcgccatcatcacatgctgcctgctgcggagaaccgccttctgctgcaacggcgagaagtctcgcgccaagagaagcggatctggcgtgaagcagaccctgaatttcgacctgctgaagctggctggcgacgtggaatccaacccaggcccttctagaggccatatgaccgagtacaagcccacggtgcgcctcgccacccgcgacgacgtccccagggccgtacgcaccctcgccgccgcgttcgccgactaccccgccacgcgccacaccgtcgatccggaccgccacatcgagcgggtcaccgagctgcaagaactcttcctcacgcgcgtcgggctcgacatcggcaaggtgtgggtcgcggacgacggcgccgcggtggcggtctggaccacgccggagagcgtcgaagcgggggcggtgttcgccgagatcggcccgcgcatggccgagttgagcggttcccggctggccgcgcagcaacagatggaaggcctcctggcgccgcaccggcccaaggagcccgcgtggttcctggccaccgtcggcgtctcgcccgaccaccagggcaagggtctgggcagcgccgtcgtgctccccggagtggaggcggccgagcgcgccggggtgcccgccttcctggagacctccgcgccccgcaacctccccttctacgagcggctcggcttcaccgtcaccgccgacgtcgaggtgcccgaaggaccgcgcacctggtgcatgacccgcaagcccggtgcctga

SEQ ID NO: 18040 - DNA, 2547 bp, synthetic construct
  source 1..2547: mol_type = other DNA
atggccttaccagtgaccgccttgctcctgccgctggccttgctgctccacgccgccaggccgctcgaggaggaggacctgaagaacgtgttcccacctgaggtggccgtgttcgagcctagcgaggccgagatcagccacacccagaaagccaccctcgtgtgcctggctaccggcttctaccccgaccatgtggaactgtcttggtgggtcaacggcaaagaggtgcacagcggcgtgtgtaccgacccccagccactgaaagaacagcccgccctgaacgacagccggtactgcctgagcagcagactgagagtgtccgccaccttctggcagaacccccggaaccacttcagatgccaggtgcagttctacggcctgagcgagaacgacgagtggacccaggacagagccaagcccgtgacccagatcgtgtctgccgaagcctggggcagagccgattgcggctttaccagcgagagctaccagcagggcgtgctgagcgccaccaacctgagcgtgatcggcttcagaatcctgctgctgaaagtggccggctttaacctgctgatgaccctgcggctgtggtccagcagggccaagcgatctggatctggagcaacaaacttctcactactcaaacaagcaggtgacgtggaggagaatcccgggcctactagcatggcccttccagtcactgccttgctgttgcctctggcgctcctgctccacgccgctagaccgggcatgagaaccgaggacctgcctaaggccgtggtgttcctggaaccccagtggtacagagtgctggaaaaggacagcgtgaccctgaagtgccagggcgcctacagccccgaggacaatagcacccagtggttccacaacgagagcctgatctccagccaggccagcagctacttcatcgacgccgccaccgtggacgacagcggcgagtatagatgccagaccaacctgagcaccctgagcgaccccgtgcagctggaagtgcacatcggatggctgctgctgcaggcccccagatgggtgttcaaagaagaggaccccatccacctgagatgccactcttggaagaacaccgccctgcacaaagtgacctacctgcagaacggcaagggcagaaagtacttccaccacaacagcgacttctacatccccaaggccaccctgaaggactccggctcctacttctgcagaggcctcgtgggcagcaagaacgtgtccagcgagacagtgaacatcaccatcacccagggcctggccgtgtctaccatcagcagctttttcccacccggctaccagacgcgtggacagcctaaggccaatcctaccgtgacactgttccctccaagcagcgaagaactccaggccaacaaggccacacttgtgtgcctgatctccgacttctaccctggggctgtgacagtggcttggaaggccgatggatctcctgtgaaagccggcgtggaaaccaccaagccatccaagcagagcaacaacaaatacgccgccagctcctacctgagcctgacacctgagcagtggaagtcccacagatcctacagctgccaagtgacccacgaaggcagcaccgtggaaaagacagtggcccctacagagtgcagccccatcaagaccgatgtgattacaatggaccccaaggacaactgctccaaggacgccaacgataccctgctgctccagctgaccaacaccagcgcctactacatgtacttgttgctgctgctgaagtccgtggtgtacttcgccatcatcacatgctgcctgctgcggagaaccgccttctgctgcaacggcgagaagtctcgcgccaagagaagcggatctggcgtgaagcagaccctgaatttcgacctgctgaagctggctggcgacgtggaatccaacccaggcccttctagaggccatatgaccgagtacaagcccacggtgcgcctcgccacccgcgacgacgtccccagggccgtacgcaccctcgccgccgcgttcgccgactaccccgccacgcgccacaccgtcgatccggaccgccacatcgagcgggtcaccgagctgcaagaactcttcctcacgcgcgtcgggctcgacatcggcaaggtgtgggtcgcggacgacggcgccgcggtggcggtctggaccacgccggagagcgtcgaagcgggggcggtgttcgccgagatcggcccgcgcatggccgagttgagcggttcccggctggccgcgcagcaacagatggaaggcctcctggcgccgcaccggcccaaggagcccgcgtggttcctggccaccgtcggcgtctcgcccgaccaccagggcaagggtctgggcagcgccgtcgtgctccccggagtggaggcggccgagcgcgccggggtgcccgccttcctggagacctccgcgccccgcaacctccccttctacgagcggctcggcttcaccgtcaccgccgacgtcgaggtgcccgaaggaccgcgcacctggtgcatgacccgcaagcccggtgcctga

SEQ ID NO: 18041 - DNA, 1428 bp, synthetic construct
  source 1..1428: mol_type = other DNA
atggccttaccagtgaccgccttgctcctgccgctggccttgctgctccacgccgccaggccgctcgaggaggaggacctgaagaacgtgttcccacctgaggtggccgtgttcgagcctagcgaggccgagatcagccacacccagaaagccaccctcgtgtgcctggctaccggcttctaccccgaccatgtggaactgtcttggtgggtcaacggcaaagaggtgcacagcggcgtgtgtaccgacccccagccactgaaagaacagcccgccctgaacgacagccggtactgcctgagcagcagactgagagtgtccgccaccttctggcagaacccccggaaccacttcagatgccaggtgcagttctacggcctgagcgagaacgacgagtggacccaggacagagccaagcccgtgacccagatcgtgtctgccgaagcctggggcagagccgattgcggctttaccagcgagagctaccagcagggcgtgctgagcgccaccaacctgagcgtgatcggcttcagaatcctgctgctgaaagtggccggctttaacctgctgatgaccctgcggctgtggtccagcagggccaagcgatctggatctggagcaacaaacttctcactactcaaacaagcaggtgacgtggaggagaatcccgggcctactagcgccaccatggccttaccagtgaccgccttgctcctgccgctggccttgctgctccacgccgccaggccgatggaccccgacctggaaatcagagccgccttcctgcggcagagaaacacagccctgagaacagaggtggccgagctggaacaagaggtgcagcggctggaaaacgaggtgtcccagtacgagacaagatacggccctctcggaggcggaaaaacgcgtggacagcctaaggccaatcctaccgtgacactgttccctccaagcagcgaagaactccaggccaacaaggccacacttgtgtgcctgatctccgacttctaccctggggctgtgacagtggcttggaaggccgatggatctcctgtgaaagccggcgtggaaaccaccaagccatccaagcagagcaacaacaaatacgccgccagctcctacctgagcctgacacctgagcagtggaagtcccacagatcctacagctgccaagtgacccacgaaggcagcaccgtggaaaagacagtggcccctacagagtgcagccccatcaagaccgatgtgattacaatggaccccaaggacaactgctccaaggacgccaacgataccctgctgctccagctgaccaacaccagcgcctactacatgtacttgttgctgctgctgaagtccgtggtgtacttcgccatcatcacatgctgcctgctgcggagaaccgccttctgctgcaacggcgagaagtct

SEQ ID NO: 18042 - DNA, 1428 bp, synthetic construct
  source 1..1428: mol_type = other DNA
atggccttaccagtgaccgccttgctcctgccgctggccttgctgctccacgccgccaggccgctcgaggaggaggacctgaagaacgtgttcccacctgaggtggccgtgttcgagcctagcgaggccgagatcagccacacccagaaagccaccctcgtgtgcctggctaccggcttctaccccgaccatgtggaactgtcttggtgggtcaacggcaaagaggtgcacagcggcgtgtgtaccgacccccagccactgaaagaacagcccgccctgaacgacagccggtactgcctgagcagcagactgagagtgtccgccaccttctggcagaacccccggaaccacttcagatgccaggtgcagttctacggcctgagcgagaacgacgagtggacccaggacagagccaagcccgtgacccagatcgtgtctgccgaagcctggggcagagccgattgcggctttaccagcgagagctaccagcagggcgtgctgagcgccaccaacctgagcgtgatcggcttcagaatcctgctgctgaaagtggccggctttaacctgctgatgaccctgcggctgtggtccagcagggccaagcgatctggatctggagcaacaaacttctcactactcaaacaagcaggtgacgtggaggagaatcccgggcctactagcgccaccatggccttaccagtgaccgccttgctcctgccgctggccttgctgctccacgccgccaggccgatggaccctgatctcgaaattgaggccgcctttctggaacgcgagaacactgccctggaaaccagggtcgcagagctgagacagagagtgcagagactgcggaacagagtgtctcagtaccgcaccagatatggcccactcggcggaggtaaaacgcgtggacagcctaaggccaatcctaccgtgacactgttccctccaagcagcgaagaactccaggccaacaaggccacacttgtgtgcctgatctccgacttctaccctggggctgtgacagtggcttggaaggccgatggatctcctgtgaaagccggcgtggaaaccaccaagccatccaagcagagcaacaacaaatacgccgccagctcctacctgagcctgacacctgagcagtggaagtcccacagatcctacagctgccaagtgacccacgaaggcagcaccgtggaaaagacagtggcccctacagagtgcagccccatcaagaccgatgtgattacaatggaccccaaggacaactgctccaaggacgccaacgataccctgctgctccagctgaccaacaccagcgcctactacatgtacttgttgctgctgctgaagtccgtggtgtacttcgccatcatcacatgctgcctgctgcggagaaccgccttctgctgcaacggcgagaagtct

SEQ ID NO: 18043 - DNA, 1359 bp, synthetic construct
  source 1..1359: mol_type = other DNA
atggccttaccagtgaccgccttgctcctgccgctggccttgctgctccacgccgccaggccgctcgaggaggaggacctgaagaacgtgttcccacctgaggtggccgtgttcgagcctagcgaggccgagatcagccacacccagaaagccaccctcgtgtgcctggctaccggcttctaccccgaccatgtggaactgtcttggtgggtcaacggcaaagaggtgcacagcggcgtgtgtaccgacccccagccactgaaagaacagcccgccctgaacgacagccggtactgcctgagcagcagactgagagtgtccgccaccttctggcagaacccccggaaccacttcagatgccaggtgcagttctacggcctgagcgagaacgacgagtggacccaggacagagccaagcccgtgacccagatcgtgtctgccgaagcctggggcagagccgattgcggctttaccagcgagagctaccagcagggcgtgctgagcgccaccaacctgagcgtgatcggcttcagaatcctgctgctgaaagtggccggctttaacctgctgatgaccctgcggctgtggtccagcagggccaagcgatctggatctggagcaacaaacttctcactactcaaacaagcaggtgacgtggaggagaatcccgggcctactagcgccaccatggccttaccagtgaccgccttgctcctgccgctggccttgctgctccacgccgccaggccggaagttgctgccctcgagaaggaggtagcagctttggaaaaagaagtcgcagcccttgagaaagaagttgcggctctggagaagacgcgtggacagcctaaggccaatcctaccgtgacactgttccctccaagcagcgaagaactccaggccaacaaggccacacttgtgtgcctgatctccgacttctaccctggggctgtgacagtggcttggaaggccgatggatctcctgtgaaagccggcgtggaaaccaccaagccatccaagcagagcaacaacaaatacgccgccagctcctacctgagcctgacacctgagcagtggaagtcccacagatcctacagctgccaagtgacccacgaaggcagcaccgtggaaaagacagtggcccctacagagtgcagccccatcaagaccgatgtgattacaatggaccccaaggacaactgctccaaggacgccaacgataccctgctgctccagctgaccaacaccagcgcctactacatgtacttgttgctgctgctgaagtccgtggtgtacttcgccatcatcacatgctgcctgctgcggagaaccgccttctgctgcaacggcgagaagtct

SEQ ID NO: 18044 - DNA, 2133 bp, synthetic construct
  source 1..2133: mol_type = other DNA
atggccttaccagtgaccgccttgctcctgccgctggccttgctgctccacgccgccaggccgctcgaggaggaggacctgaagaacgtgttcccacctgaggtggccgtgttcgagcctagcgaggccgagatcagccacacccagaaagccaccctcgtgtgcctggctaccggcttctaccccgaccatgtggaactgtcttggtgggtcaacggcaaagaggtgcacagcggcgtgtgtaccgacccccagccactgaaagaacagcccgccctgaacgacagccggtactgcctgagcagcagactgagagtgtccgccaccttctggcagaacccccggaaccacttcagatgccaggtgcagttctacggcctgagcgagaacgacgagtggacccaggacagagccaagcccgtgacccagatcgtgtctgccgaagcctggggcagagccgattgcggctttaccagcgagagctaccagcagggcgtgctgagcgccaccaacctgagcgtgatcggcttcagaatcctgctgctgaaagtggccggctttaacctgctgatgaccctgcggctgtggtccagcagggccaagcgatctggatctggagcaacaaacttctcactactcaaacaagcaggtgacgtggaggagaatcccgggcctactagcgccaccatggccttaccagtgaccgccttgctcctgccgctggccttgctgctccacgccgccaggccgctgttcaatcaagaggtgcagatccctctgaccgagagctactgtggcccctgtcctaagaactggatctgctacaagaacaactgctaccagttcttcgacgagagcaagaattggtacgagagccaggccagctgcatgagccagaatgccagcctgctgaaggtgtacagcaaagaggaccaggacctgctgaaactggtcaagagcgcccactggatgggccttgtgcacatccccaccaatggctcttggcagtgggaggacggcagcattctgagccctaacctgctgaccatcatcgagatgcagaagggcgactgcgccctgtacgccagcagctttaagggctacatcgagaattgcagcaccccgaacacctacatctgtatgcagagaaccgtttctggcggaggcggctctggaggaggcggaagtggcggcggaggcgacctctttaatcaagaagtccagattccactcaccgaatcctactgcggaccttgtccaaaaaattggatttgttataagaacaactgttatcaattctttgatgagtctaaaaattggtatgagtcccaggcttcctgcatgtctcagaacgcttctctgctgaaagtctactctaaagaagatcaggatctcctgaagctcgtcaagtctgcccattggatggggctcgtccacattcctaccaacggaagctggcaatgggaagatggctccatcctgtctccaaatctgctcacgattattgaaatgcagaaaggggattgtgctctctacgccagctccttcaagggatatattgagaactgtagcacgcccaatacttatatctgtatgcaacggaccgtgacgcgtggacagcctaaggccaatcctaccgtgacactgttccctccaagcagcgaagaactccaggccaacaaggccacacttgtgtgcctgatctccgacttctaccctggggctgtgacagtggcttggaaggccgatggatctcctgtgaaagccggcgtggaaaccaccaagccatccaagcagagcaacaacaaatacgccgccagctcctacctgagcctgacacctgagcagtggaagtcccacagatcctacagctgccaagtgacccacgaaggcagcaccgtggaaaagacagtggcccctacagagtgcagccccatcaagaccgatgtgattacaatggaccccaaggacaactgctccaaggacgccaacgataccctgctgctccagctgaccaacaccagcgcctactacatgtacttgttgctgctgctgaagtccgtggtgtacttcgccatcatcacatgctgcctgctgcggagaaccgccttctgctgcaacggcgagaagtct

SEQ ID NO: 18045 - DNA, 2133 bp, synthetic construct
  source 1..2133: mol_type = other DNA
atggccttaccagtgaccgccttgctcctgccgctggccttgctgctccacgccgccaggccgctcgaggaggaggacctgaagaacgtgttcccacctgaggtggccgtgttcgagcctagcgaggccgagatcagccacacccagaaagccaccctcgtgtgcctggctaccggcttctaccccgaccatgtggaactgtcttggtgggtcaacggcaaagaggtgcacagcggcgtgtgtaccgacccccagccactgaaagaacagcccgccctgaacgacagccggtactgcctgagcagcagactgagagtgtccgccaccttctggcagaacccccggaaccacttcagatgccaggtgcagttctacggcctgagcgagaacgacgagtggacccaggacagagccaagcccgtgacccagatcgtgtctgccgaagcctggggcagagccgattgcggctttaccagcgagagctaccagcagggcgtgctgagcgccaccaacctgagcgtgatcggcttcagaatcctgctgctgaaagtggccggctttaacctgctgatgaccctgcggctgtggtccagcagggccaagcgatctggatctggagcaacaaacttctcactactcaaacaagcaggtgacgtggaggagaatcccgggcctactagcgccaccatggccttaccagtgaccgccttgctcctgccgctggccttgctgctccacgccgccaggccgctgttcaatcaagaggtgcagatccctctgaccgagagctactgtggcccctgtcctaagaactggatctgctacaagaacaactgctaccagttcttcgacgagagcaagaattggtacgagagccaggccagctgcatgagccagaatgccagcctgctgaaggtgtacagcaaagaggaccaggacctgctgaaactggtcaagagcgcccactggatgggccttgtgcacatccccaccaatggctcttggcagtgggaggacggcagcattctgagccctaacctgctgaccatcatcgagatgcagaagggcgactgcgccctgtacgccagcagctttaagggcttcatcgagaattgcagcaccccgaacacctacatctgtatgcagagaaccgttggcggaggcggaagtggaggcggaggatctggcggcggaggctctgacctctttaatcaagaagtccagattccactcaccgaatcctactgcggaccttgtccaaaaaattggatttgttataagaacaactgttatcaattctttgatgagtctaaaaattggtatgagtcccaggcttcctgcatgtctcagaacgcttctctgctgaaagtctactctaaagaagatcaggatctcctgaagctcgtcaagtctgcccattggatggggctcgtccacattcctaccaacggaagctggcaatgggaagatggctccatcctgtctccaaatctgctcacgattattgaaatgcagaaaggggattgtgctctctacgccagctccttcaagggatttattgagaactgtagcacgcccaatacttatatctgtatgcaacggaccgtgacgcgtggacagcctaaggccaatcctaccgtgacactgttccctccaagcagcgaagaactccaggccaacaaggccacacttgtgtgcctgatctccgacttctaccctggggctgtgacagtggcttggaaggccgatggatctcctgtgaaagccggcgtggaaaccaccaagccatccaagcagagcaacaacaaatacgccgccagctcctacctgagcctgacacctgagcagtggaagtcccacagatcctacagctgccaagtgacccacgaaggcagcaccgtggaaaagacagtggcccctacagagtgcagccccatcaagaccgatgtgattacaatggaccccaaggacaactgctccaaggacgccaacgataccctgctgctccagctgaccaacaccagcgcctactacatgtacttgttgctgctgctgaagtccgtggtgtacttcgccatcatcacatgctgcctgctgcggagaaccgccttctgctgcaacggcgagaagtct

SEQ ID NO: 18046 - DNA, 2211 bp, synthetic construct
  source 1..2211: mol_type = other DNA
atggccttaccagtgaccgccttgctcctgccgctggccttgctgctccacgccgccaggccgctcgaggaggaggacctgaagaacgtgttcccacctgaggtggccgtgttcgagcctagcgaggccgagatcagccacacccagaaagccaccctcgtgtgcctggctaccggcttctaccccgaccatgtggaactgtcttggtgggtcaacggcaaagaggtgcacagcggcgtgtgtaccgacccccagccactgaaagaacagcccgccctgaacgacagccggtactgcctgagcagcagactgagagtgtccgccaccttctggcagaacccccggaaccacttcagatgccaggtgcagttctacggcctgagcgagaacgacgagtggacccaggacagagccaagcccgtgacccagatcgtgtctgccgaagcctggggcagagccgattgcggctttaccagcgagagctaccagcagggcgtgctgagcgccaccaacctgagcgtgatcggcttcagaatcctgctgctgaaagtggccggctttaacctgctgatgaccctgcggctgtggtccagcagggccaagcgatctggatctggagcaacaaacttctcactactcaaacaagcaggtgacgtggaggagaatcccgggcctactagcatggccttaccagtgaccgccttgctcctgccgctggccttgctgctccacgccgccaggccgatggaccccgacctggaaatcagagccgccttcctgcggcagagaaacacagccctgagaacagaggtggccgagctggaacaagaggtgcagcggctggaaaacgaggtgtcccagtacgagacaagatacggccctctcggaggcggaaaaggtaccggcggaggcggatctggcggcggaggtagcggtggcggaggatctgaattcgacatccagatgacacagagccctagcagcctgtctgccagcgtgggagacagagtgaccatcacatgcaaggccagcgaccacatcaacaactggctggcctggtatcagcagaagcctggacaggcccctaagctgctgatctacggcgctaccacactggaaacaggcgtgcccagcagattttctggcagcggctctggcaccgactacaccctgacaatatccagcctccagcctgaggacttcgccacctactactgtcagcagagctggaacaccccttggacattcggccagggcaccaagctggaaatcaagagaggcggaggcggaagtggaggcggaggatctggcggcggaggctctcaagttcagcttcaacagcctggcgctgagctggtcaaacctggcgcttctgtgaagatgagctgcaaagccagcggctacgccttcagcagctactggatcaactggatgaagcagaaacccggccagggactcgaatggatcggccaaatctatcccggcgacggcgacaccaactacaacggcaagttcaagggcagagccacactgaccgccgatacctctagcagcacagcctacatgcagctgagcagcctgaccagcgaagatagcgccgtgtacttctgtgcccggtccatcacaacagtcgtgggctgcgctatggactattggggccagggaacaagcgtgaccgtgtctagtacgcgtggacagcctaaggccaatcctaccgtgacactgttccctccaagcagcgaagaactccaggccaacaaggccacacttgtgtgcctgatctccgacttctaccctggggctgtgacagtggcttggaaggccgatggatctcctgtgaaagccggcgtggaaaccaccaagccatccaagcagagcaacaacaaatacgccgccagctcctacctgagcctgacacctgagcagtggaagtcccacagatcctacagctgccaagtgacccacgaaggcagcaccgtggaaaagacagtggcccctacagagtgcagccccatcaagaccgatgtgattacaatggaccccaaggacaactgctccaaggacgccaacgataccctgctgctccagctgaccaacaccagcgcctactacatgtacttgttgctgctgctgaagtccgtggtgtacttcgccatcatcacatgctgcctgctgcggagaaccgccttctgctgcaacggcgagaagtct

SEQ ID NO: 18047 - DNA, 2916 bp, synthetic construct
  source 1..2916: mol_type = other DNA
atggccttaccagtgaccgccttgctcctgccgctggccttgctgctccacgccgccaggccgctcgaggaggaggacctgaagaacgtgttcccacctgaggtggccgtgttcgagcctagcgaggccgagatcagccacacccagaaagccaccctcgtgtgcctggctaccggcttctaccccgaccatgtggaactgtcttggtgggtcaacggcaaagaggtgcacagcggcgtgtgtaccgacccccagccactgaaagaacagcccgccctgaacgacagccggtactgcctgagcagcagactgagagtgtccgccaccttctggcagaacccccggaaccacttcagatgccaggtgcagttctacggcctgagcgagaacgacgagtggacccaggacagagccaagcccgtgacccagatcgtgtctgccgaagcctggggcagagccgattgcggctttaccagcgagagctaccagcagggcgtgctgagcgccaccaacctgagcgtgatcggcttcagaatcctgctgctgaaagtggccggctttaacctgctgatgaccctgcggctgtggtccagcagggccaagcgatctggatctggagcaacaaacttctcactactcaaacaagcaggtgacgtggaggagaatcccgggcctactagcatggccttaccagtgaccgccttgctcctgccgctggccttgctgctccacgccgccaggccgctgttcaatcaagaggtgcagatccctctgaccgagagctactgtggcccctgtcctaagaactggatctgctacaagaacaactgctaccagttcttcgacgagagcaagaattggtacgagagccaggccagctgcatgagccagaatgccagcctgctgaaggtgtacagcaaagaggaccaggacctgctgaaactggtcaagagcgcccactggatgggccttgtgcacatccccaccaatggctcttggcagtgggaggacggcagcattctgagccctaacctgctgaccatcatcgagatgcagaagggcgactgcgccctgtacgccagcagctttaagggcttcatcgagaattgcagcaccccgaacacctacatctgtatgcagagaaccgttggcggaggcggaagtggaggcggaggatctggcggcggaggctctgacctctttaatcaagaagtccagattccactcaccgaatcctactgcggaccttgtccaaaaaattggatttgttataagaacaactgttatcaattctttgatgagtctaaaaattggtatgagtcccaggcttcctgcatgtctcagaacgcttctctgctgaaagtctactctaaagaagatcaggatctcctgaagctcgtcaagtctgcccattggatggggctcgtccacattcctaccaacggaagctggcaatgggaagatggctccatcctgtctccaaatctgctcacgattattgaaatgcagaaaggggattgtgctctctacgccagctccttcaagggatttattgagaactgtagcacgcccaatacttatatctgtatgcaacggaccgtgggtaccggcggaggcggatctggcggcggaggtagcggtggcggaggatctgaattcgacatccagatgacacagagccctagcagcctgtctgccagcgtgggagacagagtgaccatcacatgcaaggccagcgaccacatcaacaactggctggcctggtatcagcagaagcctggacaggcccctaagctgctgatctacggcgctaccacactggaaacaggcgtgcccagcagattttctggcagcggctctggcaccgactacaccctgacaatatccagcctccagcctgaggacttcgccacctactactgtcagcagagctggaacaccccttggacattcggccagggcaccaagctggaaatcaagagaggcggaggcggaagtggaggcggaggatctggcggcggaggctctcaagttcagcttcaacagcctggcgctgagctggtcaaacctggcgcttctgtgaagatgagctgcaaagccagcggctacgccttcagcagctactggatcaactggatgaagcagaaacccggccagggactcgaatggatcggccaaatctatcccggcgacggcgacaccaactacaacggcaagttcaagggcagagccacactgaccgccgatacctctagcagcacagcctacatgcagctgagcagcctgaccagcgaagatagcgccgtgtacttctgtgcccggtccatcacaacagtcgtgggctgcgctatggactattggggccagggaacaagcgtgaccgtgtctagtacgcgtggacagcctaaggccaatcctaccgtgacactgttccctccaagcagcgaagaactccaggccaacaaggccacacttgtgtgcctgatctccgacttctaccctggggctgtgacagtggcttggaaggccgatggatctcctgtgaaagccggcgtggaaaccaccaagccatccaagcagagcaacaacaaatacgccgccagctcctacctgagcctgacacctgagcagtggaagtcccacagatcctacagctgccaagtgacccacgaaggcagcaccgtggaaaagacagtggcccctacagagtgcagccccatcaagaccgatgtgattacaatggaccccaaggacaactgctccaaggacgccaacgataccctgctgctccagctgaccaacaccagcgcctactacatgtacttgttgctgctgctgaagtccgtggtgtacttcgccatcatcacatgctgcctgctgcggagaaccgccttctgctgcaacggcgagaagtct

SEQ ID NO: 18048 - DNA, 2031 bp, synthetic construct
  source 1..2031: mol_type = other DNA
atggccttaccagtgaccgccttgctcctgccgctggccttgctgctccacgccgccaggccgctcgaggaggaggacctgaagaacgtgttcccacctgaggtggccgtgttcgagcctagcgaggccgagatcagccacacccagaaagccaccctcgtgtgcctggctaccggcttctaccccgaccatgtggaactgtcttggtgggtcaacggcaaagaggtgcacagcggcgtgtgtaccgacccccagccactgaaagaacagcccgccctgaacgacagccggtactgcctgagcagcagactgagagtgtccgccaccttctggcagaacccccggaaccacttcagatgccaggtgcagttctacggcctgagcgagaacgacgagtggacccaggacagagccaagcccgtgacccagatcgtgtctgccgaagcctggggcagagccgattgcggctttaccagcgagagctaccagcagggcgtgctgagcgccaccaacctgagcgtgatcggcttcagaatcctgctgctgaaagtggccggctttaacctgctgatgaccctgcggctgtggtccagcagggccaagcgatctggatctggagcaacaaacttctcactactcaaacaagcaggtgacgtggaggagaatcccgggcctactagcatggccttaccagtgaccgccttgctcctgccgctggccttgctgctccacgccgccaggccgcagtctgtgctgacacagcctcctagtgtgtctggcgctcctggacagagagtgaccatctcttgtaccggcagcagcagcaatatcggagccggctatgacgtgcactggtatcagcagctccctggcacagcccctaaactgctgatcttcggcaacagcaacagacccagcggcgtgcccgatagattcagcggctttaagagcggcacaagcgccagcctggctatcactggactgcaagccgaggacgaggccgactacttctgccagagctacgatagcagcctgagcggcagcggagtgtttggcacaggcaccaaagtgacagtgcttggcggcggaggcggaagtggaggcggaggatctggcggcggaggctctcaaatgcaactggttcaaagcggcggtggcctggtgcaacctggaagaagtctgagactgagctgtgccgccagcggcttcaccttcgatgattacgccatgcactgggtccgacaggcccctggaaaaggactggaatgggtgtccggcatctcctggaatagcggctctatcggctacgccgacagcgtgaagggcagattcaccatcagccgggacaacgccaagaacagcctgtacctccagatgaactccctgagagccgaggatacagccctgtactactgcgccaaggacatccacagcggcagctactacggcctgctgtactacgctatggacgtgtggggccagggcacaaccgtgacagtttcttctacgcgtggacagcctaaggccaatcctaccgtgacactgttccctccaagcagcgaagaactccaggccaacaaggccacacttgtgtgcctgatctccgacttctaccctggggctgtgacagtggcttggaaggccgatggatctcctgtgaaagccggcgtggaaaccaccaagccatccaagcagagcaacaacaaatacgccgccagctcctacctgagcctgacacctgagcagtggaagtcccacagatcctacagctgccaagtgacccacgaaggcagcaccgtggaaaagacagtggcccctacagagtgcagccccatcaagaccgatgtgattacaatggaccccaaggacaactgctccaaggacgccaacgataccctgctgctccagctgaccaacaccagcgcctactacatgtacttgttgctgctgctgaagtccgtggtgtacttcgccatcatcacatgctgcctgctgcggagaaccgccttctgctgcaacggcgagaagtct

SEQ ID NO: 18049 - DNA, 1542 bp, synthetic construct
  source 1..1542: mol_type = other DNA
atggccttaccagtgaccgccttgctcctgccgctggccttgctgctccacgccgccaggccgctcgaggaggaggacctgaagaacgtgttcccacctgaggtggccgtgttcgagcctagcgaggccgagatcagccacacccagaaagccaccctcgtgtgcctggctaccggcttctaccccgaccatgtggaactgtcttggtgggtcaacggcaaagaggtgcacagcggcgtgtgtaccgacccccagccactgaaagaacagcccgccctgaacgacagccggtactgcctgagcagcagactgagagtgtccgccaccttctggcagaacccccggaaccacttcagatgccaggtgcagttctacggcctgagcgagaacgacgagtggacccaggacagagccaagcccgtgacccagatcgtgtctgccgaagcctggggcagagccgattgcggctttaccagcgagagctaccagcagggcgtgctgagcgccaccaacctgagcgtgatcggcttcagaatcctgctgctgaaagtggccggctttaacctgctgatgaccctgcggctgtggtccagcagggccaagcgatctggatctggagcaacaaacttctcactactcaaacaagcaggtgacgtggaggagaatcccgggcctactagcatggccttaccagtgaccgccttgctcctgccgctggccttgctgctccacgccgccaggccgatgtgtatgccctgcttcaccaccgaccatcagatggcccggaagtgcgacgattgctgtggcggaaaaggcagaggcaagtgctacggccctcagtgcttgtgtagactcgagggcggaggcggaagtggaggcggaggatctggcggcggaggctctttcgaagtgtgtatgccttgttttaccacggatcaacaaatggctcgcaagtgttctgactgctgcggaggcaaaggccggggaaagtgttatggcccacagtgtctgtgccggacgcgtggacagcctaaggccaatcctaccgtgacactgttccctccaagcagcgaagaactccaggccaacaaggccacacttgtgtgcctgatctccgacttctaccctggggctgtgacagtggcttggaaggccgatggatctcctgtgaaagccggcgtggaaaccaccaagccatccaagcagagcaacaacaaatacgccgccagctcctacctgagcctgacacctgagcagtggaagtcccacagatcctacagctgccaagtgacccacgaaggcagcaccgtggaaaagacagtggcccctacagagtgcagccccatcaagaccgatgtgattacaatggaccccaaggacaactgctccaaggacgccaacgataccctgctgctccagctgaccaacaccagcgcctactacatgtacttgttgctgctgctgaagtccgtggtgtacttcgccatcatcacatgctgcctgctgcggagaaccgccttctgctgcaacggcgagaagtct

SEQ ID NO: 18050 - DNA, 2331 bp, synthetic construct
  source 1..2331: mol_type = other DNA
atggccttaccagtgaccgccttgctcctgccgctggccttgctgctccacgccgccaggccgctcgaggaggaggacctgaagaacgtgttcccacctgaggtggccgtgttcgagcctagcgaggccgagatcagccacacccagaaagccaccctcgtgtgcctggctaccggcttctaccccgaccatgtggaactgtcttggtgggtcaacggcaaagaggtgcacagcggcgtgtgtaccgacccccagccactgaaagaacagcccgccctgaacgacagccggtactgcctgagcagcagactgagagtgtccgccaccttctggcagaacccccggaaccacttcagatgccaggtgcagttctacggcctgagcgagaacgacgagtggacccaggacagagccaagcccgtgacccagatcgtgtctgccgaagcctggggcagagccgattgcggctttaccagcgagagctaccagcagggcgtgctgagcgccaccaacctgagcgtgatcggcttcagaatcctgctgctgaaagtggccggctttaacctgctgatgaccctgcggctgtggtccagcagggccaagcgatctggatctggagcaacaaacttctcactactcaaacaagcaggtgacgtggaggagaatcccgggcctactagcatggccttaccagtgaccgccttgctcctgccgctggccttgctgctccacgccgccaggccgatgtgtatgccctgcttcaccaccgaccatcagatggcccggaagtgcgacgattgctgtggcggaaaaggcagaggcaagtgctacggccctcagtgcttgtgtagactcgagggcggaggcggaagtggaggcggaggatctggcggcggaggctctttcgaagtgtgtatgccttgttttaccacggatcaacaaatggctcgcaagtgttctgactgctgcggaggcaaaggccggggaaagtgttatggcccacagtgtctgtgccggggtaccggcggaggcggatctggcggcggaggtagcggtggcggaggatctgaattcgacatccagatgacacagagccctagcagcctgtctgccagcgtgggagacagagtgaccatcacatgcaaggccagcgaccacatcaacaactggctggcctggtatcagcagaagcctggacaggcccctaagctgctgatctacggcgctaccacactggaaacaggcgtgcccagcagattttctggcagcggctctggcaccgactacaccctgacaatatccagcctccagcctgaggacttcgccacctactactgtcagcagagctggaacaccccttggacattcggccagggcaccaagctggaaatcaagagaggcggaggcggaagtggaggcggaggatctggcggcggaggctctcaagttcagcttcaacagcctggcgctgagctggtcaaacctggcgcttctgtgaagatgagctgcaaagccagcggctacgccttcagcagctactggatcaactggatgaagcagaaacccggccagggactcgaatggatcggccaaatctatcccggcgacggcgacaccaactacaacggcaagttcaagggcagagccacactgaccgccgatacctctagcagcacagcctacatgcagctgagcagcctgaccagcgaagatagcgccgtgtacttctgtgcccggtccatcacaacagtcgtgggctgcgctatggactattggggccagggaacaagcgtgaccgtgtctagtacgcgtggacagcctaaggccaatcctaccgtgacactgttccctccaagcagcgaagaactccaggccaacaaggccacacttgtgtgcctgatctccgacttctaccctggggctgtgacagtggcttggaaggccgatggatctcctgtgaaagccggcgtggaaaccaccaagccatccaagcagagcaacaacaaatacgccgccagctcctacctgagcctgacacctgagcagtggaagtcccacagatcctacagctgccaagtgacccacgaaggcagcaccgtggaaaagacagtggcccctacagagtgcagccccatcaagaccgatgtgattacaatggaccccaaggacaactgctccaaggacgccaacgataccctgctgctccagctgaccaacaccagcgcctactacatgtacttgttgctgctgctgaagtccgtggtgtacttcgccatcatcacatgctgcctgctgcggagaaccgccttctgctgcaacggcgagaagtct

SEQ ID NO: 18051 - DNA, 2556 bp, synthetic construct
  source 1..2556: mol_type = other DNA
atggccttaccagtgaccgccttgctcctgccgctggccttgctgctccacgccgccaggccgctcgaggaggaggacctgaagaacgtgttcccacctgaggtggccgtgttcgagcctagcgaggccgagatcagccacacccagaaagccaccctcgtgtgcctggctaccggcttctaccccgaccatgtggaactgtcttggtgggtcaacggcaaagaggtgcacagcggcgtgtgtaccgacccccagccactgaaagaacagcccgccctgaacgacagccggtactgcctgagcagcagactgagagtgtccgccaccttctggcagaacccccggaaccacttcagatgccaggtgcagttctacggcctgagcgagaacgacgagtggacccaggacagagccaagcccgtgacccagatcgtgtctgccgaagcctggggcagagccgattgcggctttaccagcgagagctaccagcagggcgtgctgagcgccaccaacctgagcgtgatcggcttcagaatcctgctgctgaaagtggccggctttaacctgctgatgaccctgcggctgtggtccagcagggccaagcgatctggatctggagcaacaaacttctcactactcaaacaagcaggtgacgtggaggagaatcccgggcctactagcatggccttaccagtgaccgccttgctcctgccgctggccttgctgctccacgccgccaggccgagccccgtagctcctgcctgtgaccccagactcctaaataaactgctgcgtgactcccacctccttcacagccgactgagtcagtgtcccgacgtggaccctttgtctatccctgttctgctgcctgctgtggactttagcctgggagaatggaaaacccagacggaacagagcaaggcacaggacattctaggggcagtgtcccttctactggagggagtgatggcagcacgaggacagttggaaccctcctgcctctcatccctcctgggacagctttctgggcaggttcgcctcctcttgggggccctgcagggcctcctaggaacccagcttcctctacagggcaggaccacagctcacaaggaccccaatgccctcttcttgagcttgcaacaactgcttcggggaaaggtgcgcttcctgcttctggtagaaggtcccaccctctgtgtcagacggaccctgccaaccacagctgtcccaagcagtacttctggtaccggcggaggcggatctggcggcggaggtagcggtggcggaggatctgaattcgacatccagatgacacagagccctagcagcctgtctgccagcgtgggagacagagtgaccatcacatgcaaggccagcgaccacatcaacaactggctggcctggtatcagcagaagcctggacaggcccctaagctgctgatctacggcgctaccacactggaaacaggcgtgcccagcagattttctggcagcggctctggcaccgactacaccctgacaatatccagcctccagcctgaggacttcgccacctactactgtcagcagagctggaacaccccttggacattcggccagggcaccaagctggaaatcaagagaggcggaggcggaagtggaggcggaggatctggcggcggaggctctcaagttcagcttcaacagcctggcgctgagctggtcaaacctggcgcttctgtgaagatgagctgcaaagccagcggctacgccttcagcagctactggatcaactggatgaagcagaaacccggccagggactcgaatggatcggccaaatctatcccggcgacggcgacaccaactacaacggcaagttcaagggcagagccacactgaccgccgatacctctagcagcacagcctacatgcagctgagcagcctgaccagcgaagatagcgccgtgtacttctgtgcccggtccatcacaacagtcgtgggctgcgctatggactattggggccagggaacaagcgtgaccgtgtctagtacgcgtggacagcctaaggccaatcctaccgtgacactgttccctccaagcagcgaagaactccaggccaacaaggccacacttgtgtgcctgatctccgacttctaccctggggctgtgacagtggcttggaaggccgatggatctcctgtgaaagccggcgtggaaaccaccaagccatccaagcagagcaacaacaaatacgccgccagctcctacctgagcctgacacctgagcagtggaagtcccacagatcctacagctgccaagtgacccacgaaggcagcaccgtggaaaagacagtggcccctacagagtgcagccccatcaagaccgatgtgattacaatggaccccaaggacaactgctccaaggacgccaacgataccctgctgctccagctgaccaacaccagcgcctactacatgtacttgttgctgctgctgaagtccgtggtgtacttcgccatcatcacatgctgcctgctgcggagaaccgccttctgctgcaacggcgagaagtct

SEQ ID NO: 18052 - DNA, 2277 bp, synthetic construct
  source 1..2277: mol_type = other DNA
atggccttaccagtgaccgccttgctcctgccgctggccttgctgctccacgccgccaggccgctcgaggaggaggacctgaagaacgtgttcccacctgaggtggccgtgttcgagcctagcgaggccgagatcagccacacccagaaagccaccctcgtgtgcctggctaccggcttctaccccgaccatgtggaactgtcttggtgggtcaacggcaaagaggtgcacagcggcgtgtgtaccgacccccagccactgaaagaacagcccgccctgaacgacagccggtactgcctgagcagcagactgagagtgtccgccaccttctggcagaacccccggaaccacttcagatgccaggtgcagttctacggcctgagcgagaacgacgagtggacccaggacagagccaagcccgtgacccagatcgtgtctgccgaagcctggggcagagccgattgcggctttaccagcgagagctaccagcagggcgtgctgagcgccaccaacctgagcgtgatcggcttcagaatcctgctgctgaaagtggccggctttaacctgctgatgaccctgcggctgtggtccagcagggccaagcgatctggatctggagcaacaaacttctcactactcaaacaagcaggtgacgtggaggagaatcccgggcctactagcatggccttaccagtgaccgccttgctcctgccgctggccttgctgctccacgccgccaggccgatgggcagctgggaagagttcgagctgagactgaacgccatcgaggaacggctgtatgccctcggaggatctgaagccgagctggcctacttcgagtacgtgatcgccgacttcgagggcaacctgcagcggtacaaaggcaagggcaaccctgaagtggaagccctgtacttcgaggccgacgccatcttcgaggaactggtggcctacagacacaacggtaccggcggaggcggatctggcggcggaggtagcggtggcggaggatctgaattcgacatccagatgacacagagccctagcagcctgtctgccagcgtgggagacagagtgaccatcacatgcaaggccagcgaccacatcaacaactggctggcctggtatcagcagaagcctggacaggcccctaagctgctgatctacggcgctaccacactggaaacaggcgtgcccagcagattttctggcagcggctctggcaccgactacaccctgacaatatccagcctccagcctgaggacttcgccacctactactgtcagcagagctggaacaccccttggacattcggccagggcaccaagctggaaatcaagagaggcggaggcggaagtggaggcggaggatctggcggcggaggctctcaagttcagcttcaacagcctggcgctgagctggtcaaacctggcgcttctgtgaagatgagctgcaaagccagcggctacgccttcagcagctactggatcaactggatgaagcagaaacccggccagggactcgaatggatcggccaaatctatcccggcgacggcgacaccaactacaacggcaagttcaagggcagagccacactgaccgccgatacctctagcagcacagcctacatgcagctgagcagcctgaccagcgaagatagcgccgtgtacttctgtgcccggtccatcacaacagtcgtgggctgcgctatggactattggggccagggaacaagcgtgaccgtgtctagtacgcgtggacagcctaaggccaatcctaccgtgacactgttccctccaagcagcgaagaactccaggccaacaaggccacacttgtgtgcctgatctccgacttctaccctggggctgtgacagtggcttggaaggccgatggatctcctgtgaaagccggcgtggaaaccaccaagccatccaagcagagcaacaacaaatacgccgccagctcctacctgagcctgacacctgagcagtggaagtcccacagatcctacagctgccaagtgacccacgaaggcagcaccgtggaaaagacagtggcccctacagagtgcagccccatcaagaccgatgtgattacaatggaccccaaggacaactgctccaaggacgccaacgataccctgctgctccagctgaccaacaccagcgcctactacatgtacttgttgctgctgctgaagtccgtggtgtacttcgccatcatcacatgctgcctgctgcggagaaccgccttctgctgcaacggcgagaagtct

SEQ ID NO: 18053 - DNA, 2697 bp, synthetic construct
  source 1..2697: mol_type = other DNA
atggccttaccagtgaccgccttgctcctgccgctggccttgctgctccacgccgccaggccgctcgagggacagcctaaggccaatcctaccgtgacactgttccctccaagcagcgaagaactccaggccaacaaggccacacttgtgtgcctgatctccgacttctaccctggggctgtgacagtggcttggaaggccgatggatctcctgtgaaagccggcgtggaaaccaccaagccatccaagcagagcaacaacaaatacgccgccagctcctacctgagcctgacacctgagcagtggaagtcccacagatcctacagctgccaagtgacccacgaaggcagcaccgtggaaaagacagtggcccctacagagtgcagccccatcaagaccgatgtgattacaatggaccccaaggacaactgctccaaggacgccaacgataccctgctgctccagctgaccaacaccagcgcctactacatgtacttgttgctgctgctgaagtccgtggtgtacttcgccatcatcacatgctgcctgctgcggagaaccgccttctgctgcaacggcgagaagtctagggccaagcgatctggatctggagcaacaaacttctcactactcaaacaagcaggtgacgtggaggagaatcccgggcctactagcatggccttaccagtgaccgccttgctcctgccgctggccttgctgctccacgccgccaggccggacatccagatgacacagactacatcctccctgtctgcctctctgggagacagagtcaccatcagttgcagggcaagtcaggacattagtaaatatttaaattggtatcagcagaaaccagatggaactgttaaactcctgatctaccatacatcaagattacactcaggagtcccatcaaggttcagtggcagtgggtctggaacagattattctctcaccattagcaacctggagcaagaagatattgccacttacttttgccaacagggtaatacgcttccgtacacgttcggaggggggaccaagctggagatcacaggtggcggtggctcgggcggtggtgggtcgggtggcggcggatctgaggtgaaactgcaggagtcaggacctggcctggtggcgccctcacagagcctgtccgtcacatgcactgtctcaggggtctcattacccgactatggtgtaagctggattcgccagcctccacgaaagggtctggagtggctgggagtaatatggggtagtgaaaccacatactataattcagctctcaaatccagactgaccatcatcaaggacaactccaagagccaagttttcttaaaaatgaacagtctgcaaactgatgacacagccatttactactgtgccaaacattattactacggtggtagctatgctatggactactggggtcaaggaacctcagtcaccgtctcctcaacgcgtgaggaggacctgaagaacgtgttcccacctgaggtggccgtgttcgagcctagcgaggccgagatcagccacacccagaaagccaccctcgtgtgcctggctaccggcttctaccccgaccatgtggaactgtcttggtgggtcaacggcaaagaggtgcacagcggcgtgtgtaccgacccccagccactgaaagaacagcccgccctgaacgacagccggtactgcctgagcagcagactgagagtgtccgccaccttctggcagaacccccggaaccacttcagatgccaggtgcagttctacggcctgagcgagaacgacgagtggacccaggacagagccaagcccgtgacccagatcgtgtctgccgaagcctggggcagagccgattgcggctttaccagcgagagctaccagcagggcgtgctgagcgccaccaacctgagcgtgatcggcttcagaatcctgctgctgaaagtggccggctttaacctgctgatgaccctgcggctgtggtccagccgcgccaagagaagcggatctggcgtgaagcagaccctgaatttcgacctgctgaagctggctggcgacgtggaatccaacccaggcccttctagaggccatatgaccgagtacaagcccacggtgcgcctcgccacccgcgacgacgtccccagggccgtacgcaccctcgccgccgcgttcgccgactaccccgccacgcgccacaccgtcgatccggaccgccacatcgagcgggtcaccgagctgcaagaactcttcctcacgcgcgtcgggctcgacatcggcaaggtgtgggtcgcggacgacggcgccgcggtggcggtctggaccacgccggagagcgtcgaagcgggggcggtgttcgccgagatcggcccgcgcatggccgagttgagcggttcccggctggccgcgcagcaacagatggaaggcctcctggcgccgcaccggcccaaggagcccgcgtggttcctggccaccgtcggcgtctcgcccgaccaccagggcaagggtctgggcagcgccgtcgtgctccccggagtggaggcggccgagcgcgccggggtgcccgccttcctggagacctccgcgccccgcaacctccccttctacgagcggctcggcttcaccgtcaccgccgacgtcgaggtgcccgaaggaccgcgcacctggtgcatgacccgcaagcccggtgcctga

SEQ ID NO: 18054 - DNA, 2700 bp, synthetic construct
  source 1..2700: mol_type = other DNA
atggccttaccagtgaccgccttgctcctgccgctggccttgctgctccacgccgccaggccgctcgagggacagcctaaggccaatcctaccgtgacactgttccctccaagcagcgaagaactccaggccaacaaggccacacttgtgtgcctgatctccgacttctaccctggggctgtgacagtggcttggaaggccgatggatctcctgtgaaagccggcgtggaaaccaccaagccatccaagcagagcaacaacaaatacgccgccagctcctacctgagcctgacacctgagcagtggaagtcccacagatcctacagctgccaagtgacccacgaaggcagcaccgtggaaaagacagtggcccctacagagtgcagccccatcaagaccgatgtgattacaatggaccccaaggacaactgctccaaggacgccaacgataccctgctgctccagctgaccaacaccagcgcctactacatgtacttgttgctgctgctgaagtccgtggtgtacttcgccatcatcacatgctgcctgctgcggagaaccgccttctgctgcaacggcgagaagtctagggccaagcgatctggatctggagcaacaaacttctcactactcaaacaagcaggtgacgtggaggagaatcccgggcctactagcaccatggccttaccagtgaccgccttgctcctgccgctggccttgctgctccacgccgccaggccggagatcgtgatgacccagagccctgccaccctgtctctgagccctggcgaaagagccaccctgagctgtagagccagccaggacatcagcaagtacctgaactggtatcagcagaagcccggccaggcccccagactgctgatctaccacaccagcagactgcacagcggcatccccgccagattttctggctctggcagcggcaccgactacaccctgacaatcagcagcctccagcccgaggacttcgccgtgtacttctgtcagcaaggcaacaccctgccctacaccttcggccagggcaccaagctggaaatcaagggcggaggcggaagtggaggcggaggatctggcggcggaggctctcaggtgcaactccaggaatctggccctggcctcgtgaagcccagcgagacactgagcctgacctgtaccgtgtccggcgtgtccctgcctgactatggcgtgtcctggatcagacagccccctggcaagggcctggaatggatcggagtgatttggggcagcgaaaccacctactacaacagctccctgaagtccagagtgaccatctccaaggacaactccaagaaccaggtgtccctgaagctgagcagcgtgacagccgccgacaccgccgtgtattactgcgccaagcactactactacggcggcagctacgctatggactactggggccagggaaccctcgtgaccgtgtctagtacgcgtgaggaggacctgaagaacgtgttcccacctgaggtggccgtgttcgagcctagcgaggccgagatcagccacacccagaaagccaccctcgtgtgcctggctaccggcttctaccccgaccatgtggaactgtcttggtgggtcaacggcaaagaggtgcacagcggcgtgtgtaccgacccccagccactgaaagaacagcccgccctgaacgacagccggtactgcctgagcagcagactgagagtgtccgccaccttctggcagaacccccggaaccacttcagatgccaggtgcagttctacggcctgagcgagaacgacgagtggacccaggacagagccaagcccgtgacccagatcgtgtctgccgaagcctggggcagagccgattgcggctttaccagcgagagctaccagcagggcgtgctgagcgccaccaacctgagcgtgatcggcttcagaatcctgctgctgaaagtggccggctttaacctgctgatgaccctgcggctgtggtccagccgcgccaagagaagcggatctggcgtgaagcagaccctgaatttcgacctgctgaagctggctggcgacgtggaatccaacccaggcccttctagaggccatatgaccgagtacaagcccacggtgcgcctcgccacccgcgacgacgtccccagggccgtacgcaccctcgccgccgcgttcgccgactaccccgccacgcgccacaccgtcgatccggaccgccacatcgagcgggtcaccgagctgcaagaactcttcctcacgcgcgtcgggctcgacatcggcaaggtgtgggtcgcggacgacggcgccgcggtggcggtctggaccacgccggagagcgtcgaagcgggggcggtgttcgccgagatcggcccgcgcatggccgagttgagcggttcccggctggccgcgcagcaacagatggaaggcctcctggcgccgcaccggcccaaggagcccgcgtggttcctggccaccgtcggcgtctcgcccgaccaccagggcaagggtctgggcagcgccgtcgtgctccccggagtggaggcggccgagcgcgccggggtgcccgccttcctggagacctccgcgccccgcaacctccccttctacgagcggctcggcttcaccgtcaccgccgacgtcgaggtgcccgaaggaccgcgcacctggtgcatgacccgcaagcccggtgcctga

SEQ ID NO: 18055 - DNA, 2703 bp, synthetic construct
  source 1..2703: mol_type = other DNA
atggccttaccagtgaccgccttgctcctgccgctggccttgctgctccacgccgccaggccgctcgagggacagcctaaggccaatcctaccgtgacactgttccctccaagcagcgaagaactccaggccaacaaggccacacttgtgtgcctgatctccgacttctaccctggggctgtgacagtggcttggaaggccgatggatctcctgtgaaagccggcgtggaaaccaccaagccatccaagcagagcaacaacaaatacgccgccagctcctacctgagcctgacacctgagcagtggaagtcccacagatcctacagctgccaagtgacccacgaaggcagcaccgtggaaaagacagtggcccctacagagtgcagccccatcaagaccgatgtgattacaatggaccccaaggacaactgctccaaggacgccaacgataccctgctgctccagctgaccaacaccagcgcctactacatgtacttgttgctgctgctgaagtccgtggtgtacttcgccatcatcacatgctgcctgctgcggagaaccgccttctgctgcaacggcgagaagtctagggccaagcgatctggatctggagcaacaaacttctcactactcaaacaagcaggtgacgtggaggagaatcccgggcctactagcaccatggccttaccagtgaccgccttgctcctgccgctggccttgctgctccacgccgccaggccggacgagatcgtgctgacacagagccccgccaccctgtcactgtctccaggcgaaagagccaccctgagctgtagcgccagcagcagcgtgtcctacatgcactggtatcagcagaagcccggccaggcccccagactgctgatctacgataccagcaagctggcctccggcatccccgccagattttctggcagcggctccggcaccgacttcaccctgacaatcagcagcctggaacccgaggacgtggccgtgtactactgttttcaaggcagcgtgtaccccttcaccttcggccagggcaccaagctggaaatcaagagaggtggcggtggctcgggcggtggtgggtcgggtggcggcggatctcaggtgcagctccaggaatctggccctggcctcgtgaagcctagccagaccctgagcctgacctgtaccgtgtctggcggcagcatcagcacaagcggcatgggcgtgggctggatcagacagcaccctggcaagggcctggaatggatcggccacatttggtgggacgacgacaagcggtacaaccccgccctgaagtccagagtgaccatcagcgtggacaccagcaagaaccagttcagcctgaagctgagcagcgtgacagccgccgataccgccgtgtattattgcgcccggatggaactgtggtcctactacttcgactactggggccagggaaccctcgtgaccgtgtctagtacgcgtgaggaggacctgaagaacgtgttcccacctgaggtggccgtgttcgagcctagcgaggccgagatcagccacacccagaaagccaccctcgtgtgcctggctaccggcttctaccccgaccatgtggaactgtcttggtgggtcaacggcaaagaggtgcacagcggcgtgtgtaccgacccccagccactgaaagaacagcccgccctgaacgacagccggtactgcctgagcagcagactgagagtgtccgccaccttctggcagaacccccggaaccacttcagatgccaggtgcagttctacggcctgagcgagaacgacgagtggacccaggacagagccaagcccgtgacccagatcgtgtctgccgaagcctggggcagagccgattgcggctttaccagcgagagctaccagcagggcgtgctgagcgccaccaacctgagcgtgatcggcttcagaatcctgctgctgaaagtggccggctttaacctgctgatgaccctgcggctgtggtccagccgcgccaagagaagcggatctggcgtgaagcagaccctgaatttcgacctgctgaagctggctggcgacgtggaatccaacccaggcccttctagaggccatatgaccgagtacaagcccacggtgcgcctcgccacccgcgacgacgtccccagggccgtacgcaccctcgccgccgcgttcgccgactaccccgccacgcgccacaccgtcgatccggaccgccacatcgagcgggtcaccgagctgcaagaactcttcctcacgcgcgtcgggctcgacatcggcaaggtgtgggtcgcggacgacggcgccgcggtggcggtctggaccacgccggagagcgtcgaagcgggggcggtgttcgccgagatcggcccgcgcatggccgagttgagcggttcccggctggccgcgcagcaacagatggaaggcctcctggcgccgcaccggcccaaggagcccgcgtggttcctggccaccgtcggcgtctcgcccgaccaccagggcaagggtctgggcagcgccgtcgtgctccccggagtggaggcggccgagcgcgccggggtgcccgccttcctggagacctccgcgccccgcaacctccccttctacgagcggctcggcttcaccgtcaccgccgacgtcgaggtgcccgaaggaccgcgcacctggtgcatgacccgcaagcccggtgcctga

SEQ ID NO: 18056 - DNA, 2691 bp, synthetic construct
  source 1..2691: mol_type = other DNA
atggccttaccagtgaccgccttgctcctgccgctggccttgctgctccacgccgccaggccgctcgagggacagcctaaggccaatcctaccgtgacactgttccctccaagcagcgaagaactccaggccaacaaggccacacttgtgtgcctgatctccgacttctaccctggggctgtgacagtggcttggaaggccgatggatctcctgtgaaagccggcgtggaaaccaccaagccatccaagcagagcaacaacaaatacgccgccagctcctacctgagcctgacacctgagcagtggaagtcccacagatcctacagctgccaagtgacccacgaaggcagcaccgtggaaaagacagtggcccctacagagtgcagccccatcaagaccgatgtgattacaatggaccccaaggacaactgctccaaggacgccaacgataccctgctgctccagctgaccaacaccagcgcctactacatgtacttgttgctgctgctgaagtccgtggtgtacttcgccatcatcacatgctgcctgctgcggagaaccgccttctgctgcaacggcgagaagtctagggccaagcgatctggatctggagcaacaaacttctcactactcaaacaagcaggtgacgtggaggagaatcccgggcctactagcatggccttaccagtgaccgccttgctcctgccgctggccttgctgctccacgccgccaggccggacatccagatgacacagagccctagcagcctgtctgccagcgtgggagacagagtgaccatcacctgtagagccagccaggacatcagcaactacctgaactggtatcagcagaagcccggcaaggcccctaagctgctgatctactacaccagcagactgcacagcggcgtgcccagcagattttctggctctggcagcggcaccgacttcaccctgacaatatctagcctccagcctgaggacttcgccacctactattgccagcagggcaacaccctgccttacacatttggacagggcaccaaggtggaaatcaagagaggcggaggcggaagtggaggcggaggatctggcggcggaggctctgaagtgcagctggttgaatcaggtggcggcctggttcaacctggcggatctctgagactgagctgtgccgccagcggcttcaccttcagcgactactttatgagctgggtccgacaggcccctggcaaaggacttgaatgggtcgccaccatcagcaatggcggcacctacacttactaccccgacagcgtgaagggcagattcaccatctccagagacaacagcaagaacaccctgtacctccagatgaactccctgagagccgaggacaccgccgtgtactactgcgccagattcgacggctacatcttcgactattggggccagggcaccctggtcacagtctcttctacgcgtgaggaggacctgaagaacgtgttcccacctgaggtggccgtgttcgagcctagcgaggccgagatcagccacacccagaaagccaccctcgtgtgcctggctaccggcttctaccccgaccatgtggaactgtcttggtgggtcaacggcaaagaggtgcacagcggcgtgtgtaccgacccccagccactgaaagaacagcccgccctgaacgacagccggtactgcctgagcagcagactgagagtgtccgccaccttctggcagaacccccggaaccacttcagatgccaggtgcagttctacggcctgagcgagaacgacgagtggacccaggacagagccaagcccgtgacccagatcgtgtctgccgaagcctggggcagagccgattgcggctttaccagcgagagctaccagcagggcgtgctgagcgccaccaacctgagcgtgatcggcttcagaatcctgctgctgaaagtggccggctttaacctgctgatgaccctgcggctgtggtccagccgcgccaagagaagcggatctggcgtgaagcagaccctgaatttcgacctgctgaagctggctggcgacgtggaatccaacccaggcccttctagaggccatatgaccgagtacaagcccacggtgcgcctcgccacccgcgacgacgtccccagggccgtacgcaccctcgccgccgcgttcgccgactaccccgccacgcgccacaccgtcgatccggaccgccacatcgagcgggtcaccgagctgcaagaactcttcctcacgcgcgtcgggctcgacatcggcaaggtgtgggtcgcggacgacggcgccgcggtggcggtctggaccacgccggagagcgtcgaagcgggggcggtgttcgccgagatcggcccgcgcatggccgagttgagcggttcccggctggccgcgcagcaacagatggaaggcctcctggcgccgcaccggcccaaggagcccgcgtggttcctggccaccgtcggcgtctcgcccgaccaccagggcaagggtctgggcagcgccgtcgtgctccccggagtggaggcggccgagcgcgccggggtgcccgccttcctggagacctccgcgccccgcaacctccccttctacgagcggctcggcttcaccgtcaccgccgacgtcgaggtgcccgaaggaccgcgcacctggtgcatgacccgcaagcccggtgcctga

SEQ ID NO: 18057 - DNA, 2703 bp, synthetic construct
  source 1..2703: mol_type = other DNA
atggccttaccagtgaccgccttgctcctgccgctggccttgctgctccacgccgccaggccgctcgagggacagcctaaggccaatcctaccgtgacactgttccctccaagcagcgaagaactccaggccaacaaggccacacttgtgtgcctgatctccgacttctaccctggggctgtgacagtggcttggaaggccgatggatctcctgtgaaagccggcgtggaaaccaccaagccatccaagcagagcaacaacaaatacgccgccagctcctacctgagcctgacacctgagcagtggaagtcccacagatcctacagctgccaagtgacccacgaaggcagcaccgtggaaaagacagtggcccctacagagtgcagccccatcaagaccgatgtgattacaatggaccccaaggacaactgctccaaggacgccaacgataccctgctgctccagctgaccaacaccagcgcctactacatgtacttgttgctgctgctgaagtccgtggtgtacttcgccatcatcacatgctgcctgctgcggagaaccgccttctgctgcaacggcgagaagtctagggccaagcgatctggatctggagcaacaaacttctcactactcaaacaagcaggtgacgtggaggagaatcccgggcctactagcatggccttaccagtgaccgccttgctcctgccgctggccttgctgctccacgccgccaggccggacatccagatgacacagagccctagcagcctgtctgccagcgtgggagacagagtgaccatcacatgcaaggccagcgaccacatcaacaactggctggcctggtatcagcagaagcctggacaggcccctaagctgctgatctacggcgctaccacactggaaacaggcgtgcccagcagattttctggcagcggctctggcaccgactacaccctgacaatatccagcctccagcctgaggacttcgccacctactactgtcagcagagctggaacaccccttggacattcggccagggcaccaagctggaaatcaagagaggcggaggcggaagtggaggcggaggatctggcggcggaggctctcaagttcagcttcaacagcctggcgctgagctggtcaaacctggcgcttctgtgaagatgagctgcaaagccagcggctacgccttcagcagctactggatcaactggatgaagcagaaacccggccagggactcgaatggatcggccaaatctatcccggcgacggcgacaccaactacaacggcaagttcaagggcagagccacactgaccgccgatacctctagcagcacagcctacatgcagctgagcagcctgaccagcgaagatagcgccgtgtacttctgtgcccggtccatcacaacagtcgtgggctgcgctatggactattggggccagggaacaagcgtgaccgtgtctagtacgcgtgaggaggacctgaagaacgtgttcccacctgaggtggccgtgttcgagcctagcgaggccgagatcagccacacccagaaagccaccctcgtgtgcctggctaccggcttctaccccgaccatgtggaactgtcttggtgggtcaacggcaaagaggtgcacagcggcgtgtgtaccgacccccagccactgaaagaacagcccgccctgaacgacagccggtactgcctgagcagcagactgagagtgtccgccaccttctggcagaacccccggaaccacttcagatgccaggtgcagttctacggcctgagcgagaacgacgagtggacccaggacagagccaagcccgtgacccagatcgtgtctgccgaagcctggggcagagccgattgcggctttaccagcgagagctaccagcagggcgtgctgagcgccaccaacctgagcgtgatcggcttcagaatcctgctgctgaaagtggccggctttaacctgctgatgaccctgcggctgtggtccagccgcgccaagagaagcggatctggcgtgaagcagaccctgaatttcgacctgctgaagctggctggcgacgtggaatccaacccaggcccttctagaggccatatgaccgagtacaagcccacggtgcgcctcgccacccgcgacgacgtccccagggccgtacgcaccctcgccgccgcgttcgccgactaccccgccacgcgccacaccgtcgatccggaccgccacatcgagcgggtcaccgagctgcaagaactcttcctcacgcgcgtcgggctcgacatcggcaaggtgtgggtcgcggacgacggcgccgcggtggcggtctggaccacgccggagagcgtcgaagcgggggcggtgttcgccgagatcggcccgcgcatggccgagttgagcggttcccggctggccgcgcagcaacagatggaaggcctcctggcgccgcaccggcccaaggagcccgcgtggttcctggccaccgtcggcgtctcgcccgaccaccagggcaagggtctgggcagcgccgtcgtgctccccggagtggaggcggccgagcgcgccggggtgcccgccttcctggagacctccgcgccccgcaacctccccttctacgagcggctcggcttcaccgtcaccgccgacgtcgaggtgcccgaaggaccgcgcacctggtgcatgacccgcaagcccggtgcctga

SEQ ID NO: 18058 - DNA, 2709 bp, synthetic construct
  source 1..2709: mol_type = other DNA
atggccttaccagtgaccgccttgctcctgccgctggccttgctgctccacgccgccaggccgctcgagggacagcctaaggccaatcctaccgtgacactgttccctccaagcagcgaagaactccaggccaacaaggccacacttgtgtgcctgatctccgacttctaccctggggctgtgacagtggcttggaaggccgatggatctcctgtgaaagccggcgtggaaaccaccaagccatccaagcagagcaacaacaaatacgccgccagctcctacctgagcctgacacctgagcagtggaagtcccacagatcctacagctgccaagtgacccacgaaggcagcaccgtggaaaagacagtggcccctacagagtgcagccccatcaagaccgatgtgattacaatggaccccaaggacaactgctccaaggacgccaacgataccctgctgctccagctgaccaacaccagcgcctactacatgtacttgttgctgctgctgaagtccgtggtgtacttcgccatcatcacatgctgcctgctgcggagaaccgccttctgctgcaacggcgagaagtctagggccaagcgatctggatctggagcaacaaacttctcactactcaaacaagcaggtgacgtggaggagaatcccgggcctactagcatggccttaccagtgaccgccttgctcctgccgctggccttgctgctccacgccgccaggccgcagatcgtgctgtctcagtctcctgccatcctgagcgcttccccaggcgagaaagtgaccatgacctgtagagccagcagcagcgtgtcctacatgcactggtatcagcagaagcccggcagcagccctaagccttggatctacgccaccagcaatctggcctctggcgtgccagccagattttctggctctggcagcggcaccagctacagcttcacaatcagcagagtggaagccgaggacgccgccacctactattgtcagcagtggaccttcaatcctcctaccttcggcggaggcacccggctggaaatcaaaagaacagtggctgctggcggaggcggaagtggaggcggaggatctggcggcggaggctctcaggcttatctgcaacagagcggagccgaactcgtcagacctggcgcttctgtgaagatgagctgcaaggccagcggctacaccttcaccagctataatatgcactgggtcaagcagacccctcggcagggactcgaatggatcggcggaatctatcccggcaacggcgacacctcctacaaccagaagttcaagggcaaagccacactgaccgtgggcaagagcagcagcaccgcctatatgcagctcagcagcctgaccagcgaggacagcgccgtgtacttctgcgccagatacgactacaactacgctatggactactggggccagggcaccagcgtgacagttagctctgccagcacgcgtgaggaggacctgaagaacgtgttcccacctgaggtggccgtgttcgagcctagcgaggccgagatcagccacacccagaaagccaccctcgtgtgcctggctaccggcttctaccccgaccatgtggaactgtcttggtgggtcaacggcaaagaggtgcacagcggcgtgtgtaccgacccccagccactgaaagaacagcccgccctgaacgacagccggtactgcctgagcagcagactgagagtgtccgccaccttctggcagaacccccggaaccacttcagatgccaggtgcagttctacggcctgagcgagaacgacgagtggacccaggacagagccaagcccgtgacccagatcgtgtctgccgaagcctggggcagagccgattgcggctttaccagcgagagctaccagcagggcgtgctgagcgccaccaacctgagcgtgatcggcttcagaatcctgctgctgaaagtggccggctttaacctgctgatgaccctgcggctgtggtccagccgcgccaagagaagcggatctggcgtgaagcagaccctgaatttcgacctgctgaagctggctggcgacgtggaatccaacccaggcccttctagaggccatatgaccgagtacaagcccacggtgcgcctcgccacccgcgacgacgtccccagggccgtacgcaccctcgccgccgcgttcgccgactaccccgccacgcgccacaccgtcgatccggaccgccacatcgagcgggtcaccgagctgcaagaactcttcctcacgcgcgtcgggctcgacatcggcaaggtgtgggtcgcggacgacggcgccgcggtggcggtctggaccacgccggagagcgtcgaagcgggggcggtgttcgccgagatcggcccgcgcatggccgagttgagcggttcccggctggccgcgcagcaacagatggaaggcctcctggcgccgcaccggcccaaggagcccgcgtggttcctggccaccgtcggcgtctcgcccgaccaccagggcaagggtctgggcagcgccgtcgtgctccccggagtggaggcggccgagcgcgccggggtgcccgccttcctggagacctccgcgccccgcaacctccccttctacgagcggctcggcttcaccgtcaccgccgacgtcgaggtgcccgaaggaccgcgcacctggtgcatgacccgcaagcccggtgcctga

SEQ ID NO: 18059 - DNA, 2703 bp, synthetic construct
  source 1..2703: mol_type = other DNA
atggccttaccagtgaccgccttgctcctgccgctggccttgctgctccacgccgccaggccgctcgagggacagcctaaggccaatcctaccgtgacactgttccctccaagcagcgaagaactccaggccaacaaggccacacttgtgtgcctgatctccgacttctaccctggggctgtgacagtggcttggaaggccgatggatctcctgtgaaagccggcgtggaaaccaccaagccatccaagcagagcaacaacaaatacgccgccagctcctacctgagcctgacacctgagcagtggaagtcccacagatcctacagctgccaagtgacccacgaaggcagcaccgtggaaaagacagtggcccctacagagtgcagccccatcaagaccgatgtgattacaatggaccccaaggacaactgctccaaggacgccaacgataccctgctgctccagctgaccaacaccagcgcctactacatgtacttgttgctgctgctgaagtccgtggtgtacttcgccatcatcacatgctgcctgctgcggagaaccgccttctgctgcaacggcgagaagtctagggccaagcgatctggatctggagcaacaaacttctcactactcaaacaagcaggtgacgtggaggagaatcccgggcctactagcatggccttaccagtgaccgccttgctcctgccgctggccttgctgctccacgccgccaggccggagatcgtgctgacacagagccctgccaccctgtctctgagccctggcgaaagagccaccctgagctgtagagccagccagagcgtgtccagctacctggcctggtatcagcagaagcccggccaggctccccggctgctgatctacgatgccagcaatagagccaccggcatccccgccagattttccggctctggcagcggcaccgacttcaccctgaccatcagctccctggaacccgaggacttcgccgtgtactactgccagcagcggagcaactggcccatcacattcggccagggcacccggctggaaatcaaaggcggaggcggaagtggaggcggaggatctggcggcggaggctctgaggtgcagcttgttgagtctggcggaggactggtgcagcccgatagaagcctgagactgtcttgtgccgccagcggcttcaccttccacgattatgccatgcactgggtccgacaggcccctggcaaaggacttgaatgggtgtccaccatctcttggaacagcggcacaatcggctacgccgactctgtgaagggcagattcaccatcagccgggacaacgccaagaacagcctgtacctccagatgaactccctgagagccgaggacacagccctgtactactgcgccaaggacatccagtacggcaactactactacggcatggacgtgtggggccagggcacaacagtgacagtctcttctacgcgtgaggaggacctgaagaacgtgttcccacctgaggtggccgtgttcgagcctagcgaggccgagatcagccacacccagaaagccaccctcgtgtgcctggctaccggcttctaccccgaccatgtggaactgtcttggtgggtcaacggcaaagaggtgcacagcggcgtgtgtaccgacccccagccactgaaagaacagcccgccctgaacgacagccggtactgcctgagcagcagactgagagtgtccgccaccttctggcagaacccccggaaccacttcagatgccaggtgcagttctacggcctgagcgagaacgacgagtggacccaggacagagccaagcccgtgacccagatcgtgtctgccgaagcctggggcagagccgattgcggctttaccagcgagagctaccagcagggcgtgctgagcgccaccaacctgagcgtgatcggcttcagaatcctgctgctgaaagtggccggctttaacctgctgatgaccctgcggctgtggtccagccgcgccaagagaagcggatctggcgtgaagcagaccctgaatttcgacctgctgaagctggctggcgacgtggaatccaacccaggcccttctagaggccatatgaccgagtacaagcccacggtgcgcctcgccacccgcgacgacgtccccagggccgtacgcaccctcgccgccgcgttcgccgactaccccgccacgcgccacaccgtcgatccggaccgccacatcgagcgggtcaccgagctgcaagaactcttcctcacgcgcgtcgggctcgacatcggcaaggtgtgggtcgcggacgacggcgccgcggtggcggtctggaccacgccggagagcgtcgaagcgggggcggtgttcgccgagatcggcccgcgcatggccgagttgagcggttcccggctggccgcgcagcaacagatggaaggcctcctggcgccgcaccggcccaaggagcccgcgtggttcctggccaccgtcggcgtctcgcccgaccaccagggcaagggtctgggcagcgccgtcgtgctccccggagtggaggcggccgagcgcgccggggtgcccgccttcctggagacctccgcgccccgcaacctccccttctacgagcggctcggcttcaccgtcaccgccgacgtcgaggtgcccgaaggaccgcgcacctggtgcatgacccgcaagcccggtgcctga

SEQ ID NO: 18060 - DNA, 2697 bp, synthetic construct
  source 1..2697: mol_type = other DNA
atggccttaccagtgaccgccttgctcctgccgctggccttgctgctccacgccgccaggccgctcgagggacagcctaaggccaatcctaccgtgacactgttccctccaagcagcgaagaactccaggccaacaaggccacacttgtgtgcctgatctccgacttctaccctggggctgtgacagtggcttggaaggccgatggatctcctgtgaaagccggcgtggaaaccaccaagccatccaagcagagcaacaacaaatacgccgccagctcctacctgagcctgacacctgagcagtggaagtcccacagatcctacagctgccaagtgacccacgaaggcagcaccgtggaaaagacagtggcccctacagagtgcagccccatcaagaccgatgtgattacaatggaccccaaggacaactgctccaaggacgccaacgataccctgctgctccagctgaccaacaccagcgcctactacatgtacttgttgctgctgctgaagtccgtggtgtacttcgccatcatcacatgctgcctgctgcggagaaccgccttctgctgcaacggcgagaagtctagggccaagcgatctggatctggagcaacaaacttctcactactcaaacaagcaggtgacgtggaggagaatcccgggcctactagcatggccttaccagtgaccgccttgctcctgccgctggccttgctgctccacgccgccaggccggacatccagatgacccagagccccagcagcctgtctgccagcgtgggcgacagagtgaccatcacctgtagagccagccaggacgtgaacaccgccgtggcctggtatcagcagaagcctggcaaggcccccaagctgctgatctacagcgccagcttcctggaaagcggcgtgcccagcagattcagcggaagcagaagcggcaccgacttcaccctgaccatcagctccctccagcccgaggacttcgccacctactactgccagcagcactacaccacccctcccaccttcggccagaccaaggtggaaatcaagagaggcggaggcggaagtggaggcggaggatctggcggcggaggctctgaagtgcaactggtggaatctggcggcggactggtgcagcctggcggatctctgagactgagctgtgccgccagcggcttcaacatcaaggacacctacatccactgggtgcgccaggcccctggaaagggactggaatgggtggcccggatctaccccaccaacggctacaccagatacgccgacagcgtgaagggccggttcaccatcagcgccgacaccagcaagaataccgcctacctccagatgaacagcctgcgggccgaggataccgccgtgtactactgctcaagatggggaggcgacggcttctacgctatggacgtgtggggccagggcacccttgtgaccgtgtcatctacgcgtgaggaggacctgaagaacgtgttcccacctgaggtggccgtgttcgagcctagcgaggccgagatcagccacacccagaaagccaccctcgtgtgcctggctaccggcttctaccccgaccatgtggaactgtcttggtgggtcaacggcaaagaggtgcacagcggcgtgtgtaccgacccccagccactgaaagaacagcccgccctgaacgacagccggtactgcctgagcagcagactgagagtgtccgccaccttctggcagaacccccggaaccacttcagatgccaggtgcagttctacggcctgagcgagaacgacgagtggacccaggacagagccaagcccgtgacccagatcgtgtctgccgaagcctggggcagagccgattgcggctttaccagcgagagctaccagcagggcgtgctgagcgccaccaacctgagcgtgatcggcttcagaatcctgctgctgaaagtggccggctttaacctgctgatgaccctgcggctgtggtccagccgcgccaagagaagcggatctggcgtgaagcagaccctgaatttcgacctgctgaagctggctggcgacgtggaatccaacccaggcccttctagaggccatatgaccgagtacaagcccacggtgcgcctcgccacccgcgacgacgtccccagggccgtacgcaccctcgccgccgcgttcgccgactaccccgccacgcgccacaccgtcgatccggaccgccacatcgagcgggtcaccgagctgcaagaactcttcctcacgcgcgtcgggctcgacatcggcaaggtgtgggtcgcggacgacggcgccgcggtggcggtctggaccacgccggagagcgtcgaagcgggggcggtgttcgccgagatcggcccgcgcatggccgagttgagcggttcccggctggccgcgcagcaacagatggaaggcctcctggcgccgcaccggcccaaggagcccgcgtggttcctggccaccgtcggcgtctcgcccgaccaccagggcaagggtctgggcagcgccgtcgtgctccccggagtggaggcggccgagcgcgccggggtgcccgccttcctggagacctccgcgccccgcaacctccccttctacgagcggctcggcttcaccgtcaccgccgacgtcgaggtgcccgaaggaccgcgcacctggtgcatgacccgcaagcccggtgcctga

SEQ ID NO: 18061 - DNA, 2334 bp, synthetic construct
  source 1..2334: mol_type = other DNA
atggccttaccagtgaccgccttgctcctgccgctggccttgctgctccacgccgccaggccgctcgagggacagcctaaggccaatcctaccgtgacactgttccctccaagcagcgaagaactccaggccaacaaggccacacttgtgtgcctgatctccgacttctaccctggggctgtgacagtggcttggaaggccgatggatctcctgtgaaagccggcgtggaaaccaccaagccatccaagcagagcaacaacaaatacgccgccagctcctacctgagcctgacacctgagcagtggaagtcccacagatcctacagctgccaagtgacccacgaaggcagcaccgtggaaaagacagtggcccctacagagtgcagccccatcaagaccgatgtgattacaatggaccccaaggacaactgctccaaggacgccaacgataccctgctgctccagctgaccaacaccagcgcctactacatgtacttgttgctgctgctgaagtccgtggtgtacttcgccatcatcacatgctgcctgctgcggagaaccgccttctgctgcaacggcgagaagtctagggccaagcgatctggatctggagcaacaaacttctcactactcaaacaagcaggtgacgtggaggagaatcccgggcctactagcatggccctgcccgtgacagccctgctgctgcctctggctctgctgctgcacgccgccagacccgatgaattcgaggtgcaactggtggaaagcggcggaggcctggtgcaggctggcggatctctgagactgagctgtgccgccagcggcatcaccttcagcatcaacacaatgggctggtacagacaggcccctggcaagcagagggaactggtggccctgatctccagcatcggcgacacctactacgccgacagcgtgaagggccggttcaccatcagccgggacaacgccaagaacaccgtgtacctccagatgaacagcctgaagcccgaggacaccgccgtgtactactgcaagcggttcagaacagccgcccagggcaccgattattggggccagggaacacaagtgaccgtgtcctctacgcgtgaggaggacctgaagaacgtgttcccacctgaggtggccgtgttcgagcctagcgaggccgagatcagccacacccagaaagccaccctcgtgtgcctggctaccggcttctaccccgaccatgtggaactgtcttggtgggtcaacggcaaagaggtgcacagcggcgtgtgtaccgacccccagccactgaaagaacagcccgccctgaacgacagccggtactgcctgagcagcagactgagagtgtccgccaccttctggcagaacccccggaaccacttcagatgccaggtgcagttctacggcctgagcgagaacgacgagtggacccaggacagagccaagcccgtgacccagatcgtgtctgccgaagcctggggcagagccgattgcggctttaccagcgagagctaccagcagggcgtgctgagcgccaccaacctgagcgtgatcggcttcagaatcctgctgctgaaagtggccggctttaacctgctgatgaccctgcggctgtggtccagccgcgccaagagaagcggatctggcgtgaagcagaccctgaatttcgacctgctgaagctggctggcgacgtggaatccaacccaggcccttctagaggccatatgaccgagtacaagcccacggtgcgcctcgccacccgcgacgacgtccccagggccgtacgcaccctcgccgccgcgttcgccgactaccccgccacgcgccacaccgtcgatccggaccgccacatcgagcgggtcaccgagctgcaagaactcttcctcacgcgcgtcgggctcgacatcggcaaggtgtgggtcgcggacgacggcgccgcggtggcggtctggaccacgccggagagcgtcgaagcgggggcggtgttcgccgagatcggcccgcgcatggccgagttgagcggttcccggctggccgcgcagcaacagatggaaggcctcctggcgccgcaccggcccaaggagcccgcgtggttcctggccaccgtcggcgtctcgcccgaccaccagggcaagggtctgggcagcgccgtcgtgctccccggagtggaggcggccgagcgcgccggggtgcccgccttcctggagacctccgcgccccgcaacctccccttctacgagcggctcggcttcaccgtcaccgccgacgtcgaggtgcccgaaggaccgcgcacctggtgcatgacccgcaagcccggtgcctga

SEQ ID NO: 18062 - DNA, 2334 bp, synthetic construct; identical to SEQ ID NO: 18061
  source 1..2334: mol_type = other DNA

SEQ ID NO: 18063 - DNA, 3129 bp, synthetic construct
  source 1..3129: mol_type = other DNA
atggccttaccagtgaccgccttgctcctgccgctggccttgctgctccacgccgccaggccgctcgagggacagcctaaggccaatcctaccgtgacactgttccctccaagcagcgaagaactccaggccaacaaggccacacttgtgtgcctgatctccgacttctaccctggggctgtgacagtggcttggaaggccgatggatctcctgtgaaagccggcgtggaaaccaccaagccatccaagcagagcaacaacaaatacgccgccagctcctacctgagcctgacacctgagcagtggaagtcccacagatcctacagctgccaagtgacccacgaaggcagcaccgtggaaaagacagtggcccctacagagtgcagccccatcaagaccgatgtgattacaatggaccccaaggacaactgctccaaggacgccaacgataccctgctgctccagctgaccaacaccagcgcctactacatgtacttgttgctgctgctgaagtccgtggtgtacttcgccatcatcacatgctgcctgctgcggagaaccgccttctgctgcaacggcgagaagtctagggccaagcgatctggatctggagcaacaaacttctcactactcaaacaagcaggtgacgtggaggagaatcccgggcctactagcatggccttaccagtgaccgccttgctcctgccgctggccttgctgctccacgccgccaggccgcaggtccagctcgtcgagtccggcggcggcctcgtccaggccggcgactccgtcaccctctcctgcaccgcctccggccgcaccttctcctcctacgccctcgcctggttccgccagcgccccggcaaggagcgcgagttcgtcgccggcctccgctggggcggccccaccaactacgccgactccgtcaaggaccgcttcaccatctccggcgactccgccaagcacaccatgtacctccagatgaactccctcaagcccgaggacaccgccgtctactactgcggctacaaccccggcggctgggccgtcccctcccagtacgagtacgactcctggggccagggcacccaggtcaccgtctcctccggtaccggcggaggcggatctggcggcggaggtagcggtggcggaggatctgaattcgacatccagatgacacagagccctagcagcctgtctgccagcgtgggagacagagtgaccatcacatgcaaggccagcgaccacatcaacaactggctggcctggtatcagcagaagcctggacaggcccctaagctgctgatctacggcgctaccacactggaaacaggcgtgcccagcagattttctggcagcggctctggcaccgactacaccctgacaatatccagcctccagcctgaggacttcgccacctactactgtcagcagagctggaacaccccttggacattcggccagggcaccaagctggaaatcaagagaggcggaggcggaagtggaggcggaggatctggcggcggaggctctcaagttcagcttcaacagcctggcgctgagctggtcaaacctggcgcttctgtgaagatgagctgcaaagccagcggctacgccttcagcagctactggatcaactggatgaagcagaaacccggccagggactcgaatggatcggccaaatctatcccggcgacggcgacaccaactacaacggcaagttcaagggcagagccacactgaccgccgatacctctagcagcacagcctacatgcagctgagcagcctgaccagcgaagatagcgccgtgtacttctgtgcccggtccatcacaacagtcgtgggctgcgctatggactattggggccagggaacaagcgtgaccgtgtctagtacgcgtgaggaggacctgaagaacgtgttcccacctgaggtggccgtgttcgagcctagcgaggccgagatcagccacacccagaaagccaccctcgtgtgcctggctaccggcttctaccccgaccatgtggaactgtcttggtgggtcaacggcaaagaggtgcacagcggcgtgtgtaccgacccccagccactgaaagaacagcccgccctgaacgacagccggtactgcctgagcagcagactgagagtgtccgccaccttctggcagaacccccggaaccacttcagatgccaggtgcagttctacggcctgagcgagaacgacgagtggacccaggacagagccaagcccgtgacccagatcgtgtctgccgaagcctggggcagagccgattgcggctttaccagcgagagctaccagcagggcgtgctgagcgccaccaacctgagcgtgatcggcttcagaatcctgctgctgaaagtggccggctttaacctgctgatgaccctgcggctgtggtccagccgcgccaagagaagcggatctggcgtgaagcagaccctgaatttcgacctgctgaagctggctggcgacgtggaatccaacccaggcccttctagaggccatatgaccgagtacaagcccacggtgcgcctcgccacccgcgacgacgtccccagggccgtacgcaccctcgccgccgcgttcgccgactaccccgccacgcgccacaccgtcgatccggaccgccacatcgagcgggtcaccgagctgcaagaactcttcctcacgcgcgtcgggctcgacatcggcaaggtgtgggtcgcggacgacggcgccgcggtggcggtctggaccacgccggagagcgtcgaagcgggggcggtgttcgccgagatcggcccgcgcatggccgagttgagcggttcccggctggccgcgcagcaacagatggaaggcctcctggcgccgcaccggcccaaggagcccgcgtggttcctggccaccgtcggcgtctcgcccgaccaccagggcaagggtctgggcagcgccgtcgtgctccccggagtggaggcggccgagcgcgccggggtgcccgccttcctggagacctccgcgccccgcaacctccccttctacgagcggctcggcttcaccgtcaccgccgacgtcgaggtgcccgaaggaccgcgcacctggtgcatgacccgcaagcccggtgcctga

SEQ ID NO: 18064 - DNA, 3516 bp, synthetic construct
  source 1..3516: mol_type = other DNA
atggccttaccagtgaccgccttgctcctgccgctggccttgctgctccacgccgccaggccgctcgagggacagcctaaggccaatcctaccgtgacactgttccctccaagcagcgaagaactccaggccaacaaggccacacttgtgtgcctgatctccgacttctaccctggggctgtgacagtggcttggaaggccgatggatctcctgtgaaagccggcgtggaaaccaccaagccatccaagcagagcaacaacaaatacgccgccagctcctacctgagcctgacacctgagcagtggaagtcccacagatcctacagctgccaagtgacccacgaaggcagcaccgtggaaaagacagtggcccctacagagtgcagccccatcaagaccgatgtgattacaatggaccccaaggacaactgctccaaggacgccaacgataccctgctgctccagctgaccaacaccagcgcctactacatgtacttgttgctgctgctgaagtccgtggtgtacttcgccatcatcacatgctgcctgctgcggagaaccgccttctgctgcaacggcgagaagtctagggccaagcgatctggatctggagcaacaaacttctcactactcaaacaagcaggtgacgtggaggagaatcccgggcctactagcatggccttaccagtgaccgccttgctcctgccgctggccttgctgctccacgccgccaggccggaggttcagctgcttgagtctggcggaggactggttcaacctggcggaagcctgagactgtcttgtgccgccagcggcttcacctttagcagctacgccatgagctgggtccgacaggctcctggcaaaggactggaatgggtgtccagcatcagcggcagcggcgactacatctactacgccgatagcgtgaagggcagattcaccatcagccgggacatcagcaagaacaccctgtacctccagatgaacagcctgagagccgaggacaccgccgtgtactactgtgccaaagaaggcaccggcgctaacagcagcctggccgattatagaggccagggcacactggtcaccgtgtctagtggcggaggaagcggcggaggatctcaggtccagctcgtcgagtccggcggcggcctcgtccaggccggcgactccgtcaccctctcctgcaccgcctccggccgcaccttctcctcctacgccctcgcctggttccgccagcgccccggcaaggagcgcgagttcgtcgccggcctccgctggggcggccccaccaactacgccgactccgtcaaggaccgcttcaccatctccggcgactccgccaagcacaccatgtacctccagatgaactccctcaagcccgaggacaccgccgtctactactgcggctacaaccccggcggctgggccgtcccctcccagtacgagtacgactcctggggccagggcacccaggtcaccgtctcctccggtaccggcggaggcggatctggcggcggaggtagcggtggcggaggatctgaattcgacatccagatgacacagagccctagcagcctgtctgccagcgtgggagacagagtgaccatcacatgcaaggccagcgaccacatcaacaactggctggcctggtatcagcagaagcctggacaggcccctaagctgctgatctacggcgctaccacactggaaacaggcgtgcccagcagattttctggcagcggctctggcaccgactacaccctgacaatatccagcctccagcctgaggacttcgccacctactactgtcagcagagctggaacaccccttggacattcggccagggcaccaagctggaaatcaagagaggcggaggcggaagtggaggcggaggatctggcggcggaggctctcaagttcagcttcaacagcctggcgctgagctggtcaaacctggcgcttctgtgaagatgagctgcaaagccagcggctacgccttcagcagctactggatcaactggatgaagcagaaacccggccagggactcgaatggatcggccaaatctatcccggcgacggcgacaccaactacaacggcaagttcaagggcagagccacactgaccgccgatacctctagcagcacagcctacatgcagctgagcagcctgaccagcgaagatagcgccgtgtacttctgtgcccggtccatcacaacagtcgtgggctgcgctatggactattggggccagggaacaagcgtgaccgtgtctagtacgcgtgaggaggacctgaagaacgtgttcccacctgaggtggccgtgttcgagcctagcgaggccgagatcagccacacccagaaagccaccctcgtgtgcctggctaccggcttctaccccgaccatgtggaactgtcttggtgggtcaacggcaaagaggtgcacagcggcgtgtgtaccgacccccagccactgaaagaacagcccgccctgaacgacagccggtactgcctgagcagcagactgagagtgtccgccaccttctggcagaacccccggaaccacttcagatgccaggtgcagttctacggcctgagcgagaacgacgagtggacccaggacagagccaagcccgtgacccagatcgtgtctgccgaagcctggggcagagccgattgcggctttaccagcgagagctaccagcagggcgtgctgagcgccaccaacctgagcgtgatcggcttcagaatcctgctgctgaaagtggccggctttaacctgctgatgaccctgcggctgtggtccagccgcgccaagagaagcggatctggcgtgaagcagaccctgaatttcgacctgctgaagctggctggcgacgtggaatccaacccaggcccttctagaggccatatgaccgagtacaagcccacggtgcgcctcgccacccgcgacgacgtccccagggccgtacgcaccctcgccgccgcgttcgccgactaccccgccacgcgccacaccgtcgatccggaccgccacatcgagcgggtcaccgagctgcaagaactcttcctcacgcgcgtcgggctcgacatcggcaaggtgtgggtcgcggacgacggcgccgcggtggcggtctggaccacgccggagagcgtcgaagcgggggcggtgttcgccgagatcggcccgcgcatggccgagttgagcggttcccggctggccgcgcagcaacagatggaaggcctcctggcgccgcaccggcccaaggagcccgcgtggttcctggccaccgtcggcgtctcgcccgaccaccagggcaagggtctgggcagcgccgtcgtgctccccggagtggaggcggccgagcgcgccggggtgcccgccttcctggagacctccgcgccccgcaacctccccttctacgagcggctcggcttcaccgtcaccgccgacgtcgaggtgcccgaaggaccgcgcacctggtgcatgacccgcaagcccggtgcctga

SEQ ID NO: 18065 - DNA, 3510 bp, synthetic construct
  source 1..3510: mol_type = other DNA
atggccttaccagtgaccgccttgctcctgccgctggccttgctgctccacgccgccaggccgctcgagggacagcctaaggccaatcctaccgtgacactgttccctccaagcagcgaagaactccaggccaacaaggccacacttgtgtgcctgatctccgacttctaccctggggctgtgacagtggcttggaaggccgatggatctcctgtgaaagccggcgtggaaaccaccaagccatccaagcagagcaacaacaaatacgccgccagctcctacctgagcctgacacctgagcagtggaagtcccacagatcctacagctgccaagtgacccacgaaggcagcaccgtggaaaagacagtggcccctacagagtgcagccccatcaagaccgatgtgattacaatggaccccaaggacaactgctccaaggacgccaacgataccctgctgctccagctgaccaacaccagcgcctactacatgtacttgttgctgctgctgaagtccgtggtgtacttcgccatcatcacatgctgcctgctgcggagaaccgccttctgctgcaacggcgagaagtctagggccaagcgatctggatctggagcaacaaacttctcactactcaaacaagcaggtgacgtggaggagaatcccgggcctactagcatggccttaccagtgaccgccttgctcctgccgctggccttgctgctccacgccgccaggccgggcgtgacacagagccccacacacctgattaagaccagaggccagcaggccacactgagatgcagccctatcagcggccacaccagcgtgtactggtatcagcaggctctcggactgggcctccagttcctgctttggtacgacgagggcgaagagagaaaccggggcaacttccctcctcggttttccggcagacagttccccaactacagcagcgagctgaacgtgaacgccctggaactggaagatagcgccctgtacctgtgtgcctcttctcttggtggacctcgcggactggctggactgagaggggatgagcagtttttcggccctggcaccagactgaccgtgctggaaggcggaggaagcggcggaggatctcaggtccagctcgtcgagtccggcggcggcctcgtccaggccggcgactccgtcaccctctcctgcaccgcctccggccgcaccttctcctcctacgccctcgcctggttccgccagcgccccggcaaggagcgcgagttcgtcgccggcctccgctggggcggccccaccaactacgccgactccgtcaaggaccgcttcaccatctccggcgactccgccaagcacaccatgtacctccagatgaactccctcaagcccgaggacaccgccgtctactactgcggctacaaccccggcggctgggccgtcccctcccagtacgagtacgactcctggggccagggcacccaggtcaccgtctcctccggtaccggcggaggcggatctggcggcggaggtagcggtggcggaggatctgaattcgacatccagatgacacagagccctagcagcctgtctgccagcgtgggagacagagtgaccatcacatgcaaggccagcgaccacatcaacaactggctggcctggtatcagcagaagcctggacaggcccctaagctgctgatctacggcgctaccacactggaaacaggcgtgcccagcagattttctggcagcggctctggcaccgactacaccctgacaatatccagcctccagcctgaggacttcgccacctactactgtcagcagagctggaacaccccttggacattcggccagggcaccaagctggaaatcaagagaggcggaggcggaagtggaggcggaggatctggcggcggaggctctcaagttcagcttcaacagcctggcgctgagctggtcaaacctggcgcttctgtgaagatgagctgcaaagccagcggctacgccttcagcagctactggatcaactggatgaagcagaaacccggccagggactcgaatggatcggccaaatctatcccggcgacggcgacaccaactacaacggcaagttcaagggcagagccacactgaccgccgatacctctagcagcacagcctacatgcagctgagcagcctgaccagcgaagatagcgccgtgtacttctgtgcccggtccatcacaacagtcgtgggctgcgctatggactattggggccagggaacaagcgtgaccgtgtctagtacgcgtgaggaggacctgaagaacgtgttcccacctgaggtggccgtgttcgagcctagcgaggccgagatcagccacacccagaaagccaccctcgtgtgcctggctaccggcttctaccccgaccatgtggaactgtcttggtgggtcaacggcaaagaggtgcacagcggcgtgtgtaccgacccccagccactgaaagaacagcccgccctgaacgacagccggtactgcctgagcagcagactgagagtgtccgccaccttctggcagaacccccggaaccacttcagatgccaggtgcagttctacggcctgagcgagaacgacgagtggacccaggacagagccaagcccgtgacccagatcgtgtctgccgaagcctggggcagagccgattgcggctttaccagcgagagctaccagcagggcgtgctgagcgccaccaacctgagcgtgatcggcttcagaatcctgctgctgaaagtggccggctttaacctgctgatgaccctgcggctgtggtccagccgcgccaagagaagcggatctggcgtgaagcagaccctgaatttcgacctgctgaagctggctggcgacgtggaatccaacccaggcccttctagaggccatatgaccgagtacaagcccacggtgcgcctcgccacccgcgacgacgtccccagggccgtacgcaccctcgccgccgcgttcgccgactaccccgccacgcgccacaccgtcgatccggaccgccacatcgagcgggtcaccgagctgcaagaactcttcctcacgcgcgtcgggctcgacatcggcaaggtgtgggtcgcggacgacggcgccgcggtggcggtctggaccacgccggagagcgtcgaagcgggggcggtgttcgccgagatcggcccgcgcatggccgagttgagcggttcccggctggccgcgcagcaacagatggaaggcctcctggcgccgcaccggcccaaggagcccgcgtggttcctggccaccgtcggcgtctcgcccgaccaccagggcaagggtctgggcagcgccgtcgtgctccccggagtggaggcggccgagcgcgccggggtgcccgccttcctggagacctccgcgccccgcaacctccccttctacgagcggctcggcttcaccgtcaccgccgacgtcgaggtgcccgaaggaccgcgcacctggtgcatgacccgcaagcccggtgcctga

SEQ ID NO: 18066 - DNA, 2790 bp, synthetic construct
  source 1..2790: mol_type = other DNA
atggccttaccagtgaccgccttgctcctgccgctggccttgctgctccacgccgccaggccgctcgagggacagcctaaggccaatcctaccgtgacactgttccctccaagcagcgaagaactccaggccaacaaggccacacttgtgtgcctgatctccgacttctaccctggggctgtgacagtggcttggaaggccgatggatctcctgtgaaagccggcgtggaaaccaccaagccatccaagcagagcaacaacaaatacgccgccagctcctacctgagcctgacacctgagcagtggaagtcccacagatcctacagctgccaagtgacccacgaaggcagcaccgtggaaaagacagtggcccctacagagtgcagccccatcaagaccgatgtgattacaatggaccccaaggacaactgctccaaggacgccaacgataccctgctgctccagctgaccaacaccagcgcctactacatgtacttgttgctgctgctgaagtccgtggtgtacttcgccatcatcacatgctgcctgctgcggagaaccgccttctgctgcaacggcgagaagtctagggccaagcgatctggatctggagcaacaaacttctcactactcaaacaagcaggtgacgtggaggagaatcccgggcctactagcatggccttaccagtgaccgccttgctcctgccgctggccttgctgctccacgccgccaggccgggcgtgacacagagccccacacacctgattaagaccagaggccagcaggccacactgagatgcagccctatcagcggccacaccagcgtgtactggtatcagcaggctctcggactgggcctccagttcctgctttggtacgacgagggcgaagagagaaaccggggcaacttccctcctcggttttccggcagacagttccccaactacagcagcgagctgaacgtgaacgccctggaactggaagatagcgccctgtacctgtgtgcctcttctcttggtggacctcgcggactggctggactgagaggggatgagcagtttttcggccctggcaccagactgaccgtgctggaaggcggaggaagcggcggaggatctggcgtgacacagagccccacacacctgattaagaccagaggccagcaggccacactgagatgcagccctatcagcggccacaccagcgtgtactggtatcagcaggctctcggactgggcctccagttcctgctttggtacgacgagggcgaagagagaaaccggggcaacttccctcctcggttttccggcagacagttccccaactacagcagcgagctgaacgtgaacgccctggaactggaagatagcgccctgtacctgtgtgccagctctctcggcggagatgaactgggagccgatggcaacgagcagttctttggccctggcaccagactgaccgtgctggaaggtaccggcggaggcggatctggcggcggaggtagcggtggcggaggatctgaattcgacatccagatgacacagagccctagcagcctgtctgccagcgtgggagacagagtgaccatcacatgcaaggccagcgaccacatcaacaactggctggcctggtatcagcagaagcctggacaggcccctaagctgctgatctacggcgctaccacactggaaacaggcgtgcccagcagattttctggcagcggctctggcaccgactacaccctgacaatatccagcctccagcctgaggacttcgccacctactactgtcagcagagctggaacaccccttggacattcggccagggcaccaagctggaaatcaagagaggcggaggcggaagtggaggcggaggatctggcggcggaggctctcaagttcagcttcaacagcctggcgctgagctggtcaaacctggcgcttctgtgaagatgagctgcaaagccagcggctacgccttcagcagctactggatcaactggatgaagcagaaacccggccagggactcgaatggatcggccaaatctatcccggcgacggcgacaccaactacaacggcaagttcaagggcagagccacactgaccgccgatacctctagcagcacagcctacatgcagctgagcagcctgaccagcgaagatagcgccgtgtacttctgtgcccggtccatcacaacagtcgtgggctgcgctatggactattggggccagggaacaagcgtgaccgtgtctagtacgcgtgaggaggacctgaagaacgtgttcccacctgaggtggccgtgttcgagcctagcgaggccgagatcagccacacccagaaagccaccctcgtgtgcctggctaccggcttctaccccgaccatgtggaactgtcttggtgggtcaacggcaaagaggtgcacagcggcgtgtgtaccgacccccagccactgaaagaacagcccgccctgaacgacagccggtactgcctgagcagcagactgagagtgtccgccaccttctggcagaacccccggaaccacttcagatgccaggtgcagttctacggcctgagcgagaacgacgagtggacccaggacagagccaagcccgtgacccagatcgtgtctgccgaagcctggggcagagccgattgcggctttaccagcgagagctaccagcagggcgtgctgagcgccaccaacctgagcgtgatcggcttcagaatcctgctgctgaaagtggccggctttaacctgctgatgaccctgcggctgtggtccagc

SEQ ID NO: 18067 - DNA, 2352 bp, synthetic construct
  source 1..2352: mol_type = other DNA
atggccttaccagtgaccgccttgctcctgccgctggccttgctgctccacgccgccaggccgctcgagggacagcctaaggccaatcctaccgtgacactgttccctccaagcagcgaagaactccaggccaacaaggccacacttgtgtgcctgatctccgacttctaccctggggctgtgacagtggcttggaaggccgatggatctcctgtgaaagccggcgtggaaaccaccaagccatccaagcagagcaacaacaaatacgccgccagctcctacctgagcctgacacctgagcagtggaagtcccacagatcctacagctgccaagtgacccacgaaggcagcaccgtggaaaagacagtggcccctacagagtgcagccccatcaagaccgatgtgattacaatggaccccaaggacaactgctccaaggacgccaacgataccctgctgctccagctgaccaacaccagcgcctactacatgtacttgttgctgctgctgaagtccgtggtgtacttcgccatcatcacatgctgcctgctgcggagaaccgccttctgctgcaacggcgagaagtctagggccaagcgatctggatctggagcaacaaacttctcactactcaaacaagcaggtgacgtggaggagaatcccgggcctactagcatggccctgcccgtgacagccctgctgctgcctctggctctgctgctgcacgccgccagacccgatgaattcggctctgacctgggcatcaagctgctgttcgccgctgccaagggccaggacgacgaagtgcggattctgctggctgctggggccgacgtgaacgccaaggatttcgagggctacacccccctgcacgtggccgcctatgatggacacctggaaatcgtggaagtgctgctgaaggctggcgctgatgtgaatgccaaagacagccagggccggacccctctgcatgaagccgcctacagcggccatctggaaattgtggaagtgctgctgaaagccggggcagacgtgaacgctcaggacgacgctggcgagacaccagccgatctggctgcagcttggggccacgaagatatcgccgaggtgctgcagaagacgcgtgaggaggacctgaagaacgtgttcccacctgaggtggccgtgttcgagcctagcgaggccgagatcagccacacccagaaagccaccctcgtgtgcctggctaccggcttctaccccgaccatgtggaactgtcttggtgggtcaacggcaaagaggtgcacagcggcgtgtgtaccgacccccagccactgaaagaacagcccgccctgaacgacagccggtactgcctgagcagcagactgagagtgtccgccaccttctggcagaacccccggaaccacttcagatgccaggtgcagttctacggcctgagcgagaacgacgagtggacccaggacagagccaagcccgtgacccagatcgtgtctgccgaagcctggggcagagccgattgcggctttaccagcgagagctaccagcagggcgtgctgagcgccaccaacctgagcgtgatcggcttcagaatcctgctgctgaaagtggccggctttaacctgctgatgaccctgcggctgtggtccagccgcgccaagagaagcggatctggcgtgaagcagaccctgaatttcgacctgctgaagctggctggcgacgtggaatccaacccaggcccttctagaggccatatgaccgagtacaagcccacggtgcgcctcgccacccgcgacgacgtccccagggccgtacgcaccctcgccgccgcgttcgccgactaccccgccacgcgccacaccgtcgatccggaccgccacatcgagcgggtcaccgagctgcaagaactcttcctcacgcgcgtcgggctcgacatcggcaaggtgtgggtcgcggacgacggcgccgcggtggcggtctggaccacgccggagagcgtcgaagcgggggcggtgttcgccgagatcggcccgcgcatggccgagttgagcggttcccggctggccgcgcagcaacagatggaaggcctcctggcgccgcaccggcccaaggagcccgcgtggttcctggccaccgtcggcgtctcgcccgaccaccagggcaagggtctgggcagcgccgtcgtgctccccggagtggaggcggccgagcgcgccggggtgcccgccttcctggagacctccgcgccccgcaacctccccttctacgagcggctcggcttcaccgtcaccgccgacgtcgaggtgcccgaaggaccgcgcacctggtgcatgacccgcaagcccggtgcctga

SEQ ID NO: 18068 - DNA, 2139 bp, synthetic construct
  source 1..2139: mol_type = other DNA
atggccttaccagtgaccgccttgctcctgccgctggccttgctgctccacgccgccaggccgctcgagggacagcctaaggccaatcctaccgtgacactgttccctccaagcagcgaagaactccaggccaacaaggccacacttgtgtgcctgatctccgacttctaccctggggctgtgacagtggcttggaaggccgatggatctcctgtgaaagccggcgtggaaaccaccaagccatccaagcagagcaacaacaaatacgccgccagctcctacctgagcctgacacctgagcagtggaagtcccacagatcctacagctgccaagtgacccacgaaggcagcaccgtggaaaagacagtggcccctacagagtgcagccccatcaagaccgatgtgattacaatggaccccaaggacaactgctccaaggacgccaacgataccctgctgctccagctgaccaacaccagcgcctactacatgtacttgttgctgctgctgaagtccgtggtgtacttcgccatcatcacatgctgcctgctgcggagaaccgccttctgctgcaacggcgagaagtctagggccaagcgatctggatctggagcaacaaacttctcactactcaaacaagcaggtgacgtggaggagaatcccgggcctactagcatggactggatttggcgcatccttttccttgtcggcgctgctaccggcgcccattccttcgaaggcagcggattcgaatacgccaaagagatgcggaacgcctactgggagatcgccctgctgcccaatctgaccaaccagcagaagagagcccccatcagaaagctgtacgacgacccctcccagagcagcgagctgctgtctgaggctaaaaaactgaacgatagccagacgcgtgaggaggacctgaagaacgtgttcccacctgaggtggccgtgttcgagcctagcgaggccgagatcagccacacccagaaagccaccctcgtgtgcctggctaccggcttctaccccgaccatgtggaactgtcttggtgggtcaacggcaaagaggtgcacagcggcgtgtgtaccgacccccagccactgaaagaacagcccgccctgaacgacagccggtactgcctgagcagcagactgagagtgtccgccaccttctggcagaacccccggaaccacttcagatgccaggtgcagttctacggcctgagcgagaacgacgagtggacccaggacagagccaagcccgtgacccagatcgtgtctgccgaagcctggggcagagccgattgcggctttaccagcgagagctaccagcagggcgtgctgagcgccaccaacctgagcgtgatcggcttcagaatcctgctgctgaaagtggccggctttaacctgctgatgaccctgcggctgtggtccagccgcgccaagagaagcggatctggcgtgaagcagaccctgaatttcgacctgctgaagctggctggcgacgtggaatccaacccaggcccttctagaggccatatgaccgagtacaagcccacggtgcgcctcgccacccgcgacgacgtccccagggccgtacgcaccctcgccgccgcgttcgccgactaccccgccacgcgccacaccgtcgatccggaccgccacatcgagcgggtcaccgagctgcaagaactcttcctcacgcgcgtcgggctcgacatcggcaaggtgtgggtcgcggacgacggcgccgcggtggcggtctggaccacgccggagagcgtcgaagcgggggcggtgttcgccgagatcggcccgcgcatggccgagttgagcggttcccggctggccgcgcagcaacagatggaaggcctcctggcgccgcaccggcccaaggagcccgcgtggttcctggccaccgtcggcgtctcgcccgaccaccagggcaagggtctgggcagcgccgtcgtgctccccggagtggaggcggccgagcgcgccggggtgcccgccttcctggagacctccgcgccccgcaacctccccttctacgagcggctcggcttcaccgtcaccgccgacgtcgaggtgcccgaaggaccgcgcacctggtgcatgacccgcaagcccggtgcctga

SEQ ID NO: 18069 - DNA, 2805 bp, synthetic construct
  source 1..2805: mol_type = other DNA
atggccttaccagtgaccgccttgctcctgccgctggccttgctgctccacgccgccaggccgctcgagggacagcctaaggccaatcctaccgtgacactgttccctccaagcagcgaagaactccaggccaacaaggccacacttgtgtgcctgatctccgacttctaccctggggctgtgacagtggcttggaaggccgatggatctcctgtgaaagccggcgtggaaaccaccaagccatccaagcagagcaacaacaaatacgccgccagctcctacctgagcctgacacctgagcagtggaagtcccacagatcctacagctgccaagtgacccacgaaggcagcaccgtggaaaagacagtggcccctacagagtgcagccccatcaagaccgatgtgattacaatggaccccaaggacaactgctccaaggacgccaacgataccctgctgctccagctgaccaacaccagcgcctactacatgtacttgttgctgctgctgaagtccgtggtgtacttcgccatcatcacatgctgcctgctgcggagaaccgccttctgctgcaacggcgagaagtctagggccaagcgatctggatctggagcaacaaacttctcactactcaaacaagcaggtgacgtggaggagaatcccgggcctactagcatggccctgcccgtgacagccctgctgctgcctctggctctgctgctgcacgccgccagacccgatgaattcgaggtgcaactggtggaaagcggcggaggcctggtgcaggctggcggatctctgagactgagctgtgccgccagcggcatcaccttcagcatcaacacaatgggctggtacagacaggcccctggcaagcagagggaactggtggccctgatctccagcatcggcgacacctactacgccgacagcgtgaagggccggttcaccatcagccgggacaacgccaagaacaccgtgtacctccagatgaacagcctgaagcccgaggacaccgccgtgtactactgcaagcggttcagaacagccgcccagggcaccgattattggggccagggaacacaagtgaccgtgtcctctctcgagggaggaggcggctccgggggaggcggaagtggaggcggaggatctgggtctggaggaagcggatctggaggctcagggtcagggggctcaggcagtggaggctctttcgaagtgcaactggtggaatctgggggcggactggtgcagccaggcggaagtctgaggctgtcttgtgccgcctccggcagcatcttcggcttcaacgacatggcctggtatcggcaggctcccggaaaacagcgcgagctggtggctctgattagcagagtgggcgtgaccagcagcgccgactctgtgaagggcagattcacaatctccagagtgaacgccaaggatacagtgtacctccagatgaactctctgaaacctgaggatacagcagtgtactattgctacatggaccagcggctggacggcagcacactggcctactggggacagggaactcaagtgacagtgtctagcacgcgtgaggaggacctgaagaacgtgttcccacctgaggtggccgtgttcgagcctagcgaggccgagatcagccacacccagaaagccaccctcgtgtgcctggctaccggcttctaccccgaccatgtggaactgtcttggtgggtcaacggcaaagaggtgcacagcggcgtgtgtaccgacccccagccactgaaagaacagcccgccctgaacgacagccggtactgcctgagcagcagactgagagtgtccgccaccttctggcagaacccccggaaccacttcagatgccaggtgcagttctacggcctgagcgagaacgacgagtggacccaggacagagccaagcccgtgacccagatcgtgtctgccgaagcctggggcagagccgattgcggctttaccagcgagagctaccagcagggcgtgctgagcgccaccaacctgagcgtgatcggcttcagaatcctgctgctgaaagtggccggctttaacctgctgatgaccctgcggctgtggtccagccgcgccaagagaagcggatctggcgtgaagcagaccctgaatttcgacctgctgaagctggctggcgacgtggaatccaacccaggcccttctagaggccatatgaccgagtacaagcccacggtgcgcctcgccacccgcgacgacgtccccagggccgtacgcaccctcgccgccgcgttcgccgactaccccgccacgcgccacaccgtcgatccggaccgccacatcgagcgggtcaccgagctgcaagaactcttcctcacgcgcgtcgggctcgacatcggcaaggtgtgggtcgcggacgacggcgccgcggtggcggtctggaccacgccggagagcgtcgaagcgggggcggtgttcgccgagatcggcccgcgcatggccgagttgagcggttcccggctggccgcgcagcaacagatggaaggcctcctggcgccgcaccggcccaaggagcccgcgtggttcctggccaccgtcggcgtctcgcccgaccaccagggcaagggtctgggcagcgccgtcgtgctccccggagtggaggcggccgagcgcgccggggtgcccgccttcctggagacctccgcgccccgcaacctccccttctacgagcggctcggcttcaccgtcaccgccgacgtcgaggtgcccgaaggaccgcgcacctggtgcatgacccgcaagcccggtgcctga

SEQ ID NO: 18070 - DNA, 2547 bp, synthetic construct
  source 1..2547: mol_type = other DNA
atggccttaccagtgaccgccttgctcctgccgctggccttgctgctccacgccgccaggccgctcgagggacagcctaaggccaatcctaccgtgacactgttccctccaagcagcgaagaactccaggccaacaaggccacacttgtgtgcctgatctccgacttctaccctggggctgtgacagtggcttggaaggccgatggatctcctgtgaaagccggcgtggaaaccaccaagccatccaagcagagcaacaacaaatacgccgccagctcctacctgagcctgacacctgagcagtggaagtcccacagatcctacagctgccaagtgacccacgaaggcagcaccgtggaaaagacagtggcccctacagagtgcagccccatcaagaccgatgtgattacaatggaccccaaggacaactgctccaaggacgccaacgataccctgctgctccagctgaccaacaccagcgcctactacatgtacttgttgctgctgctgaagtccgtggtgtacttcgccatcatcacatgctgcctgctgcggagaaccgccttctgctgcaacggcgagaagtctagggccaagcgatctggatctggagcaacaaacttctcactactcaaacaagcaggtgacgtggaggagaatcccgggcctactagcatggcccttccagtcactgccttgctgttgcctctggcgctcctgctccacgccgctagaccgggcatgagaaccgaggacctgcctaaggccgtggtgttcctggaaccccagtggtacagagtgctggaaaaggacagcgtgaccctgaagtgccagggcgcctacagccccgaggacaatagcacccagtggttccacaacgagagcctgatctccagccaggccagcagctacttcatcgacgccgccaccgtggacgacagcggcgagtatagatgccagaccaacctgagcaccctgagcgaccccgtgcagctggaagtgcacatcggatggctgctgctgcaggcccccagatgggtgttcaaagaagaggaccccatccacctgagatgccactcttggaagaacaccgccctgcacaaagtgacctacctgcagaacggcaagggcagaaagtacttccaccacaacagcgacttctacatccccaaggccaccctgaaggactccggctcctacttctgcagaggcctcgtgggcagcaagaacgtgtccagcgagacagtgaacatcaccatcacccagggcctggccgtgtctaccatcagcagctttttcccacccggctaccagacgcgtgaggaggacctgaagaacgtgttcccacctgaggtggccgtgttcgagcctagcgaggccgagatcagccacacccagaaagccaccctcgtgtgcctggctaccggcttctaccccgaccatgtggaactgtcttggtgggtcaacggcaaagaggtgcacagcggcgtgtgtaccgacccccagccactgaaagaacagcccgccctgaacgacagccggtactgcctgagcagcagactgagagtgtccgccaccttctggcagaacccccggaaccacttcagatgccaggtgcagttctacggcctgagcgagaacgacgagtggacccaggacagagccaagcccgtgacccagatcgtgtctgccgaagcctggggcagagccgattgcggctttaccagcgagagctaccagcagggcgtgctgagcgccaccaacctgagcgtgatcggcttcagaatcctgctgctgaaagtggccggctttaacctgctgatgaccctgcggctgtggtccagccgcgccaagagaagcggatctggcgtgaagcagaccctgaatttcgacctgctgaagctggctggcgacgtggaatccaacccaggcccttctagaggccatatgaccgagtacaagcccacggtgcgcctcgccacccgcgacgacgtccccagggccgtacgcaccctcgccgccgcgttcgccgactaccccgccacgcgccacaccgtcgatccggaccgccacatcgagcgggtcaccgagctgcaagaactcttcctcacgcgcgtcgggctcgacatcggcaaggtgtgggtcgcggacgacggcgccgcggtggcggtctggaccacgccggagagcgtcgaagcgggggcggtgttcgccgagatcggcccgcgcatggccgagttgagcggttcccggctggccgcgcagcaacagatggaaggcctcctggcgccgcaccggcccaaggagcccgcgtggttcctggccaccgtcggcgtctcgcccgaccaccagggcaagggtctgggcagcgccgtcgtgctccccggagtggaggcggccgagcgcgccggggtgcccgccttcctggagacctccgcgccccgcaacctccccttctacgagcggctcggcttcaccgtcaccgccgacgtcgaggtgcccgaaggaccgcgcacctggtgcatgacccgcaagcccggtgcctga

SEQ ID NO: 18071 - DNA, 1428 bp, synthetic construct
  source 1..1428: mol_type = other DNA
atggccttaccagtgaccgccttgctcctgccgctggccttgctgctccacgccgccaggccgctcgagggacagcctaaggccaatcctaccgtgacactgttccctccaagcagcgaagaactccaggccaacaaggccacacttgtgtgcctgatctccgacttctaccctggggctgtgacagtggcttggaaggccgatggatctcctgtgaaagccggcgtggaaaccaccaagccatccaagcagagcaacaacaaatacgccgccagctcctacctgagcctgacacctgagcagtggaagtcccacagatcctacagctgccaagtgacccacgaaggcagcaccgtggaaaagacagtggcccctacagagtgcagccccatcaagaccgatgtgattacaatggaccccaaggacaactgctccaaggacgccaacgataccctgctgctccagctgaccaacaccagcgcctactacatgtacttgttgctgctgctgaagtccgtggtgtacttcgccatcatcacatgctgcctgctgcggagaaccgccttctgctgcaacggcgagaagtctagggccaagcgatctggatctggagcaacaaacttctcactactcaaacaagcaggtgacgtggaggagaatcccgggcctactagcgccaccatggccttaccagtgaccgccttgctcctgccgctggccttgctgctccacgccgccaggccgatggaccccgacctggaaatcagagccgccttcctgcggcagagaaacacagccctgagaacagaggtggccgagctggaacaagaggtgcagcggctggaaaacgaggtgtcccagtacgagacaagatacggccctctcggaggcggaaaaacgcgtgaggaggacctgaagaacgtgttcccacctgaggtggccgtgttcgagcctagcgaggccgagatcagccacacccagaaagccaccctcgtgtgcctggctaccggcttctaccccgaccatgtggaactgtcttggtgggtcaacggcaaagaggtgcacagcggcgtgtgtaccgacccccagccactgaaagaacagcccgccctgaacgacagccggtactgcctgagcagcagactgagagtgtccgccaccttctggcagaacccccggaaccacttcagatgccaggtgcagttctacggcctgagcgagaacgacgagtggacccaggacagagccaagcccgtgacccagatcgtgtctgccgaagcctggggcagagccgattgcggctttaccagcgagagctaccagcagggcgtgctgagcgccaccaacctgagcgtgatcggcttcagaatcctgctgctgaaagtggccggctttaacctgctgatgaccctgcggctgtggtccagc

SEQ ID NO: 18072 - DNA, 1428 bp, synthetic construct
  source 1..1428: mol_type = other DNA
atggccttaccagtgaccgccttgctcctgccgctggccttgctgctccacgccgccaggccgctcgagggacagcctaaggccaatcctaccgtgacactgttccctccaagcagcgaagaactccaggccaacaaggccacacttgtgtgcctgatctccgacttctaccctggggctgtgacagtggcttggaaggccgatggatctcctgtgaaagccggcgtggaaaccaccaagccatccaagcagagcaacaacaaatacgccgccagctcctacctgagcctgacacctgagcagtggaagtcccacagatcctacagctgccaagtgacccacgaaggcagcaccgtggaaaagacagtggcccctacagagtgcagccccatcaagaccgatgtgattacaatggaccccaaggacaactgctccaaggacgccaacgataccctgctgctccagctgaccaacaccagcgcctactacatgtacttgttgctgctgctgaagtccgtggtgtacttcgccatcatcacatgctgcctgctgcggagaaccgccttctgctgcaacggcgagaagtctagggccaagcgatctggatctggagcaacaaacttctcactactcaaacaagcaggtgacgtggaggagaatcccgggcctactagcgccaccatggccttaccagtgaccgccttgctcctgccgctggccttgctgctccacgccgccaggccgatggaccctgatctcgaaattgaggccgcctttctggaacgcgagaacactgccctggaaaccagggtcgcagagctgagacagagagtgcagagactgcggaacagagtgtctcagtaccgcaccagatatggcccactcggcggaggtaaaacgcgtgaggaggacctgaagaacgtgttcccacctgaggtggccgtgttcgagcctagcgaggccgagatcagccacacccagaaagccaccctcgtgtgcctggctaccggcttctaccccgaccatgtggaactgtcttggtgggtcaacggcaaagaggtgcacagcggcgtgtgtaccgacccccagccactgaaagaacagcccgccctgaacgacagccggtactgcctgagcagcagactgagagtgtccgccaccttctggcagaacccccggaaccacttcagatgccaggtgcagttctacggcctgagcgagaacgacgagtggacccaggacagagccaagcccgtgacccagatcgtgtctgccgaagcctggggcagagccgattgcggctttaccagcgagagctaccagcagggcgtgctgagcgccaccaacctgagcgtgatcggcttcagaatcctgctgctgaaagtggccggctttaacctgctgatgaccctgcggctgtggtccagc

SEQ ID NO: 18073 - DNA, 2133 bp, synthetic construct
  source 1..2133: mol_type = other DNA
atggccttaccagtgaccgccttgctcctgccgctggccttgctgctccacgccgccaggccgctcgagggacagcctaaggccaatcctaccgtgacactgttccctccaagcagcgaagaactccaggccaacaaggccacacttgtgtgcctgatctccgacttctaccctggggctgtgacagtggcttggaaggccgatggatctcctgtgaaagccggcgtggaaaccaccaagccatccaagcagagcaacaacaaatacgccgccagctcctacctgagcctgacacctgagcagtggaagtcccacagatcctacagctgccaagtgacccacgaaggcagcaccgtggaaaagacagtggcccctacagagtgcagccccatcaagaccgatgtgattacaatggaccccaaggacaactgctccaaggacgccaacgataccctgctgctccagctgaccaacaccagcgcctactacatgtacttgttgctgctgctgaagtccgtggtgtacttcgccatcatcacatgctgcctgctgcggagaaccgccttctgctgcaacggcgagaagtctagggccaagcgatctggatctggagcaacaaacttctcactactcaaacaagcaggtgacgtggaggagaatcccgggcctactagcgccaccatggccttaccagtgaccgccttgctcctgccgctggccttgctgctccacgccgccaggccgctgttcaatcaagaggtgcagatccctctgaccgagagctactgtggcccctgtcctaagaactggatctgctacaagaacaactgctaccagttcttcgacgagagcaagaattggtacgagagccaggccagctgcatgagccagaatgccagcctgctgaaggtgtacagcaaagaggaccaggacctgctgaaactggtcaagagcgcccactggatgggccttgtgcacatccccaccaatggctcttggcagtgggaggacggcagcattctgagccctaacctgctgaccatcatcgagatgcagaagggcgactgcgccctgtacgccagcagctttaagggctacatcgagaattgcagcaccccgaacacctacatctgtatgcagagaaccgtttctggcggaggcggctctggaggaggcggaagtggcggcggaggcgacctctttaatcaagaagtccagattccactcaccgaatcctactgcggaccttgtccaaaaaattggatttgttataagaacaactgttatcaattctttgatgagtctaaaaattggtatgagtcccaggcttcctgcatgtctcagaacgcttctctgctgaaagtctactctaaagaagatcaggatctcctgaagctcgtcaagtctgcccattggatggggctcgtccacattcctaccaacggaagctggcaatgggaagatggctccatcctgtctccaaatctgctcacgattattgaaatgcagaaaggggattgtgctctctacgccagctccttcaagggatatattgagaactgtagcacgcccaatacttatatctgtatgcaacggaccgtgacgcgtgaggaggacctgaagaacgtgttcccacctgaggtggccgtgttcgagcctagcgaggccgagatcagccacacccagaaagccaccctcgtgtgcctggctaccggcttctaccccgaccatgtggaactgtcttggtgggtcaacggcaaagaggtgcacagcggcgtgtgtaccgacccccagccactgaaagaacagcccgccctgaacgacagccggtactgcctgagcagcagactgagagtgtccgccaccttctggcagaacccccggaaccacttcagatgccaggtgcagttctacggcctgagcgagaacgacgagtggacccaggacagagccaagcccgtgacccagatcgtgtctgccgaagcctggggcagagccgattgcggctttaccagcgagagctaccagcagggcgtgctgagcgccaccaacctgagcgtgatcggcttcagaatcctgctgctgaaagtggccggctttaacctgctgatgaccctgcggctgtggtccagc

SEQ ID NO: 18074 - DNA, 2133 bp, synthetic construct
  source 1..2133: mol_type = other DNA
atggccttaccagtgaccgccttgctcctgccgctggccttgctgctccacgccgccaggccgctcgagggacagcctaaggccaatcctaccgtgacactgttccctccaagcagcgaagaactccaggccaacaaggccacacttgtgtgcctgatctccgacttctaccctggggctgtgacagtggcttggaaggccgatggatctcctgtgaaagccggcgtggaaaccaccaagccatccaagcagagcaacaacaaatacgccgccagctcctacctgagcctgacacctgagcagtggaagtcccacagatcctacagctgccaagtgacccacgaaggcagcaccgtggaaaagacagtggcccctacagagtgcagccccatcaagaccgatgtgattacaatggaccccaaggacaactgctccaaggacgccaacgataccctgctgctccagctgaccaacaccagcgcctactacatgtacttgttgctgctgctgaagtccgtggtgtacttcgccatcatcacatgctgcctgctgcggagaaccgccttctgctgcaacggcgagaagtctagggccaagcgatctggatctggagcaacaaacttctcactactcaaacaagcaggtgacgtggaggagaatcccgggcctactagcgccaccatggccttaccagtgaccgccttgctcctgccgctggccttgctgctccacgccgccaggccgctgttcaatcaagaggtgcagatccctctgaccgagagctactgtggcccctgtcctaagaactggatctgctacaagaacaactgctaccagttcttcgacgagagcaagaattggtacgagagccaggccagctgcatgagccagaatgccagcctgctgaaggtgtacagcaaagaggaccaggacctgctgaaactggtcaagagcgcccactggatgggccttgtgcacatccccaccaatggctcttggcagtgggaggacggcagcattctgagccctaacctgctgaccatcatcgagatgcagaagggcgactgcgccctgtacgccagcagctttaagggcttcatcgagaattgcagcaccccgaacacctacatctgtatgcagagaaccgttggcggaggcggaagtggaggcggaggatctggcggcggaggctctgacctctttaatcaagaagtccagattccactcaccgaatcctactgcggaccttgtccaaaaaattggatttgttataagaacaactgttatcaattctttgatgagtctaaaaattggtatgagtcccaggcttcctgcatgtctcagaacgcttctctgctgaaagtctactctaaagaagatcaggatctcctgaagctcgtcaagtctgcccattggatggggctcgtccacattcctaccaacggaagctggcaatgggaagatggctccatcctgtctccaaatctgctcacgattattgaaatgcagaaaggggattgtgctctctacgccagctccttcaagggatttattgagaactgtagcacgcccaatacttatatctgtatgcaacggaccgtgacgcgtgaggaggacctgaagaacgtgttcccacctgaggtggccgtgttcgagcctagcgaggccgagatcagccacacccagaaagccaccctcgtgtgcctggctaccggcttctaccccgaccatgtggaactgtcttggtgggtcaacggcaaagaggtgcacagcggcgtgtgtaccgacccccagccactgaaagaacagcccgccctgaacgacagccggtactgcctgagcagcagactgagagtgtccgccaccttctggcagaacccccggaaccacttcagatgccaggtgcagttctacggcctgagcgagaacgacgagtggacccaggacagagccaagcccgtgacccagatcgtgtctgccgaagcctggggcagagccgattgcggctttaccagcgagagctaccagcagggcgtgctgagcgccaccaacctgagcgtgatcggcttcagaatcctgctgctgaaagtggccggctttaacctgctgatgaccctgcggctgtggtccagc

SEQ ID NO: 18075 - DNA, 2211 bp, synthetic construct
  source 1..2211: mol_type = other DNA
atggccttaccagtgaccgccttgctcctgccgctggccttgctgctccacgccgccaggccgctcgagggacagcctaaggccaatcctaccgtgacactgttccctccaagcagcgaagaactccaggccaacaaggccacacttgtgtgcctgatctccgacttctaccctggggctgtgacagtggcttggaaggccgatggatctcctgtgaaagccggcgtggaaaccaccaagccatccaagcagagcaacaacaaatacgccgccagctcctacctgagcctgacacctgagcagtggaagtcccacagatcctacagctgccaagtgacccacgaaggcagcaccgtggaaaagacagtggcccctacagagtgcagccccatcaagaccgatgtgattacaatggaccccaaggacaactgctccaaggacgccaacgataccctgctgctccagctgaccaacaccagcgcctactacatgtacttgttgctgctgctgaagtccgtggtgtacttcgccatcatcacatgctgcctgctgcggagaaccgccttctgctgcaacggcgagaagtctagggccaagcgatctggatctggagcaacaaacttctcactactcaaacaagcaggtgacgtggaggagaatcccgggcctactagcatggccttaccagtgaccgccttgctcctgccgctggccttgctgctccacgccgccaggccgatggaccccgacctggaaatcagagccgccttcctgcggcagagaaacacagccctgagaacagaggtggccgagctggaacaagaggtgcagcggctggaaaacgaggtgtcccagtacgagacaagatacggccctctcggaggcggaaaaggtaccggcggaggcggatctggcggcggaggtagcggtggcggaggatctgaattcgacatccagatgacacagagccctagcagcctgtctgccagcgtgggagacagagtgaccatcacatgcaaggccagcgaccacatcaacaactggctggcctggtatcagcagaagcctggacaggcccctaagctgctgatctacggcgctaccacactggaaacaggcgtgcccagcagattttctggcagcggctctggcaccgactacaccctgacaatatccagcctccagcctgaggacttcgccacctactactgtcagcagagctggaacaccccttggacattcggccagggcaccaagctggaaatcaagagaggcggaggcggaagtggaggcggaggatctggcggcggaggctctcaagttcagcttcaacagcctggcgctgagctggtcaaacctggcgcttctgtgaagatgagctgcaaagccagcggctacgccttcagcagctactggatcaactggatgaagcagaaacccggccagggactcgaatggatcggccaaatctatcccggcgacggcgacaccaactacaacggcaagttcaagggcagagccacactgaccgccgatacctctagcagcacagcctacatgcagctgagcagcctgaccagcgaagatagcgccgtgtacttctgtgcccggtccatcacaacagtcgtgggctgcgctatggactattggggccagggaacaagcgtgaccgtgtctagtacgcgtgaggaggacctgaagaacgtgttcccacctgaggtggccgtgttcgagcctagcgaggccgagatcagccacacccagaaagccaccctcgtgtgcctggctaccggcttctaccccgaccatgtggaactgtcttggtgggtcaacggcaaagaggtgcacagcggcgtgtgtaccgacccccagccactgaaagaacagcccgccctgaacgacagccggtactgcctgagcagcagactgagagtgtccgccaccttctggcagaacccccggaaccacttcagatgccaggtgcagttctacggcctgagcgagaacgacgagtggacccaggacagagccaagcccgtgacccagatcgtgtctgccgaagcctggggcagagccgattgcggctttaccagcgagagctaccagcagggcgtgctgagcgccaccaacctgagcgtgatcggcttcagaatcctgctgctgaaagtggccggctttaacctgctgatgaccctgcggctgtggtccagc

SEQ ID NO: 18076 - DNA, 2916 bp, synthetic construct
  source 1..2916: mol_type = other DNA
atggccttaccagtgaccgccttgctcctgccgctggccttgctgctccacgccgccaggccgctcgagggacagcctaaggccaatcctaccgtgacactgttccctccaagcagcgaagaactccaggccaacaaggccacacttgtgtgcctgatctccgacttctaccctggggctgtgacagtggcttggaaggccgatggatctcctgtgaaagccggcgtggaaaccaccaagccatccaagcagagcaacaacaaatacgccgccagctcctacctgagcctgacacctgagcagtggaagtcccacagatcctacagctgccaagtgacccacgaaggcagcaccgtggaaaagacagtggcccctacagagtgcagccccatcaagaccgatgtgattacaatggaccccaaggacaactgctccaaggacgccaacgataccctgctgctccagctgaccaacaccagcgcctactacatgtacttgttgctgctgctgaagtccgtggtgtacttcgccatcatcacatgctgcctgctgcggagaaccgccttctgctgcaacggcgagaagtctagggccaagcgatctggatctggagcaacaaacttctcactactcaaacaagcaggtgacgtggaggagaatcccgggcctactagcatggccttaccagtgaccgccttgctcctgccgctggccttgctgctccacgccgccaggccgctgttcaatcaagaggtgcagatccctctgaccgagagctactgtggcccctgtcctaagaactggatctgctacaagaacaactgctaccagttcttcgacgagagcaagaattggtacgagagccaggccagctgcatgagccagaatgccagcctgctgaaggtgtacagcaaagaggaccaggacctgctgaaactggtcaagagcgcccactggatgggccttgtgcacatccccaccaatggctcttggcagtgggaggacggcagcattctgagccctaacctgctgaccatcatcgagatgcagaagggcgactgcgccctgtacgccagcagctttaagggcttcatcgagaattgcagcaccccgaacacctacatctgtatgcagagaaccgttggcggaggcggaagtggaggcggaggatctggcggcggaggctctgacctctttaatcaagaagtccagattccactcaccgaatcctactgcggaccttgtccaaaaaattggatttgttataagaacaactgttatcaattctttgatgagtctaaaaattggtatgagtcccaggcttcctgcatgtctcagaacgcttctctgctgaaagtctactctaaagaagatcaggatctcctgaagctcgtcaagtctgcccattggatggggctcgtccacattcctaccaacggaagctggcaatgggaagatggctccatcctgtctccaaatctgctcacgattattgaaatgcagaaaggggattgtgctctctacgccagctccttcaagggatttattgagaactgtagcacgcccaatacttatatctgtatgcaacggaccgtgggtaccggcggaggcggatctggcggcggaggtagcggtggcggaggatctgaattcgacatccagatgacacagagccctagcagcctgtctgccagcgtgggagacagagtgaccatcacatgcaaggccagcgaccacatcaacaactggctggcctggtatcagcagaagcctggacaggcccctaagctgctgatctacggcgctaccacactggaaacaggcgtgcccagcagattttctggcagcggctctggcaccgactacaccctgacaatatccagcctccagcctgaggacttcgccacctactactgtcagcagagctggaacaccccttggacattcggccagggcaccaagctggaaatcaagagaggcggaggcggaagtggaggcggaggatctggcggcggaggctctcaagttcagcttcaacagcctggcgctgagctggtcaaacctggcgcttctgtgaagatgagctgcaaagccagcggctacgccttcagcagctactggatcaactggatgaagcagaaacccggccagggactcgaatggatcggccaaatctatcccggcgacggcgacaccaactacaacggcaagttcaagggcagagccacactgaccgccgatacctctagcagcacagcctacatgcagctgagcagcctgaccagcgaagatagcgccgtgtacttctgtgcccggtccatcacaacagtcgtgggctgcgctatggactattggggccagggaacaagcgtgaccgtgtctagtacgcgtgaggaggacctgaagaacgtgttcccacctgaggtggccgtgttcgagcctagcgaggccgagatcagccacacccagaaagccaccctcgtgtgcctggctaccggcttctaccccgaccatgtggaactgtcttggtgggtcaacggcaaagaggtgcacagcggcgtgtgtaccgacccccagccactgaaagaacagcccgccctgaacgacagccggtactgcctgagcagcagactgagagtgtccgccaccttctggcagaacccccggaaccacttcagatgccaggtgcagttctacggcctgagcgagaacgacgagtggacccaggacagagccaagcccgtgacccagatcgtgtctgccgaagcctggggcagagccgattgcggctttaccagcgagagctaccagcagggcgtgctgagcgccaccaacctgagcgtgatcggcttcagaatcctgctgctgaaagtggccggctttaacctgctgatgaccctgcggctgtggtccagc

SEQ ID NO: 18077 - DNA, 2031 bp, synthetic construct
  source 1..2031: mol_type = other DNA
atggccttaccagtgaccgccttgctcctgccgctggccttgctgctccacgccgccaggccgctcgagggacagcctaaggccaatcctaccgtgacactgttccctccaagcagcgaagaactccaggccaacaaggccacacttgtgtgcctgatctccgacttctaccctggggctgtgacagtggcttggaaggccgatggatctcctgtgaaagccggcgtggaaaccaccaagccatccaagcagagcaacaacaaatacgccgccagctcctacctgagcctgacacctgagcagtggaagtcccacagatcctacagctgccaagtgacccacgaaggcagcaccgtggaaaagacagtggcccctacagagtgcagccccatcaagaccgatgtgattacaatggaccccaaggacaactgctccaaggacgccaacgataccctgctgctccagctgaccaacaccagcgcctactacatgtacttgttgctgctgctgaagtccgtggtgtacttcgccatcatcacatgctgcctgctgcggagaaccgccttctgctgcaacggcgagaagtctagggccaagcgatctggatctggagcaacaaacttctcactactcaaacaagcaggtgacgtggaggagaatcccgggcctactagcatggccttaccagtgaccgccttgctcctgccgctggccttgctgctccacgccgccaggccgcagtctgtgctgacacagcctcctagtgtgtctggcgctcctggacagagagtgaccatctcttgtaccggcagcagcagcaatatcggagccggctatgacgtgcactggtatcagcagctccctggcacagcccctaaactgctgatcttcggcaacagcaacagacccagcggcgtgcccgatagattcagcggctttaagagcggcacaagcgccagcctggctatcactggactgcaagccgaggacgaggccgactacttctgccagagctacgatagcagcctgagcggcagcggagtgtttggcacaggcaccaaagtgacagtgcttggcggcggaggcggaagtggaggcggaggatctggcggcggaggctctcaaatgcaactggttcaaagcggcggtggcctggtgcaacctggaagaagtctgagactgagctgtgccgccagcggcttcaccttcgatgattacgccatgcactgggtccgacaggcccctggaaaaggactggaatgggtgtccggcatctcctggaatagcggctctatcggctacgccgacagcgtgaagggcagattcaccatcagccgggacaacgccaagaacagcctgtacctccagatgaactccctgagagccgaggatacagccctgtactactgcgccaaggacatccacagcggcagctactacggcctgctgtactacgctatggacgtgtggggccagggcacaaccgtgacagtttcttctacgcgtgaggaggacctgaagaacgtgttcccacctgaggtggccgtgttcgagcctagcgaggccgagatcagccacacccagaaagccaccctcgtgtgcctggctaccggcttctaccccgaccatgtggaactgtcttggtgggtcaacggcaaagaggtgcacagcggcgtgtgtaccgacccccagccactgaaagaacagcccgccctgaacgacagccggtactgcctgagcagcagactgagagtgtccgccaccttctggcagaacccccggaaccacttcagatgccaggtgcagttctacggcctgagcgagaacgacgagtggacccaggacagagccaagcccgtgacccagatcgtgtctgccgaagcctggggcagagccgattgcggctttaccagcgagagctaccagcagggcgtgctgagcgccaccaacctgagcgtgatcggcttcagaatcctgctgctgaaagtggccggctttaacctgctgatgaccctgcggctgtggtccagc

SEQ ID NO: 18078 - DNA, 1542 bp, synthetic construct
  source 1..1542: mol_type = other DNA
atggccttaccagtgaccgccttgctcctgccgctggccttgctgctccacgccgccaggccgctcgagggacagcctaaggccaatcctaccgtgacactgttccctccaagcagcgaagaactccaggccaacaaggccacacttgtgtgcctgatctccgacttctaccctggggctgtgacagtggcttggaaggccgatggatctcctgtgaaagccggcgtggaaaccaccaagccatccaagcagagcaacaacaaatacgccgccagctcctacctgagcctgacacctgagcagtggaagtcccacagatcctacagctgccaagtgacccacgaaggcagcaccgtggaaaagacagtggcccctacagagtgcagccccatcaagaccgatgtgattacaatggaccccaaggacaactgctccaaggacgccaacgataccctgctgctccagctgaccaacaccagcgcctactacatgtacttgttgctgctgctgaagtccgtggtgtacttcgccatcatcacatgctgcctgctgcggagaaccgccttctgctgcaacggcgagaagtctagggccaagcgatctggatctggagcaacaaacttctcactactcaaacaagcaggtgacgtggaggagaatcccgggcctactagcatggccttaccagtgaccgccttgctcctgccgctggccttgctgctccacgccgccaggccgatgtgtatgccctgcttcaccaccgaccatcagatggcccggaagtgcgacgattgctgtggcggaaaaggcagaggcaagtgctacggccctcagtgcttgtgtagactcgagggcggaggcggaagtggaggcggaggatctggcggcggaggctctttcgaagtgtgtatgccttgttttaccacggatcaacaaatggctcgcaagtgttctgactgctgcggaggcaaaggccggggaaagtgttatggcccacagtgtctgtgccggacgcgtgaggaggacctgaagaacgtgttcccacctgaggtggccgtgttcgagcctagcgaggccgagatcagccacacccagaaagccaccctcgtgtgcctggctaccggcttctaccccgaccatgtggaactgtcttggtgggtcaacggcaaagaggtgcacagcggcgtgtgtaccgacccccagccactgaaagaacagcccgccctgaacgacagccggtactgcctgagcagcagactgagagtgtccgccaccttctggcagaacccccggaaccacttcagatgccaggtgcagttctacggcctgagcgagaacgacgagtggacccaggacagagccaagcccgtgacccagatcgtgtctgccgaagcctggggcagagccgattgcggctttaccagcgagagctaccagcagggcgtgctgagcgccaccaacctgagcgtgatcggcttcagaatcctgctgctgaaagtggccggctttaacctgctgatgaccctgcggctgtggtccagc

SEQ ID NO: 18079 - DNA, 2172 bp, synthetic construct
  source 1..2172: mol_type = other DNA
atggccttaccagtgaccgccttgctcctgccgctggccttgctgctccacgccgccaggccgctcgagggacagcctaaggccaatcctaccgtgacactgttccctccaagcagcgaagaactccaggccaacaaggccacacttgtgtgcctgatctccgacttctaccctggggctgtgacagtggcttggaaggccgatggatctcctgtgaaagccggcgtggaaaccaccaagccatccaagcagagcaacaacaaatacgccgccagctcctacctgagcctgacacctgagcagtggaagtcccacagatcctacagctgccaagtgacccacgaaggcagcaccgtggaaaagacagtggcccctacagagtgcagccccatcaagaccgatgtgattacaatggaccccaaggacaactgctccaaggacgccaacgataccctgctgctccagctgaccaacaccagcgcctactacatgtacttgttgctgctgctgaagtccgtggtgtacttcgccatcatcacatgctgcctgctgcggagaaccgccttctgctgcaacggcgagaagtctagggccaagcgatctggatctggagcaacaaacttctcactactcaaacaagcaggtgacgtggaggagaatcccgggcctactagcatggccttaccagtgaccgccttgctcctgccgctggccttgctgctccacgccgccaggccgttcgaagtgtgtatgccttgttttaccacggatcaacaaatggctcgcaagtgttctgactgctgcggaggcaaaggccggggaaagtgttatggcccacagtgtctgtgccggggtaccggcggaggcggatctggcggcggaggtagcggtggcggaggatctgaattcgacatccagatgacacagagccctagcagcctgtctgccagcgtgggagacagagtgaccatcacatgcaaggccagcgaccacatcaacaactggctggcctggtatcagcagaagcctggacaggcccctaagctgctgatctacggcgctaccacactggaaacaggcgtgcccagcagattttctggcagcggctctggcaccgactacaccctgacaatatccagcctccagcctgaggacttcgccacctactactgtcagcagagctggaacaccccttggacattcggccagggcaccaagctggaaatcaagagaggcggaggcggaagtggaggcggaggatctggcggcggaggctctcaagttcagcttcaacagcctggcgctgagctggtcaaacctggcgcttctgtgaagatgagctgcaaagccagcggctacgccttcagcagctactggatcaactggatgaagcagaaacccggccagggactcgaatggatcggccaaatctatcccggcgacggcgacaccaactacaacggcaagttcaagggcagagccacactgaccgccgatacctctagcagcacagcctacatgcagctgagcagcctgaccagcgaagatagcgccgtgtacttctgtgcccggtccatcacaacagtcgtgggctgcgctatggactattggggccagggaacaagcgtgaccgtgtctagtacgcgtgaggaggacctgaagaacgtgttcccacctgaggtggccgtgttcgagcctagcgaggccgagatcagccacacccagaaagccaccctcgtgtgcctggctaccggcttctaccccgaccatgtggaactgtcttggtgggtcaacggcaaagaggtgcacagcggcgtgtgtaccgacccccagccactgaaagaacagcccgccctgaacgacagccggtactgcctgagcagcagactgagagtgtccgccaccttctggcagaacccccggaaccacttcagatgccaggtgcagttctacggcctgagcgagaacgacgagtggacccaggacagagccaagcccgtgacccagatcgtgtctgccgaagcctggggcagagccgattgcggctttaccagcgagagctaccagcagggcgtgctgagcgccaccaacctgagcgtgatcggcttcagaatcctgctgctgaaagtggccggctttaacctgctgatgaccctgcggctgtggtccagc

SEQ ID NO: 18080 - DNA, 2562 bp, synthetic construct
  source 1..2562: mol_type = other DNA
atggccttaccagtgaccgccttgctcctgccgctggccttgctgctccacgccgccaggccgctcgagggacagcctaaggccaatcctaccgtgacactgttccctccaagcagcgaagaactccaggccaacaaggccacacttgtgtgcctgatctccgacttctaccctggggctgtgacagtggcttggaaggccgatggatctcctgtgaaagccggcgtggaaaccaccaagccatccaagcagagcaacaacaaatacgccgccagctcctacctgagcctgacacctgagcagtggaagtcccacagatcctacagctgccaagtgacccacgaaggcagcaccgtggaaaagacagtggcccctacagagtgcagccccatcaagaccgatgtgattacaatggaccccaaggacaactgctccaaggacgccaacgataccctgctgctccagctgaccaacaccagcgcctactacatgtacttgttgctgctgctgaagtccgtggtgtacttcgccatcatcacatgctgcctgctgcggagaaccgccttctgctgcaacggcgagaagtctagggccaagcgatctggatctggagcaacaaacttctcactactcaaacaagcaggtgacgtggaggagaatcccgggcctactagcatggccttaccagtgaccgccttgctcctgccgctggccttgctgctccacgccgccaggccgttcgaaagccccgtagctcctgcctgtgaccccagactcctaaataaactgctgcgtgactcccacctccttcacagccgactgagtcagtgtcccgacgtggaccctttgtctatccctgttctgctgcctgctgtggactttagcctgggagaatggaaaacccagacggaacagagcaaggcacaggacattctaggggcagtgtcccttctactggagggagtgatggcagcacgaggacagttggaaccctcctgcctctcatccctcctgggacagctttctgggcaggttcgcctcctcttgggggccctgcagggcctcctaggaacccagcttcctctacagggcaggaccacagctcacaaggaccccaatgccctcttcttgagcttgcaacaactgcttcggggaaaggtgcgcttcctgcttctggtagaaggtcccaccctctgtgtcagacggaccctgccaaccacagctgtcccaagcagtacttctggtaccggcggaggcggatctggcggcggaggtagcggtggcggaggatctgaattcgacatccagatgacacagagccctagcagcctgtctgccagcgtgggagacagagtgaccatcacatgcaaggccagcgaccacatcaacaactggctggcctggtatcagcagaagcctggacaggcccctaagctgctgatctacggcgctaccacactggaaacaggcgtgcccagcagattttctggcagcggctctggcaccgactacaccctgacaatatccagcctccagcctgaggacttcgccacctactactgtcagcagagctggaacaccccttggacattcggccagggcaccaagctggaaatcaagagaggcggaggcggaagtggaggcggaggatctggcggcggaggctctcaagttcagcttcaacagcctggcgctgagctggtcaaacctggcgcttctgtgaagatgagctgcaaagccagcggctacgccttcagcagctactggatcaactggatgaagcagaaacccggccagggactcgaatggatcggccaaatctatcccggcgacggcgacaccaactacaacggcaagttcaagggcagagccacactgaccgccgatacctctagcagcacagcctacatgcagctgagcagcctgaccagcgaagatagcgccgtgtacttctgtgcccggtccatcacaacagtcgtgggctgcgctatggactattggggccagggaacaagcgtgaccgtgtctagtacgcgtgaggaggacctgaagaacgtgttcccacctgaggtggccgtgttcgagcctagcgaggccgagatcagccacacccagaaagccaccctcgtgtgcctggctaccggcttctaccccgaccatgtggaactgtcttggtgggtcaacggcaaagaggtgcacagcggcgtgtgtaccgacccccagccactgaaagaacagcccgccctgaacgacagccggtactgcctgagcagcagactgagagtgtccgccaccttctggcagaacccccggaaccacttcagatgccaggtgcagttctacggcctgagcgagaacgacgagtggacccaggacagagccaagcccgtgacccagatcgtgtctgccgaagcctggggcagagccgattgcggctttaccagcgagagctaccagcagggcgtgctgagcgccaccaacctgagcgtgatcggcttcagaatcctgctgctgaaagtggccggctttaacctgctgatgaccctgcggctgtggtccagc

SEQ ID NO: 18081 - DNA, 2283 bp, synthetic construct
  source 1..2283: mol_type = other DNA
atggccttaccagtgaccgccttgctcctgccgctggccttgctgctccacgccgccaggccgctcgagggacagcctaaggccaatcctaccgtgacactgttccctccaagcagcgaagaactccaggccaacaaggccacacttgtgtgcctgatctccgacttctaccctggggctgtgacagtggcttggaaggccgatggatctcctgtgaaagccggcgtggaaaccaccaagccatccaagcagagcaacaacaaatacgccgccagctcctacctgagcctgacacctgagcagtggaagtcccacagatcctacagctgccaagtgacccacgaaggcagcaccgtggaaaagacagtggcccctacagagtgcagccccatcaagaccgatgtgattacaatggaccccaaggacaactgctccaaggacgccaacgataccctgctgctccagctgaccaacaccagcgcctactacatgtacttgttgctgctgctgaagtccgtggtgtacttcgccatcatcacatgctgcctgctgcggagaaccgccttctgctgcaacggcgagaagtctagggccaagcgatctggatctggagcaacaaacttctcactactcaaacaagcaggtgacgtggaggagaatcccgggcctactagcatggccttaccagtgaccgccttgctcctgccgctggccttgctgctccacgccgccaggccgttcgaaatgggcagctgggaagagttcgagctgagactgaacgccatcgaggaacggctgtatgccctcggaggatctgaagccgagctggcctacttcgagtacgtgatcgccgacttcgagggcaacctgcagcggtacaaaggcaagggcaaccctgaagtggaagccctgtacttcgaggccgacgccatcttcgaggaactggtggcctacagacacaacggtaccggcggaggcggatctggcggcggaggtagcggtggcggaggatctgaattcgacatccagatgacacagagccctagcagcctgtctgccagcgtgggagacagagtgaccatcacatgcaaggccagcgaccacatcaacaactggctggcctggtatcagcagaagcctggacaggcccctaagctgctgatctacggcgctaccacactggaaacaggcgtgcccagcagattttctggcagcggctctggcaccgactacaccctgacaatatccagcctccagcctgaggacttcgccacctactactgtcagcagagctggaacaccccttggacattcggccagggcaccaagctggaaatcaagagaggcggaggcggaagtggaggcggaggatctggcggcggaggctctcaagttcagcttcaacagcctggcgctgagctggtcaaacctggcgcttctgtgaagatgagctgcaaagccagcggctacgccttcagcagctactggatcaactggatgaagcagaaacccggccagggactcgaatggatcggccaaatctatcccggcgacggcgacaccaactacaacggcaagttcaagggcagagccacactgaccgccgatacctctagcagcacagcctacatgcagctgagcagcctgaccagcgaagatagcgccgtgtacttctgtgcccggtccatcacaacagtcgtgggctgcgctatggactattggggccagggaacaagcgtgaccgtgtctagtacgcgtgaggaggacctgaagaacgtgttcccacctgaggtggccgtgttcgagcctagcgaggccgagatcagccacacccagaaagccaccctcgtgtgcctggctaccggcttctaccccgaccatgtggaactgtcttggtgggtcaacggcaaagaggtgcacagcggcgtgtgtaccgacccccagccactgaaagaacagcccgccctgaacgacagccggtactgcctgagcagcagactgagagtgtccgccaccttctggcagaacccccggaaccacttcagatgccaggtgcagttctacggcctgagcgagaacgacgagtggacccaggacagagccaagcccgtgacccagatcgtgtctgccgaagcctggggcagagccgattgcggctttaccagcgagagctaccagcagggcgtgctgagcgccaccaacctgagcgtgatcggcttcagaatcctgctgctgaaagtggccggctttaacctgctgatgaccctgcggctgtggtccagc

SEQ ID NO: 18082 - DNA, 2688 bp, synthetic construct
  source 1..2688: mol_type = other DNA
atggccttaccagtgaccgccttgctcctgccgctggccttgctgctccacgccgccaggccgctcgaggaggcctctacaaagggaccctccgtgtttcctctggctcccagcagcaagtctacaagcggaggaacagccgctctgggctgcctggtcaaggattactttcccgagcctgtgaccgtgtcctggaatagcggagcactgacaagcggcgtgcacacctttccagccgtgctgcaaagcagcggcctgtactctctgagcagcgtggtcacagtgcctagctctagcctgggcacccagacctacatctgcaatgtgaaccacaagcctagcaacaccaaggtggacaagagagtggaacccaagagctgtcccatcaagaccgatgtgattacaatggaccccaaggacaactgctccaaggacgccaacgataccctgctgctccagctgaccaacaccagcgcctactacatgtacttgttgctgctgctgaagtccgtggtgtacttcgccatcatcacatgctgcctgctgcggagaaccgccttctgctgcaacggcgagaagtctagggccaagcgatctggatctggagcaacaaacttctcactactcaaacaagcaggtgacgtggaggagaatcccgggcctactagcatggccttaccagtgaccgccttgctcctgccgctggccttgctgctccacgccgccaggccggacatccagatgacacagactacatcctccctgtctgcctctctgggagacagagtcaccatcagttgcagggcaagtcaggacattagtaaatatttaaattggtatcagcagaaaccagatggaactgttaaactcctgatctaccatacatcaagattacactcaggagtcccatcaaggttcagtggcagtgggtctggaacagattattctctcaccattagcaacctggagcaagaagatattgccacttacttttgccaacagggtaatacgcttccgtacacgttcggaggggggaccaagctggagatcacaggtggcggtggctcgggcggtggtgggtcgggtggcggcggatctgaggtgaaactgcaggagtcaggacctggcctggtggcgccctcacagagcctgtccgtcacatgcactgtctcaggggtctcattacccgactatggtgtaagctggattcgccagcctccacgaaagggtctggagtggctgggagtaatatggggtagtgaaaccacatactataattcagctctcaaatccagactgaccatcatcaaggacaactccaagagccaagttttcttaaaaatgaacagtctgcaaactgatgacacagccatttactactgtgccaaacattattactacggtggtagctatgctatggactactggggtcaaggaacctcagtcaccgtctcctcaacgcgtggacagcctaaggccaatcctaccgtgacactgttccctccaagcagcgaagaactccaggccaacaaggccacacttgtgtgcctgatctccgacttctaccctggggctgtgacagtggcttggaaggccgatggatctcctgtgaaagccggcgtggaaaccaccaagccatccaagcagagcaacaacaaatacgccgccagctcctacctgagcctgacacctgagcagtggaagtcccacagatcctacagctgccaagtgacccacgaaggcagcaccgtggaaaagacagtggcccctacagagtgcagcgaagtgaaaaccgactccaccgaccacgtgaagcccaaagagacagagaacaccaagcagcccagcaagagctgccacaagcccaaggccatcgtgcacaccgagaaagtgaacatgatgagcctgaccgtgctgggcctgcggatgctgttcgccaaaaccgtggccgtgaacttcctgctgaccgccaagctgttcttcctccgcgccaagagaagcggatctggcgtgaagcagaccctgaatttcgacctgctgaagctggctggcgacgtggaatccaacccaggcccttctagaggccatatgaccgagtacaagcccacggtgcgcctcgccacccgcgacgacgtccccagggccgtacgcaccctcgccgccgcgttcgccgactaccccgccacgcgccacaccgtcgatccggaccgccacatcgagcgggtcaccgagctgcaagaactcttcctcacgcgcgtcgggctcgacatcggcaaggtgtgggtcgcggacgacggcgccgcggtggcggtctggaccacgccggagagcgtcgaagcgggggcggtgttcgccgagatcggcccgcgcatggccgagttgagcggttcccggctggccgcgcagcaacagatggaaggcctcctggcgccgcaccggcccaaggagcccgcgtggttcctggccaccgtcggcgtctcgcccgaccaccagggcaagggtctgggcagcgccgtcgtgctccccggagtggaggcggccgagcgcgccggggtgcccgccttcctggagacctccgcgccccgcaacctccccttctacgagcggctcggcttcaccgtcaccgccgacgtcgaggtgcccgaaggaccgcgcacctggtgcatgacccgcaagcccggtgcctga

SEQ ID NO: 18083 - DNA, 2691 bp, synthetic construct
  source 1..2691: mol_type = other DNA
atggccttaccagtgaccgccttgctcctgccgctggccttgctgctccacgccgccaggccgctcgaggaggcctctacaaagggaccctccgtgtttcctctggctcccagcagcaagtctacaagcggaggaacagccgctctgggctgcctggtcaaggattactttcccgagcctgtgaccgtgtcctggaatagcggagcactgacaagcggcgtgcacacctttccagccgtgctgcaaagcagcggcctgtactctctgagcagcgtggtcacagtgcctagctctagcctgggcacccagacctacatctgcaatgtgaaccacaagcctagcaacaccaaggtggacaagagagtggaacccaagagctgtcccatcaagaccgatgtgattacaatggaccccaaggacaactgctccaaggacgccaacgataccctgctgctccagctgaccaacaccagcgcctactacatgtacttgttgctgctgctgaagtccgtggtgtacttcgccatcatcacatgctgcctgctgcggagaaccgccttctgctgcaacggcgagaagtctagggccaagcgatctggatctggagcaacaaacttctcactactcaaacaagcaggtgacgtggaggagaatcccgggcctactagcaccatggccttaccagtgaccgccttgctcctgccgctggccttgctgctccacgccgccaggccggagatcgtgatgacccagagccctgccaccctgtctctgagccctggcgaaagagccaccctgagctgtagagccagccaggacatcagcaagtacctgaactggtatcagcagaagcccggccaggcccccagactgctgatctaccacaccagcagactgcacagcggcatccccgccagattttctggctctggcagcggcaccgactacaccctgacaatcagcagcctccagcccgaggacttcgccgtgtacttctgtcagcaaggcaacaccctgccctacaccttcggccagggcaccaagctggaaatcaagggcggaggcggaagtggaggcggaggatctggcggcggaggctctcaggtgcaactccaggaatctggccctggcctcgtgaagcccagcgagacactgagcctgacctgtaccgtgtccggcgtgtccctgcctgactatggcgtgtcctggatcagacagccccctggcaagggcctggaatggatcggagtgatttggggcagcgaaaccacctactacaacagctccctgaagtccagagtgaccatctccaaggacaactccaagaaccaggtgtccctgaagctgagcagcgtgacagccgccgacaccgccgtgtattactgcgccaagcactactactacggcggcagctacgctatggactactggggccagggaaccctcgtgaccgtgtctagtacgcgtggacagcctaaggccaatcctaccgtgacactgttccctccaagcagcgaagaactccaggccaacaaggccacacttgtgtgcctgatctccgacttctaccctggggctgtgacagtggcttggaaggccgatggatctcctgtgaaagccggcgtggaaaccaccaagccatccaagcagagcaacaacaaatacgccgccagctcctacctgagcctgacacctgagcagtggaagtcccacagatcctacagctgccaagtgacccacgaaggcagcaccgtggaaaagacagtggcccctacagagtgcagcgaagtgaaaaccgactccaccgaccacgtgaagcccaaagagacagagaacaccaagcagcccagcaagagctgccacaagcccaaggccatcgtgcacaccgagaaagtgaacatgatgagcctgaccgtgctgggcctgcggatgctgttcgccaaaaccgtggccgtgaacttcctgctgaccgccaagctgttcttcctccgcgccaagagaagcggatctggcgtgaagcagaccctgaatttcgacctgctgaagctggctggcgacgtggaatccaacccaggcccttctagaggccatatgaccgagtacaagcccacggtgcgcctcgccacccgcgacgacgtccccagggccgtacgcaccctcgccgccgcgttcgccgactaccccgccacgcgccacaccgtcgatccggaccgccacatcgagcgggtcaccgagctgcaagaactcttcctcacgcgcgtcgggctcgacatcggcaaggtgtgggtcgcggacgacggcgccgcggtggcggtctggaccacgccggagagcgtcgaagcgggggcggtgttcgccgagatcggcccgcgcatggccgagttgagcggttcccggctggccgcgcagcaacagatggaaggcctcctggcgccgcaccggcccaaggagcccgcgtggttcctggccaccgtcggcgtctcgcccgaccaccagggcaagggtctgggcagcgccgtcgtgctccccggagtggaggcggccgagcgcgccggggtgcccgccttcctggagacctccgcgccccgcaacctccccttctacgagcggctcggcttcaccgtcaccgccgacgtcgaggtgcccgaaggaccgcgcacctggtgcatgacccgcaagcccggtgcctga

SEQ ID NO: 18084 - DNA, 2694 bp, synthetic construct
  source 1..2694: mol_type = other DNA
atggccttaccagtgaccgccttgctcctgccgctggccttgctgctccacgccgccaggccgctcgaggaggcctctacaaagggaccctccgtgtttcctctggctcccagcagcaagtctacaagcggaggaacagccgctctgggctgcctggtcaaggattactttcccgagcctgtgaccgtgtcctggaatagcggagcactgacaagcggcgtgcacacctttccagccgtgctgcaaagcagcggcctgtactctctgagcagcgtggtcacagtgcctagctctagcctgggcacccagacctacatctgcaatgtgaaccacaagcctagcaacaccaaggtggacaagagagtggaacccaagagctgtcccatcaagaccgatgtgattacaatggaccccaaggacaactgctccaaggacgccaacgataccctgctgctccagctgaccaacaccagcgcctactacatgtacttgttgctgctgctgaagtccgtggtgtacttcgccatcatcacatgctgcctgctgcggagaaccgccttctgctgcaacggcgagaagtctagggccaagcgatctggatctggagcaacaaacttctcactactcaaacaagcaggtgacgtggaggagaatcccgggcctactagcaccatggccttaccagtgaccgccttgctcctgccgctggccttgctgctccacgccgccaggccggacgagatcgtgctgacacagagccccgccaccctgtcactgtctccaggcgaaagagccaccctgagctgtagcgccagcagcagcgtgtcctacatgcactggtatcagcagaagcccggccaggcccccagactgctgatctacgataccagcaagctggcctccggcatccccgccagattttctggcagcggctccggcaccgacttcaccctgacaatcagcagcctggaacccgaggacgtggccgtgtactactgttttcaaggcagcgtgtaccccttcaccttcggccagggcaccaagctggaaatcaagagaggtggcggtggctcgggcggtggtgggtcgggtggcggcggatctcaggtgcagctccaggaatctggccctggcctcgtgaagcctagccagaccctgagcctgacctgtaccgtgtctggcggcagcatcagcacaagcggcatgggcgtgggctggatcagacagcaccctggcaagggcctggaatggatcggccacatttggtgggacgacgacaagcggtacaaccccgccctgaagtccagagtgaccatcagcgtggacaccagcaagaaccagttcagcctgaagctgagcagcgtgacagccgccgataccgccgtgtattattgcgcccggatggaactgtggtcctactacttcgactactggggccagggaaccctcgtgaccgtgtctagtacgcgtggacagcctaaggccaatcctaccgtgacactgttccctccaagcagcgaagaactccaggccaacaaggccacacttgtgtgcctgatctccgacttctaccctggggctgtgacagtggcttggaaggccgatggatctcctgtgaaagccggcgtggaaaccaccaagccatccaagcagagcaacaacaaatacgccgccagctcctacctgagcctgacacctgagcagtggaagtcccacagatcctacagctgccaagtgacccacgaaggcagcaccgtggaaaagacagtggcccctacagagtgcagcgaagtgaaaaccgactccaccgaccacgtgaagcccaaagagacagagaacaccaagcagcccagcaagagctgccacaagcccaaggccatcgtgcacaccgagaaagtgaacatgatgagcctgaccgtgctgggcctgcggatgctgttcgccaaaaccgtggccgtgaacttcctgctgaccgccaagctgttcttcctccgcgccaagagaagcggatctggcgtgaagcagaccctgaatttcgacctgctgaagctggctggcgacgtggaatccaacccaggcccttctagaggccatatgaccgagtacaagcccacggtgcgcctcgccacccgcgacgacgtccccagggccgtacgcaccctcgccgccgcgttcgccgactaccccgccacgcgccacaccgtcgatccggaccgccacatcgagcgggtcaccgagctgcaagaactcttcctcacgcgcgtcgggctcgacatcggcaaggtgtgggtcgcggacgacggcgccgcggtggcggtctggaccacgccggagagcgtcgaagcgggggcggtgttcgccgagatcggcccgcgcatggccgagttgagcggttcccggctggccgcgcagcaacagatggaaggcctcctggcgccgcaccggcccaaggagcccgcgtggttcctggccaccgtcggcgtctcgcccgaccaccagggcaagggtctgggcagcgccgtcgtgctccccggagtggaggcggccgagcgcgccggggtgcccgccttcctggagacctccgcgccccgcaacctccccttctacgagcggctcggcttcaccgtcaccgccgacgtcgaggtgcccgaaggaccgcgcacctggtgcatgacccgcaagcccggtgcctga

SEQ ID NO: 18085 - DNA, 2682 bp, synthetic construct
  source 1..2682: mol_type = other DNA
atggccttaccagtgaccgccttgctcctgccgctggccttgctgctccacgccgccaggccgctcgaggaggcctctacaaagggaccctccgtgtttcctctggctcccagcagcaagtctacaagcggaggaacagccgctctgggctgcctggtcaaggattactttcccgagcctgtgaccgtgtcctggaatagcggagcactgacaagcggcgtgcacacctttccagccgtgctgcaaagcagcggcctgtactctctgagcagcgtggtcacagtgcctagctctagcctgggcacccagacctacatctgcaatgtgaaccacaagcctagcaacaccaaggtggacaagagagtggaacccaagagctgtcccatcaagaccgatgtgattacaatggaccccaaggacaactgctccaaggacgccaacgataccctgctgctccagctgaccaacaccagcgcctactacatgtacttgttgctgctgctgaagtccgtggtgtacttcgccatcatcacatgctgcctgctgcggagaaccgccttctgctgcaacggcgagaagtctagggccaagcgatctggatctggagcaacaaacttctcactactcaaacaagcaggtgacgtggaggagaatcccgggcctactagcatggccttaccagtgaccgccttgctcctgccgctggccttgctgctccacgccgccaggccggacatccagatgacacagagccctagcagcctgtctgccagcgtgggagacagagtgaccatcacctgtagagccagccaggacatcagcaactacctgaactggtatcagcagaagcccggcaaggcccctaagctgctgatctactacaccagcagactgcacagcggcgtgcccagcagattttctggctctggcagcggcaccgacttcaccctgacaatatctagcctccagcctgaggacttcgccacctactattgccagcagggcaacaccctgccttacacatttggacagggcaccaaggtggaaatcaagagaggcggaggcggaagtggaggcggaggatctggcggcggaggctctgaagtgcagctggttgaatcaggtggcggcctggttcaacctggcggatctctgagactgagctgtgccgccagcggcttcaccttcagcgactactttatgagctgggtccgacaggcccctggcaaaggacttgaatgggtcgccaccatcagcaatggcggcacctacacttactaccccgacagcgtgaagggcagattcaccatctccagagacaacagcaagaacaccctgtacctccagatgaactccctgagagccgaggacaccgccgtgtactactgcgccagattcgacggctacatcttcgactattggggccagggcaccctggtcacagtctcttctacgcgtggacagcctaaggccaatcctaccgtgacactgttccctccaagcagcgaagaactccaggccaacaaggccacacttgtgtgcctgatctccgacttctaccctggggctgtgacagtggcttggaaggccgatggatctcctgtgaaagccggcgtggaaaccaccaagccatccaagcagagcaacaacaaatacgccgccagctcctacctgagcctgacacctgagcagtggaagtcccacagatcctacagctgccaagtgacccacgaaggcagcaccgtggaaaagacagtggcccctacagagtgcagcgaagtgaaaaccgactccaccgaccacgtgaagcccaaagagacagagaacaccaagcagcccagcaagagctgccacaagcccaaggccatcgtgcacaccgagaaagtgaacatgatgagcctgaccgtgctgggcctgcggatgctgttcgccaaaaccgtggccgtgaacttcctgctgaccgccaagctgttcttcctccgcgccaagagaagcggatctggcgtgaagcagaccctgaatttcgacctgctgaagctggctggcgacgtggaatccaacccaggcccttctagaggccatatgaccgagtacaagcccacggtgcgcctcgccacccgcgacgacgtccccagggccgtacgcaccctcgccgccgcgttcgccgactaccccgccacgcgccacaccgtcgatccggaccgccacatcgagcgggtcaccgagctgcaagaactcttcctcacgcgcgtcgggctcgacatcggcaaggtgtgggtcgcggacgacggcgccgcggtggcggtctggaccacgccggagagcgtcgaagcgggggcggtgttcgccgagatcggcccgcgcatggccgagttgagcggttcccggctggccgcgcagcaacagatggaaggcctcctggcgccgcaccggcccaaggagcccgcgtggttcctggccaccgtcggcgtctcgcccgaccaccagggcaagggtctgggcagcgccgtcgtgctccccggagtggaggcggccgagcgcgccggggtgcccgccttcctggagacctccgcgccccgcaacctccccttctacgagcggctcggcttcaccgtcaccgccgacgtcgaggtgcccgaaggaccgcgcacctggtgcatgacccgcaagcccggtgcctga

SEQ ID NO: 18086 - DNA, 2694 bp, synthetic construct
  source 1..2694: mol_type = other DNA
atggccttaccagtgaccgccttgctcctgccgctggccttgctgctccacgccgccaggccgctcgaggaggcctctacaaagggaccctccgtgtttcctctggctcccagcagcaagtctacaagcggaggaacagccgctctgggctgcctggtcaaggattactttcccgagcctgtgaccgtgtcctggaatagcggagcactgacaagcggcgtgcacacctttccagccgtgctgcaaagcagcggcctgtactctctgagcagcgtggtcacagtgcctagctctagcctgggcacccagacctacatctgcaatgtgaaccacaagcctagcaacaccaaggtggacaagagagtggaacccaagagctgtcccatcaagaccgatgtgattacaatggaccccaaggacaactgctccaaggacgccaacgataccctgctgctccagctgaccaacaccagcgcctactacatgtacttgttgctgctgctgaagtccgtggtgtacttcgccatcatcacatgctgcctgctgcggagaaccgccttctgctgcaacggcgagaagtctagggccaagcgatctggatctggagcaacaaacttctcactactcaaacaagcaggtgacgtggaggagaatcccgggcctactagcatggccttaccagtgaccgccttgctcctgccgctggccttgctgctccacgccgccaggccggacatccagatgacacagagccctagcagcctgtctgccagcgtgggagacagagtgaccatcacatgcaaggccagcgaccacatcaacaactggctggcctggtatcagcagaagcctggacaggcccctaagctgctgatctacggcgctaccacactggaaacaggcgtgcccagcagattttctggcagcggctctggcaccgactacaccctgacaatatccagcctccagcctgaggacttcgccacctactactgtcagcagagctggaacaccccttggacattcggccagggcaccaagctggaaatcaagagaggcggaggcggaagtggaggcggaggatctggcggcggaggctctcaagttcagcttcaacagcctggcgctgagctggtcaaacctggcgcttctgtgaagatgagctgcaaagccagcggctacgccttcagcagctactggatcaactggatgaagcagaaacccggccagggactcgaatggatcggccaaatctatcccggcgacggcgacaccaactacaacggcaagttcaagggcagagccacactgaccgccgatacctctagcagcacagcctacatgcagctgagcagcctgaccagcgaagatagcgccgtgtacttctgtgcccggtccatcacaacagtcgtgggctgcgctatggactattggggccagggaacaagcgtgaccgtgtctagtacgcgtggacagcctaaggccaatcctaccgtgacactgttccctccaagcagcgaagaactccaggccaacaaggccacacttgtgtgcctgatctccgacttctaccctggggctgtgacagtggcttggaaggccgatggatctcctgtgaaagccggcgtggaaaccaccaagccatccaagcagagcaacaacaaatacgccgccagctcctacctgagcctgacacctgagcagtggaagtcccacagatcctacagctgccaagtgacccacgaaggcagcaccgtggaaaagacagtggcccctacagagtgcagcgaagtgaaaaccgactccaccgaccacgtgaagcccaaagagacagagaacaccaagcagcccagcaagagctgccacaagcccaaggccatcgtgcacaccgagaaagtgaacatgatgagcctgaccgtgctgggcctgcggatgctgttcgccaaaaccgtggccgtgaacttcctgctgaccgccaagctgttcttcctccgcgccaagagaagcggatctggcgtgaagcagaccctgaatttcgacctgctgaagctggctggcgacgtggaatccaacccaggcccttctagaggccatatgaccgagtacaagcccacggtgcgcctcgccacccgcgacgacgtccccagggccgtacgcaccctcgccgccgcgttcgccgactaccccgccacgcgccacaccgtcgatccggaccgccacatcgagcgggtcaccgagctgcaagaactcttcctcacgcgcgtcgggctcgacatcggcaaggtgtgggtcgcggacgacggcgccgcggtggcggtctggaccacgccggagagcgtcgaagcgggggcggtgttcgccgagatcggcccgcgcatggccgagttgagcggttcccggctggccgcgcagcaacagatggaaggcctcctggcgccgcaccggcccaaggagcccgcgtggttcctggccaccgtcggcgtctcgcccgaccaccagggcaagggtctgggcagcgccgtcgtgctccccggagtggaggcggccgagcgcgccggggtgcccgccttcctggagacctccgcgccccgcaacctccccttctacgagcggctcggcttcaccgtcaccgccgacgtcgaggtgcccgaaggaccgcgcacctggtgcatgacccgcaagcccggtgcctga

SEQ ID NO: 18087 - DNA, 2700 bp, synthetic construct
  source 1..2700: mol_type = other DNA
atggccttaccagtgaccgccttgctcctgccgctggccttgctgctccacgccgccaggccgctcgaggaggcctctacaaagggaccctccgtgtttcctctggctcccagcagcaagtctacaagcggaggaacagccgctctgggctgcctggtcaaggattactttcccgagcctgtgaccgtgtcctggaatagcggagcactgacaagcggcgtgcacacctttccagccgtgctgcaaagcagcggcctgtactctctgagcagcgtggtcacagtgcctagctctagcctgggcacccagacctacatctgcaatgtgaaccacaagcctagcaacaccaaggtggacaagagagtggaacccaagagctgtcccatcaagaccgatgtgattacaatggaccccaaggacaactgctccaaggacgccaacgataccctgctgctccagctgaccaacaccagcgcctactacatgtacttgttgctgctgctgaagtccgtggtgtacttcgccatcatcacatgctgcctgctgcggagaaccgccttctgctgcaacggcgagaagtctagggccaagcgatctggatctggagcaacaaacttctcactactcaaacaagcaggtgacgtggaggagaatcccgggcctactagcatggccttaccagtgaccgccttgctcctgccgctggccttgctgctccacgccgccaggccgcagatcgtgctgtctcagtctcctgccatcctgagcgcttccccaggcgagaaagtgaccatgacctgtagagccagcagcagcgtgtcctacatgcactggtatcagcagaagcccggcagcagccctaagccttggatctacgccaccagcaatctggcctctggcgtgccagccagattttctggctctggcagcggcaccagctacagcttcacaatcagcagagtggaagccgaggacgccgccacctactattgtcagcagtggaccttcaatcctcctaccttcggcggaggcacccggctggaaatcaaaagaacagtggctgctggcggaggcggaagtggaggcggaggatctggcggcggaggctctcaggcttatctgcaacagagcggagccgaactcgtcagacctggcgcttctgtgaagatgagctgcaaggccagcggctacaccttcaccagctataatatgcactgggtcaagcagacccctcggcagggactcgaatggatcggcggaatctatcccggcaacggcgacacctcctacaaccagaagttcaagggcaaagccacactgaccgtgggcaagagcagcagcaccgcctatatgcagctcagcagcctgaccagcgaggacagcgccgtgtacttctgcgccagatacgactacaactacgctatggactactggggccagggcaccagcgtgacagttagctctgccagcacgcgtggacagcctaaggccaatcctaccgtgacactgttccctccaagcagcgaagaactccaggccaacaaggccacacttgtgtgcctgatctccgacttctaccctggggctgtgacagtggcttggaaggccgatggatctcctgtgaaagccggcgtggaaaccaccaagccatccaagcagagcaacaacaaatacgccgccagctcctacctgagcctgacacctgagcagtggaagtcccacagatcctacagctgccaagtgacccacgaaggcagcaccgtggaaaagacagtggcccctacagagtgcagcgaagtgaaaaccgactccaccgaccacgtgaagcccaaagagacagagaacaccaagcagcccagcaagagctgccacaagcccaaggccatcgtgcacaccgagaaagtgaacatgatgagcctgaccgtgctgggcctgcggatgctgttcgccaaaaccgtggccgtgaacttcctgctgaccgccaagctgttcttcctccgcgccaagagaagcggatctggcgtgaagcagaccctgaatttcgacctgctgaagctggctggcgacgtggaatccaacccaggcccttctagaggccatatgaccgagtacaagcccacggtgcgcctcgccacccgcgacgacgtccccagggccgtacgcaccctcgccgccgcgttcgccgactaccccgccacgcgccacaccgtcgatccggaccgccacatcgagcgggtcaccgagctgcaagaactcttcctcacgcgcgtcgggctcgacatcggcaaggtgtgggtcgcggacgacggcgccgcggtggcggtctggaccacgccggagagcgtcgaagcgggggcggtgttcgccgagatcggcccgcgcatggccgagttgagcggttcccggctggccgcgcagcaacagatggaaggcctcctggcgccgcaccggcccaaggagcccgcgtggttcctggccaccgtcggcgtctcgcccgaccaccagggcaagggtctgggcagcgccgtcgtgctccccggagtggaggcggccgagcgcgccggggtgcccgccttcctggagacctccgcgccccgcaacctccccttctacgagcggctcggcttcaccgtcaccgccgacgtcgaggtgcccgaaggaccgcgcacctggtgcatgacccgcaagcccggtgcctga

SEQ ID NO: 18088 - DNA, 2694 bp, synthetic construct
  source 1..2694: mol_type = other DNA
atggccttaccagtgaccgccttgctcctgccgctggccttgctgctccacgccgccaggccgctcgaggaggcctctacaaagggaccctccgtgtttcctctggctcccagcagcaagtctacaagcggaggaacagccgctctgggctgcctggtcaaggattactttcccgagcctgtgaccgtgtcctggaatagcggagcactgacaagcggcgtgcacacctttccagccgtgctgcaaagcagcggcctgtactctctgagcagcgtggtcacagtgcctagctctagcctgggcacccagacctacatctgcaatgtgaaccacaagcctagcaacaccaaggtggacaagagagtggaacccaagagctgtcccatcaagaccgatgtgattacaatggaccccaaggacaactgctccaaggacgccaacgataccctgctgctccagctgaccaacaccagcgcctactacatgtacttgttgctgctgctgaagtccgtggtgtacttcgccatcatcacatgctgcctgctgcggagaaccgccttctgctgcaacggcgagaagtctagggccaagcgatctggatctggagcaacaaacttctcactactcaaacaagcaggtgacgtggaggagaatcccgggcctactagcatggccttaccagtgaccgccttgctcctgccgctggccttgctgctccacgccgccaggccggagatcgtgctgacacagagccctgccaccctgtctctgagccctggcgaaagagccaccctgagctgtagagccagccagagcgtgtccagctacctggcctggtatcagcagaagcccggccaggctccccggctgctgatctacgatgccagcaatagagccaccggcatccccgccagattttccggctctggcagcggcaccgacttcaccctgaccatcagctccctggaacccgaggacttcgccgtgtactactgccagcagcggagcaactggcccatcacattcggccagggcacccggctggaaatcaaaggcggaggcggaagtggaggcggaggatctggcggcggaggctctgaggtgcagcttgttgagtctggcggaggactggtgcagcccgatagaagcctgagactgtcttgtgccgccagcggcttcaccttccacgattatgccatgcactgggtccgacaggcccctggcaaaggacttgaatgggtgtccaccatctcttggaacagcggcacaatcggctacgccgactctgtgaagggcagattcaccatcagccgggacaacgccaagaacagcctgtacctccagatgaactccctgagagccgaggacacagccctgtactactgcgccaaggacatccagtacggcaactactactacggcatggacgtgtggggccagggcacaacagtgacagtctcttctacgcgtggacagcctaaggccaatcctaccgtgacactgttccctccaagcagcgaagaactccaggccaacaaggccacacttgtgtgcctgatctccgacttctaccctggggctgtgacagtggcttggaaggccgatggatctcctgtgaaagccggcgtggaaaccaccaagccatccaagcagagcaacaacaaatacgccgccagctcctacctgagcctgacacctgagcagtggaagtcccacagatcctacagctgccaagtgacccacgaaggcagcaccgtggaaaagacagtggcccctacagagtgcagcgaagtgaaaaccgactccaccgaccacgtgaagcccaaagagacagagaacaccaagcagcccagcaagagctgccacaagcccaaggccatcgtgcacaccgagaaagtgaacatgatgagcctgaccgtgctgggcctgcggatgctgttcgccaaaaccgtggccgtgaacttcctgctgaccgccaagctgttcttcctccgcgccaagagaagcggatctggcgtgaagcagaccctgaatttcgacctgctgaagctggctggcgacgtggaatccaacccaggcccttctagaggccatatgaccgagtacaagcccacggtgcgcctcgccacccgcgacgacgtccccagggccgtacgcaccctcgccgccgcgttcgccgactaccccgccacgcgccacaccgtcgatccggaccgccacatcgagcgggtcaccgagctgcaagaactcttcctcacgcgcgtcgggctcgacatcggcaaggtgtgggtcgcggacgacggcgccgcggtggcggtctggaccacgccggagagcgtcgaagcgggggcggtgttcgccgagatcggcccgcgcatggccgagttgagcggttcccggctggccgcgcagcaacagatggaaggcctcctggcgccgcaccggcccaaggagcccgcgtggttcctggccaccgtcggcgtctcgcccgaccaccagggcaagggtctgggcagcgccgtcgtgctccccggagtggaggcggccgagcgcgccggggtgcccgccttcctggagacctccgcgccccgcaacctccccttctacgagcggctcggcttcaccgtcaccgccgacgtcgaggtgcccgaaggaccgcgcacctggtgcatgacccgcaagcccggtgcctga

SEQ ID NO: 18089 - DNA, 2688 bp, synthetic construct
  source 1..2688: mol_type = other DNA
atggccttaccagtgaccgccttgctcctgccgctggccttgctgctccacgccgccaggccgctcgaggaggcctctacaaagggaccctccgtgtttcctctggctcccagcagcaagtctacaagcggaggaacagccgctctgggctgcctggtcaaggattactttcccgagcctgtgaccgtgtcctggaatagcggagcactgacaagcggcgtgcacacctttccagccgtgctgcaaagcagcggcctgtactctctgagcagcgtggtcacagtgcctagctctagcctgggcacccagacctacatctgcaatgtgaaccacaagcctagcaacaccaaggtggacaagagagtggaacccaagagctgtcccatcaagaccgatgtgattacaatggaccccaaggacaactgctccaaggacgccaacgataccctgctgctccagctgaccaacaccagcgcctactacatgtacttgttgctgctgctgaagtccgtggtgtacttcgccatcatcacatgctgcctgctgcggagaaccgccttctgctgcaacggcgagaagtctagggccaagcgatctggatctggagcaacaaacttctcactactcaaacaagcaggtgacgtggaggagaatcccgggcctactagcatggccttaccagtgaccgccttgctcctgccgctggccttgctgctccacgccgccaggccggacatccagatgacccagagccccagcagcctgtctgccagcgtgggcgacagagtgaccatcacctgtagagccagccaggacgtgaacaccgccgtggcctggtatcagcagaagcctggcaaggcccccaagctgctgatctacagcgccagcttcctggaaagcggcgtgcccagcagattcagcggaagcagaagcggcaccgacttcaccctgaccatcagctccctccagcccgaggacttcgccacctactactgccagcagcactacaccacccctcccaccttcggccagaccaaggtggaaatcaagagaggcggaggcggaagtggaggcggaggatctggcggcggaggctctgaagtgcaactggtggaatctggcggcggactggtgcagcctggcggatctctgagactgagctgtgccgccagcggcttcaacatcaaggacacctacatccactgggtgcgccaggcccctggaaagggactggaatgggtggcccggatctaccccaccaacggctacaccagatacgccgacagcgtgaagggccggttcaccatcagcgccgacaccagcaagaataccgcctacctccagatgaacagcctgcgggccgaggataccgccgtgtactactgctcaagatggggaggcgacggcttctacgctatggacgtgtggggccagggcacccttgtgaccgtgtcatctacgcgtggacagcctaaggccaatcctaccgtgacactgttccctccaagcagcgaagaactccaggccaacaaggccacacttgtgtgcctgatctccgacttctaccctggggctgtgacagtggcttggaaggccgatggatctcctgtgaaagccggcgtggaaaccaccaagccatccaagcagagcaacaacaaatacgccgccagctcctacctgagcctgacacctgagcagtggaagtcccacagatcctacagctgccaagtgacccacgaaggcagcaccgtggaaaagacagtggcccctacagagtgcagcgaagtgaaaaccgactccaccgaccacgtgaagcccaaagagacagagaacaccaagcagcccagcaagagctgccacaagcccaaggccatcgtgcacaccgagaaagtgaacatgatgagcctgaccgtgctgggcctgcggatgctgttcgccaaaaccgtggccgtgaacttcctgctgaccgccaagctgttcttcctccgcgccaagagaagcggatctggcgtgaagcagaccctgaatttcgacctgctgaagctggctggcgacgtggaatccaacccaggcccttctagaggccatatgaccgagtacaagcccacggtgcgcctcgccacccgcgacgacgtccccagggccgtacgcaccctcgccgccgcgttcgccgactaccccgccacgcgccacaccgtcgatccggaccgccacatcgagcgggtcaccgagctgcaagaactcttcctcacgcgcgtcgggctcgacatcggcaaggtgtgggtcgcggacgacggcgccgcggtggcggtctggaccacgccggagagcgtcgaagcgggggcggtgttcgccgagatcggcccgcgcatggccgagttgagcggttcccggctggccgcgcagcaacagatggaaggcctcctggcgccgcaccggcccaaggagcccgcgtggttcctggccaccgtcggcgtctcgcccgaccaccagggcaagggtctgggcagcgccgtcgtgctccccggagtggaggcggccgagcgcgccggggtgcccgccttcctggagacctccgcgccccgcaacctccccttctacgagcggctcggcttcaccgtcaccgccgacgtcgaggtgcccgaaggaccgcgcacctggtgcatgacccgcaagcccggtgcctga

SEQ ID NO: 18090 - DNA, 2325 bp, synthetic construct
  source 1..2325: mol_type = other DNA
atggccttaccagtgaccgccttgctcctgccgctggccttgctgctccacgccgccaggccgctcgaggaggcctctacaaagggaccctccgtgtttcctctggctcccagcagcaagtctacaagcggaggaacagccgctctgggctgcctggtcaaggattactttcccgagcctgtgaccgtgtcctggaatagcggagcactgacaagcggcgtgcacacctttccagccgtgctgcaaagcagcggcctgtactctctgagcagcgtggtcacagtgcctagctctagcctgggcacccagacctacatctgcaatgtgaaccacaagcctagcaacaccaaggtggacaagagagtggaacccaagagctgtcccatcaagaccgatgtgattacaatggaccccaaggacaactgctccaaggacgccaacgataccctgctgctccagctgaccaacaccagcgcctactacatgtacttgttgctgctgctgaagtccgtggtgtacttcgccatcatcacatgctgcctgctgcggagaaccgccttctgctgcaacggcgagaagtctagggccaagcgatctggatctggagcaacaaacttctcactactcaaacaagcaggtgacgtggaggagaatcccgggcctactagcatggccctgcccgtgacagccctgctgctgcctctggctctgctgctgcacgccgccagacccgatgaattcgaggtgcaactggtggaaagcggcggaggcctggtgcaggctggcggatctctgagactgagctgtgccgccagcggcatcaccttcagcatcaacacaatgggctggtacagacaggcccctggcaagcagagggaactggtggccctgatctccagcatcggcgacacctactacgccgacagcgtgaagggccggttcaccatcagccgggacaacgccaagaacaccgtgtacctccagatgaacagcctgaagcccgaggacaccgccgtgtactactgcaagcggttcagaacagccgcccagggcaccgattattggggccagggaacacaagtgaccgtgtcctctacgcgtggacagcctaaggccaatcctaccgtgacactgttccctccaagcagcgaagaactccaggccaacaaggccacacttgtgtgcctgatctccgacttctaccctggggctgtgacagtggcttggaaggccgatggatctcctgtgaaagccggcgtggaaaccaccaagccatccaagcagagcaacaacaaatacgccgccagctcctacctgagcctgacacctgagcagtggaagtcccacagatcctacagctgccaagtgacccacgaaggcagcaccgtggaaaagacagtggcccctacagagtgcagcgaagtgaaaaccgactccaccgaccacgtgaagcccaaagagacagagaacaccaagcagcccagcaagagctgccacaagcccaaggccatcgtgcacaccgagaaagtgaacatgatgagcctgaccgtgctgggcctgcggatgctgttcgccaaaaccgtggccgtgaacttcctgctgaccgccaagctgttcttcctccgcgccaagagaagcggatctggcgtgaagcagaccctgaatttcgacctgctgaagctggctggcgacgtggaatccaacccaggcccttctagaggccatatgaccgagtacaagcccacggtgcgcctcgccacccgcgacgacgtccccagggccgtacgcaccctcgccgccgcgttcgccgactaccccgccacgcgccacaccgtcgatccggaccgccacatcgagcgggtcaccgagctgcaagaactcttcctcacgcgcgtcgggctcgacatcggcaaggtgtgggtcgcggacgacggcgccgcggtggcggtctggaccacgccggagagcgtcgaagcgggggcggtgttcgccgagatcggcccgcgcatggccgagttgagcggttcccggctggccgcgcagcaacagatggaaggcctcctggcgccgcaccggcccaaggagcccgcgtggttcctggccaccgtcggcgtctcgcccgaccaccagggcaagggtctgggcagcgccgtcgtgctccccggagtggaggcggccgagcgcgccggggtgcccgccttcctggagacctccgcgccccgcaacctccccttctacgagcggctcggcttcaccgtcaccgccgacgtcgaggtgcccgaaggaccgcgcacctggtgcatgacccgcaagcccggtgcctga

SEQ ID NO: 18091 - DNA, 2325 bp, synthetic construct; identical to SEQ ID NO: 18090
  source 1..2325: mol_type = other DNA

SEQ ID NO: 18092 - DNA, 3120 bp, synthetic construct
  source 1..3120: mol_type = other DNA
atggccttaccagtgaccgccttgctcctgccgctggccttgctgctccacgccgccaggccgctcgaggaggcctctacaaagggaccctccgtgtttcctctggctcccagcagcaagtctacaagcggaggaacagccgctctgggctgcctggtcaaggattactttcccgagcctgtgaccgtgtcctggaatagcggagcactgacaagcggcgtgcacacctttccagccgtgctgcaaagcagcggcctgtactctctgagcagcgtggtcacagtgcctagctctagcctgggcacccagacctacatctgcaatgtgaaccacaagcctagcaacaccaaggtggacaagagagtggaacccaagagctgtcccatcaagaccgatgtgattacaatggaccccaaggacaactgctccaaggacgccaacgataccctgctgctccagctgaccaacaccagcgcctactacatgtacttgttgctgctgctgaagtccgtggtgtacttcgccatcatcacatgctgcctgctgcggagaaccgccttctgctgcaacggcgagaagtctagggccaagcgatctggatctggagcaacaaacttctcactactcaaacaagcaggtgacgtggaggagaatcccgggcctactagcatggccttaccagtgaccgccttgctcctgccgctggccttgctgctccacgccgccaggccgcaggtccagctcgtcgagtccggcggcggcctcgtccaggccggcgactccgtcaccctctcctgcaccgcctccggccgcaccttctcctcctacgccctcgcctggttccgccagcgccccggcaaggagcgcgagttcgtcgccggcctccgctggggcggccccaccaactacgccgactccgtcaaggaccgcttcaccatctccggcgactccgccaagcacaccatgtacctccagatgaactccctcaagcccgaggacaccgccgtctactactgcggctacaaccccggcggctgggccgtcccctcccagtacgagtacgactcctggggccagggcacccaggtcaccgtctcctccggtaccggcggaggcggatctggcggcggaggtagcggtggcggaggatctgaattcgacatccagatgacacagagccctagcagcctgtctgccagcgtgggagacagagtgaccatcacatgcaaggccagcgaccacatcaacaactggctggcctggtatcagcagaagcctggacaggcccctaagctgctgatctacggcgctaccacactggaaacaggcgtgcccagcagattttctggcagcggctctggcaccgactacaccctgacaatatccagcctccagcctgaggacttcgccacctactactgtcagcagagctggaacaccccttggacattcggccagggcaccaagctggaaatcaagagaggcggaggcggaagtggaggcggaggatctggcggcggaggctctcaagttcagcttcaacagcctggcgctgagctggtcaaacctggcgcttctgtgaagatgagctgcaaagccagcggctacgccttcagcagctactggatcaactggatgaagcagaaacccggccagggactcgaatggatcggccaaatctatcccggcgacggcgacaccaactacaacggcaagttcaagggcagagccacactgaccgccgatacctctagcagcacagcctacatgcagctgagcagcctgaccagcgaagatagcgccgtgtacttctgtgcccggtccatcacaacagtcgtgggctgcgctatggactattggggccagggaacaagcgtgaccgtgtctagtacgcgtggacagcctaaggccaatcctaccgtgacactgttccctccaagcagcgaagaactccaggccaacaaggccacacttgtgtgcctgatctccgacttctaccctggggctgtgacagtggcttggaaggccgatggatctcctgtgaaagccggcgtggaaaccaccaagccatccaagcagagcaacaacaaatacgccgccagctcctacctgagcctgacacctgagcagtggaagtcccacagatcctacagctgccaagtgacccacgaaggcagcaccgtggaaaagacagtggcccctacagagtgcagcgaagtgaaaaccgactccaccgaccacgtgaagcccaaagagacagagaacaccaagcagcccagcaagagctgccacaagcccaaggccatcgtgcacaccgagaaagtgaacatgatgagcctgaccgtgctgggcctgcggatgctgttcgccaaaaccgtggccgtgaacttcctgctgaccgccaagctgttcttcctccgcgccaagagaagcggatctggcgtgaagcagaccctgaatttcgacctgctgaagctggctggcgacgtggaatccaacccaggcccttctagaggccatatgaccgagtacaagcccacggtgcgcctcgccacccgcgacgacgtccccagggccgtacgcaccctcgccgccgcgttcgccgactaccccgccacgcgccacaccgtcgatccggaccgccacatcgagcgggtcaccgagctgcaagaactcttcctcacgcgcgtcgggctcgacatcggcaaggtgtgggtcgcggacgacggcgccgcggtggcggtctggaccacgccggagagcgtcgaagcgggggcggtgttcgccgagatcggcccgcgcatggccgagttgagcggttcccggctggccgcgcagcaacagatggaaggcctcctggcgccgcaccggcccaaggagcccgcgtggttcctggccaccgtcggcgtctcgcccgaccaccagggcaagggtctgggcagcgccgtcgtgctccccggagtggaggcggccgagcgcgccggggtgcccgccttcctggagacctccgcgccccgcaacctccccttctacgagcggctcggcttcaccgtcaccgccgacgtcgaggtgcccgaaggaccgcgcacctggtgcatgacccgcaagcccggtgcctga

SEQ ID NO: 18093 - DNA, 3507 bp, synthetic construct
  source 1..3507: mol_type = other DNA
atggccttaccagtgaccgccttgctcctgccgctggccttgctgctccacgccgccaggccgctcgaggaggcctctacaaagggaccctccgtgtttcctctggctcccagcagcaagtctacaagcggaggaacagccgctctgggctgcctggtcaaggattactttcccgagcctgtgaccgtgtcctggaatagcggagcactgacaagcggcgtgcacacctttccagccgtgctgcaaagcagcggcctgtactctctgagcagcgtggtcacagtgcctagctctagcctgggcacccagacctacatctgcaatgtgaaccacaagcctagcaacaccaaggtggacaagagagtggaacccaagagctgtcccatcaagaccgatgtgattacaatggaccccaaggacaactgctccaaggacgccaacgataccctgctgctccagctgaccaacaccagcgcctactacatgtacttgttgctgctgctgaagtccgtggtgtacttcgccatcatcacatgctgcctgctgcggagaaccgccttctgctgcaacggcgagaagtctagggccaagcgatctggatctggagcaacaaacttctcactactcaaacaagcaggtgacgtggaggagaatcccgggcctactagcatggccttaccagtgaccgccttgctcctgccgctggccttgctgctccacgccgccaggccggaggttcagctgcttgagtctggcggaggactggttcaacctggcggaagcctgagactgtcttgtgccgccagcggcttcacctttagcagctacgccatgagctgggtccgacaggctcctggcaaaggactggaatgggtgtccagcatcagcggcagcggcgactacatctactacgccgatagcgtgaagggcagattcaccatcagccgggacatcagcaagaacaccctgtacctccagatgaacagcctgagagccgaggacaccgccgtgtactactgtgccaaagaaggcaccggcgctaacagcagcctggccgattatagaggccagggcacactggtcaccgtgtctagtggcggaggaagcggcggaggatctcaggtccagctcgtcgagtccggcggcggcctcgtccaggccggcgactccgtcaccctctcctgcaccgcctccggccgcaccttctcctcctacgccctcgcctggttccgccagcgccccggcaaggagcgcgagttcgtcgccggcctccgctggggcggccccaccaactacgccgactccgtcaaggaccgcttcaccatctccggcgactccgccaagcacaccatgtacctccagatgaactccctcaagcccgaggacaccgccgtctactactgcggctacaaccccggcggctgggccgtcccctcccagtacgagtacgactcctggggccagggcacccaggtcaccgtctcctccggtaccggcggaggcggatctggcggcggaggtagcggtggcggaggatctgaattcgacatccagatgacacagagccctagcagcctgtctgccagcgtgggagacagagtgaccatcacatgcaaggccagcgaccacatcaacaactggctggcctggtatcagcagaagcctggacaggcccctaagctgctgatctacggcgctaccacactggaaacaggcgtgcccagcagattttctggcagcggctctggcaccgactacaccctgacaatatccagcctccagcctgaggacttcgccacctactactgtcagcagagctggaacaccccttggacattcggccagggcaccaagctggaaatcaagagaggcggaggcggaagtggaggcggaggatctggcggcggaggctctcaagttcagcttcaacagcctggcgctgagctggtcaaacctggcgcttctgtgaagatgagctgcaaagccagcggctacgccttcagcagctactggatcaactggatgaagcagaaacccggccagggactcgaatggatcggccaaatctatcccggcgacggcgacaccaactacaacggcaagttcaagggcagagccacactgaccgccgatacctctagcagcacagcctacatgcagctgagcagcctgaccagcgaagatagcgccgtgtacttctgtgcccggtccatcacaacagtcgtgggctgcgctatggactattggggccagggaacaagcgtgaccgtgtctagtacgcgtggacagcctaaggccaatcctaccgtgacactgttccctccaagcagcgaagaactccaggccaacaaggccacacttgtgtgcctgatctccgacttctaccctggggctgtgacagtggcttggaaggccgatggatctcctgtgaaagccggcgtggaaaccaccaagccatccaagcagagcaacaacaaatacgccgccagctcctacctgagcctgacacctgagcagtggaagtcccacagatcctacagctgccaagtgacccacgaaggcagcaccgtggaaaagacagtggcccctacagagtgcagcgaagtgaaaaccgactccaccgaccacgtgaagcccaaagagacagagaacaccaagcagcccagcaagagctgccacaagcccaaggccatcgtgcacaccgagaaagtgaacatgatgagcctgaccgtgctgggcctgcggatgctgttcgccaaaaccgtggccgtgaacttcctgctgaccgccaagctgttcttcctccgcgccaagagaagcggatctggcgtgaagcagaccctgaatttcgacctgctgaagctggctggcgacgtggaatccaacccaggcccttctagaggccatatgaccgagtacaagcccacggtgcgcctcgccacccgcgacgacgtccccagggccgtacgcaccctcgccgccgcgttcgccgactaccccgccacgcgccacaccgtcgatccggaccgccacatcgagcgggtcaccgagctgcaagaactcttcctcacgcgcgtcgggctcgacatcggcaaggtgtgggtcgcggacgacggcgccgcggtggcggtctggaccacgccggagagcgtcgaagcgggggcggtgttcgccgagatcggcccgcgcatggccgagttgagcggttcccggctggccgcgcagcaacagatggaaggcctcctggcgccgcaccggcccaaggagcccgcgtggttcctggccaccgtcggcgtctcgcccgaccaccagggcaagggtctgggcagcgccgtcgtgctccccggagtggaggcggccgagcgcgccggggtgcccgccttcctggagacctccgcgccccgcaacctccccttctacgagcggctcggcttcaccgtcaccgccgacgtcgaggtgcccgaaggaccgcgcacctggtgcatgacccgcaagcccggtgcctga

SEQ ID NO: 18094 - DNA, 3501 bp, synthetic construct
  source 1..3501: mol_type = other DNA
atggccttaccagtgaccgccttgctcctgccgctggccttgctgctccacgccgccaggccgctcgaggaggcctctacaaagggaccctccgtgtttcctctggctcccagcagcaagtctacaagcggaggaacagccgctctgggctgcctggtcaaggattactttcccgagcctgtgaccgtgtcctggaatagcggagcactgacaagcggcgtgcacacctttccagccgtgctgcaaagcagcggcctgtactctctgagcagcgtggtcacagtgcctagctctagcctgggcacccagacctacatctgcaatgtgaaccacaagcctagcaacaccaaggtggacaagagagtggaacccaagagctgtcccatcaagaccgatgtgattacaatggaccccaaggacaactgctccaaggacgccaacgataccctgctgctccagctgaccaacaccagcgcctactacatgtacttgttgctgctgctgaagtccgtggtgtacttcgccatcatcacatgctgcctgctgcggagaaccgccttctgctgcaacggcgagaagtctagggccaagcgatctggatctggagcaacaaacttctcactactcaaacaagcaggtgacgtggaggagaatcccgggcctactagcatggccttaccagtgaccgccttgctcctgccgctggccttgctgctccacgccgccaggccgggcgtgacacagagccccacacacctgattaagaccagaggccagcaggccacactgagatgcagccctatcagcggccacaccagcgtgtactggtatcagcaggctctcggactgggcctccagttcctgctttggtacgacgagggcgaagagagaaaccggggcaacttccctcctcggttttccggcagacagttccccaactacagcagcgagctgaacgtgaacgccctggaactggaagatagcgccctgtacctgtgtgcctcttctcttggtggacctcgcggactggctggactgagaggggatgagcagtttttcggccctggcaccagactgaccgtgctggaaggcggaggaagcggcggaggatctcaggtccagctcgtcgagtccggcggcggcctcgtccaggccggcgactccgtcaccctctcctgcaccgcctccggccgcaccttctcctcctacgccctcgcctggttccgccagcgccccggcaaggagcgcgagttcgtcgccggcctccgctggggcggccccaccaactacgccgactccgtcaaggaccgcttcaccatctccggcgactccgccaagcacaccatgtacctccagatgaactccctcaagcccgaggacaccgccgtctactactgcggctacaaccccggcggctgggccgtcccctcccagtacgagtacgactcctggggccagggcacccaggtcaccgtctcctccggtaccggcggaggcggatctggcggcggaggtagcggtggcggaggatctgaattcgacatccagatgacacagagccctagcagcctgtctgccagcgtgggagacagagtgaccatcacatgcaaggccagcgaccacatcaacaactggctggcctggtatcagcagaagcctggacaggcccctaagctgctgatctacggcgctaccacactggaaacaggcgtgcccagcagattttctggcagcggctctggcaccgactacaccctgacaatatccagcctccagcctgaggacttcgccacctactactgtcagcagagctggaacaccccttggacattcggccagggcaccaagctggaaatcaagagaggcggaggcggaagtggaggcggaggatctggcggcggaggctctcaagttcagcttcaacagcctggcgctgagctggtcaaacctggcgcttctgtgaagatgagctgcaaagccagcggctacgccttcagcagctactggatcaactggatgaagcagaaacccggccagggactcgaatggatcggccaaatctatcccggcgacggcgacaccaactacaacggcaagttcaagggcagagccacactgaccgccgatacctctagcagcacagcctacatgcagctgagcagcctgaccagcgaagatagcgccgtgtacttctgtgcccggtccatcacaacagtcgtgggctgcgctatggactattggggccagggaacaagcgtgaccgtgtctagtacgcgtggacagcctaaggccaatcctaccgtgacactgttccctccaagcagcgaagaactccaggccaacaaggccacacttgtgtgcctgatctccgacttctaccctggggctgtgacagtggcttggaaggccgatggatctcctgtgaaagccggcgtggaaaccaccaagccatccaagcagagcaacaacaaatacgccgccagctcctacctgagcctgacacctgagcagtggaagtcccacagatcctacagctgccaagtgacccacgaaggcagcaccgtggaaaagacagtggcccctacagagtgcagcgaagtgaaaaccgactccaccgaccacgtgaagcccaaagagacagagaacaccaagcagcccagcaagagctgccacaagcccaaggccatcgtgcacaccgagaaagtgaacatgatgagcctgaccgtgctgggcctgcggatgctgttcgccaaaaccgtggccgtgaacttcctgctgaccgccaagctgttcttcctccgcgccaagagaagcggatctggcgtgaagcagaccctgaatttcgacctgctgaagctggctggcgacgtggaatccaacccaggcccttctagaggccatatgaccgagtacaagcccacggtgcgcctcgccacccgcgacgacgtccccagggccgtacgcaccctcgccgccgcgttcgccgactaccccgccacgcgccacaccgtcgatccggaccgccacatcgagcgggtcaccgagctgcaagaactcttcctcacgcgcgtcgggctcgacatcggcaaggtgtgggtcgcggacgacggcgccgcggtggcggtctggaccacgccggagagcgtcgaagcgggggcggtgttcgccgagatcggcccgcgcatggccgagttgagcggttcccggctggccgcgcagcaacagatggaaggcctcctggcgccgcaccggcccaaggagcccgcgtggttcctggccaccgtcggcgtctcgcccgaccaccagggcaagggtctgggcagcgccgtcgtgctccccggagtggaggcggccgagcgcgccggggtgcccgccttcctggagacctccgcgccccgcaacctccccttctacgagcggctcggcttcaccgtcaccgccgacgtcgaggtgcccgaaggaccgcgcacctggtgcatgacccgcaagcccggtgcctga

SEQ ID NO: 18095 - DNA, 3483 bp, synthetic construct
  source 1..3483: mol_type = other DNA
atggccttaccagtgaccgccttgctcctgccgctggccttgctgctccacgccgccaggccgctcgaggaggcctctacaaagggaccctccgtgtttcctctggctcccagcagcaagtctacaagcggaggaacagccgctctgggctgcctggtcaaggattactttcccgagcctgtgaccgtgtcctggaatagcggagcactgacaagcggcgtgcacacctttccagccgtgctgcaaagcagcggcctgtactctctgagcagcgtggtcacagtgcctagctctagcctgggcacccagacctacatctgcaatgtgaaccacaagcctagcaacaccaaggtggacaagagagtggaacccaagagctgtcccatcaagaccgatgtgattacaatggaccccaaggacaactgctccaaggacgccaacgataccctgctgctccagctgaccaacaccagcgcctactacatgtacttgttgctgctgctgaagtccgtggtgtacttcgccatcatcacatgctgcctgctgcggagaaccgccttctgctgcaacggcgagaagtctagggccaagcgatctggatctggagcaacaaacttctcactactcaaacaagcaggtgacgtggaggagaatcccgggcctactagcatggccttaccagtgaccgccttgctcctgccgctggccttgctgctccacgccgccaggccgggcgtgacacagagccccacacacctgattaagaccagaggccagcaggccacactgagatgcagccctatcagcggccacaccagcgtgtactggtatcagcaggctctcggactgggcctccagttcctgctttggtacgacgagggcgaagagagaaaccggggcaacttccctcctcggttttccggcagacagttccccaactacagcagcgagctgaacgtgaacgccctggaactggaagatagcgccctgtacctgtgtgcctcttctcttggtggacctcgcggactggctggactgagaggggatgagcagtttttcggccctggcaccagactgaccgtgctggaaggcggaggaagcggcggaggatctggcgtgacacagagccccacacacctgattaagaccagaggccagcaggccacactgagatgcagccctatcagcggccacaccagcgtgtactggtatcagcaggctctcggactgggcctccagttcctgctttggtacgacgagggcgaagagagaaaccggggcaacttccctcctcggttttccggcagacagttccccaactacagcagcgagctgaacgtgaacgccctggaactggaagatagcgccctgtacctgtgtgccagctctctcggcggagatgaactgggagccgatggcaacgagcagttctttggccctggcaccagactgaccgtgctggaaggtaccggcggaggcggatctggcggcggaggtagcggtggcggaggatctgaattcgacatccagatgacacagagccctagcagcctgtctgccagcgtgggagacagagtgaccatcacatgcaaggccagcgaccacatcaacaactggctggcctggtatcagcagaagcctggacaggcccctaagctgctgatctacggcgctaccacactggaaacaggcgtgcccagcagattttctggcagcggctctggcaccgactacaccctgacaatatccagcctccagcctgaggacttcgccacctactactgtcagcagagctggaacaccccttggacattcggccagggcaccaagctggaaatcaagagaggcggaggcggaagtggaggcggaggatctggcggcggaggctctcaagttcagcttcaacagcctggcgctgagctggtcaaacctggcgcttctgtgaagatgagctgcaaagccagcggctacgccttcagcagctactggatcaactggatgaagcagaaacccggccagggactcgaatggatcggccaaatctatcccggcgacggcgacaccaactacaacggcaagttcaagggcagagccacactgaccgccgatacctctagcagcacagcctacatgcagctgagcagcctgaccagcgaagatagcgccgtgtacttctgtgcccggtccatcacaacagtcgtgggctgcgctatggactattggggccagggaacaagcgtgaccgtgtctagtacgcgtggacagcctaaggccaatcctaccgtgacactgttccctccaagcagcgaagaactccaggccaacaaggccacacttgtgtgcctgatctccgacttctaccctggggctgtgacagtggcttggaaggccgatggatctcctgtgaaagccggcgtggaaaccaccaagccatccaagcagagcaacaacaaatacgccgccagctcctacctgagcctgacacctgagcagtggaagtcccacagatcctacagctgccaagtgacccacgaaggcagcaccgtggaaaagacagtggcccctacagagtgcagcgaagtgaaaaccgactccaccgaccacgtgaagcccaaagagacagagaacaccaagcagcccagcaagagctgccacaagcccaaggccatcgtgcacaccgagaaagtgaacatgatgagcctgaccgtgctgggcctgcggatgctgttcgccaaaaccgtggccgtgaacttcctgctgaccgccaagctgttcttcctccgcgccaagagaagcggatctggcgtgaagcagaccctgaatttcgacctgctgaagctggctggcgacgtggaatccaacccaggcccttctagaggccatatgaccgagtacaagcccacggtgcgcctcgccacccgcgacgacgtccccagggccgtacgcaccctcgccgccgcgttcgccgactaccccgccacgcgccacaccgtcgatccggaccgccacatcgagcgggtcaccgagctgcaagaactcttcctcacgcgcgtcgggctcgacatcggcaaggtgtgggtcgcggacgacggcgccgcggtggcggtctggaccacgccggagagcgtcgaagcgggggcggtgttcgccgagatcggcccgcgcatggccgagttgagcggttcccggctggccgcgcagcaacagatggaaggcctcctggcgccgcaccggcccaaggagcccgcgtggttcctggccaccgtcggcgtctcgcccgaccaccagggcaagggtctgggcagcgccgtcgtgctccccggagtggaggcggccgagcgcgccggggtgcccgccttcctggagacctccgcgccccgcaacctccccttctacgagcggctcggcttcaccgtcaccgccgacgtcgaggtgcccgaaggaccgcgcacctggtgcatgacccgcaagcccggtgcctga

SEQ ID NO: 18096 - DNA, 2343 bp, synthetic construct
  source 1..2343: mol_type = other DNA
atggccttaccagtgaccgccttgctcctgccgctggccttgctgctccacgccgccaggccgctcgaggaggcctctacaaagggaccctccgtgtttcctctggctcccagcagcaagtctacaagcggaggaacagccgctctgggctgcctggtcaaggattactttcccgagcctgtgaccgtgtcctggaatagcggagcactgacaagcggcgtgcacacctttccagccgtgctgcaaagcagcggcctgtactctctgagcagcgtggtcacagtgcctagctctagcctgggcacccagacctacatctgcaatgtgaaccacaagcctagcaacaccaaggtggacaagagagtggaacccaagagctgtcccatcaagaccgatgtgattacaatggaccccaaggacaactgctccaaggacgccaacgataccctgctgctccagctgaccaacaccagcgcctactacatgtacttgttgctgctgctgaagtccgtggtgtacttcgccatcatcacatgctgcctgctgcggagaaccgccttctgctgcaacggcgagaagtctagggccaagcgatctggatctggagcaacaaacttctcactactcaaacaagcaggtgacgtggaggagaatcccgggcctactagcatggccctgcccgtgacagccctgctgctgcctctggctctgctgctgcacgccgccagacccgatgaattcggctctgacctgggcatcaagctgctgttcgccgctgccaagggccaggacgacgaagtgcggattctgctggctgctggggccgacgtgaacgccaaggatttcgagggctacacccccctgcacgtggccgcctatgatggacacctggaaatcgtggaagtgctgctgaaggctggcgctgatgtgaatgccaaagacagccagggccggacccctctgcatgaagccgcctacagcggccatctggaaattgtggaagtgctgctgaaagccggggcagacgtgaacgctcaggacgacgctggcgagacaccagccgatctggctgcagcttggggccacgaagatatcgccgaggtgctgcagaagacgcgtggacagcctaaggccaatcctaccgtgacactgttccctccaagcagcgaagaactccaggccaacaaggccacacttgtgtgcctgatctccgacttctaccctggggctgtgacagtggcttggaaggccgatggatctcctgtgaaagccggcgtggaaaccaccaagccatccaagcagagcaacaacaaatacgccgccagctcctacctgagcctgacacctgagcagtggaagtcccacagatcctacagctgccaagtgacccacgaaggcagcaccgtggaaaagacagtggcccctacagagtgcagcgaagtgaaaaccgactccaccgaccacgtgaagcccaaagagacagagaacaccaagcagcccagcaagagctgccacaagcccaaggccatcgtgcacaccgagaaagtgaacatgatgagcctgaccgtgctgggcctgcggatgctgttcgccaaaaccgtggccgtgaacttcctgctgaccgccaagctgttcttcctccgcgccaagagaagcggatctggcgtgaagcagaccctgaatttcgacctgctgaagctggctggcgacgtggaatccaacccaggcccttctagaggccatatgaccgagtacaagcccacggtgcgcctcgccacccgcgacgacgtccccagggccgtacgcaccctcgccgccgcgttcgccgactaccccgccacgcgccacaccgtcgatccggaccgccacatcgagcgggtcaccgagctgcaagaactcttcctcacgcgcgtcgggctcgacatcggcaaggtgtgggtcgcggacgacggcgccgcggtggcggtctggaccacgccggagagcgtcgaagcgggggcggtgttcgccgagatcggcccgcgcatggccgagttgagcggttcccggctggccgcgcagcaacagatggaaggcctcctggcgccgcaccggcccaaggagcccgcgtggttcctggccaccgtcggcgtctcgcccgaccaccagggcaagggtctgggcagcgccgtcgtgctccccggagtggaggcggccgagcgcgccggggtgcccgccttcctggagacctccgcgccccgcaacctccccttctacgagcggctcggcttcaccgtcaccgccgacgtcgaggtgcccgaaggaccgcgcacctggtgcatgacccgcaagcccggtgcctga

SEQ ID NO: 18097 - DNA, 2130 bp, synthetic construct
  source 1..2130: mol_type = other DNA
atggccttaccagtgaccgccttgctcctgccgctggccttgctgctccacgccgccaggccgctcgaggaggcctctacaaagggaccctccgtgtttcctctggctcccagcagcaagtctacaagcggaggaacagccgctctgggctgcctggtcaaggattactttcccgagcctgtgaccgtgtcctggaatagcggagcactgacaagcggcgtgcacacctttccagccgtgctgcaaagcagcggcctgtactctctgagcagcgtggtcacagtgcctagctctagcctgggcacccagacctacatctgcaatgtgaaccacaagcctagcaacaccaaggtggacaagagagtggaacccaagagctgtcccatcaagaccgatgtgattacaatggaccccaaggacaactgctccaaggacgccaacgataccctgctgctccagctgaccaacaccagcgcctactacatgtacttgttgctgctgctgaagtccgtggtgtacttcgccatcatcacatgctgcctgctgcggagaaccgccttctgctgcaacggcgagaagtctagggccaagcgatctggatctggagcaacaaacttctcactactcaaacaagcaggtgacgtggaggagaatcccgggcctactagcatggactggatttggcgcatccttttccttgtcggcgctgctaccggcgcccattccttcgaaggcagcggattcgaatacgccaaagagatgcggaacgcctactgggagatcgccctgctgcccaatctgaccaaccagcagaagagagcccccatcagaaagctgtacgacgacccctcccagagcagcgagctgctgtctgaggctaaaaaactgaacgatagccagacgcgtggacagcctaaggccaatcctaccgtgacactgttccctccaagcagcgaagaactccaggccaacaaggccacacttgtgtgcctgatctccgacttctaccctggggctgtgacagtggcttggaaggccgatggatctcctgtgaaagccggcgtggaaaccaccaagccatccaagcagagcaacaacaaatacgccgccagctcctacctgagcctgacacctgagcagtggaagtcccacagatcctacagctgccaagtgacccacgaaggcagcaccgtggaaaagacagtggcccctacagagtgcagcgaagtgaaaaccgactccaccgaccacgtgaagcccaaagagacagagaacaccaagcagcccagcaagagctgccacaagcccaaggccatcgtgcacaccgagaaagtgaacatgatgagcctgaccgtgctgggcctgcggatgctgttcgccaaaaccgtggccgtgaacttcctgctgaccgccaagctgttcttcctccgcgccaagagaagcggatctggcgtgaagcagaccctgaatttcgacctgctgaagctggctggcgacgtggaatccaacccaggcccttctagaggccatatgaccgagtacaagcccacggtgcgcctcgccacccgcgacgacgtccccagggccgtacgcaccctcgccgccgcgttcgccgactaccccgccacgcgccacaccgtcgatccggaccgccacatcgagcgggtcaccgagctgcaagaactcttcctcacgcgcgtcgggctcgacatcggcaaggtgtgggtcgcggacgacggcgccgcggtggcggtctggaccacgccggagagcgtcgaagcgggggcggtgttcgccgagatcggcccgcgcatggccgagttgagcggttcccggctggccgcgcagcaacagatggaaggcctcctggcgccgcaccggcccaaggagcccgcgtggttcctggccaccgtcggcgtctcgcccgaccaccagggcaagggtctgggcagcgccgtcgtgctccccggagtggaggcggccgagcgcgccggggtgcccgccttcctggagacctccgcgccccgcaacctccccttctacgagcggctcggcttcaccgtcaccgccgacgtcgaggtgcccgaaggaccgcgcacctggtgcatgacccgcaagcccggtgcctga

SEQ ID NO: 18098 - DNA, 2796 bp, synthetic construct
  source 1..2796: mol_type = other DNA
atggccttaccagtgaccgccttgctcctgccgctggccttgctgctccacgccgccaggccgctcgaggaggcctctacaaagggaccctccgtgtttcctctggctcccagcagcaagtctacaagcggaggaacagccgctctgggctgcctggtcaaggattactttcccgagcctgtgaccgtgtcctggaatagcggagcactgacaagcggcgtgcacacctttccagccgtgctgcaaagcagcggcctgtactctctgagcagcgtggtcacagtgcctagctctagcctgggcacccagacctacatctgcaatgtgaaccacaagcctagcaacaccaaggtggacaagagagtggaacccaagagctgtcccatcaagaccgatgtgattacaatggaccccaaggacaactgctccaaggacgccaacgataccctgctgctccagctgaccaacaccagcgcctactacatgtacttgttgctgctgctgaagtccgtggtgtacttcgccatcatcacatgctgcctgctgcggagaaccgccttctgctgcaacggcgagaagtctagggccaagcgatctggatctggagcaacaaacttctcactactcaaacaagcaggtgacgtggaggagaatcccgggcctactagcatggccctgcccgtgacagccctgctgctgcctctggctctgctgctgcacgccgccagacccgatgaattcgaggtgcaactggtggaaagcggcggaggcctggtgcaggctggcggatctctgagactgagctgtgccgccagcggcatcaccttcagcatcaacacaatgggctggtacagacaggcccctggcaagcagagggaactggtggccctgatctccagcatcggcgacacctactacgccgacagcgtgaagggccggttcaccatcagccgggacaacgccaagaacaccgtgtacctccagatgaacagcctgaagcccgaggacaccgccgtgtactactgcaagcggttcagaacagccgcccagggcaccgattattggggccagggaacacaagtgaccgtgtcctctctcgagggaggaggcggctccgggggaggcggaagtggaggcggaggatctgggtctggaggaagcggatctggaggctcagggtcagggggctcaggcagtggaggctctttcgaagtgcaactggtggaatctgggggcggactggtgcagccaggcggaagtctgaggctgtcttgtgccgcctccggcagcatcttcggcttcaacgacatggcctggtatcggcaggctcccggaaaacagcgcgagctggtggctctgattagcagagtgggcgtgaccagcagcgccgactctgtgaagggcagattcacaatctccagagtgaacgccaaggatacagtgtacctccagatgaactctctgaaacctgaggatacagcagtgtactattgctacatggaccagcggctggacggcagcacactggcctactggggacagggaactcaagtgacagtgtctagcacgcgtggacagcctaaggccaatcctaccgtgacactgttccctccaagcagcgaagaactccaggccaacaaggccacacttgtgtgcctgatctccgacttctaccctggggctgtgacagtggcttggaaggccgatggatctcctgtgaaagccggcgtggaaaccaccaagccatccaagcagagcaacaacaaatacgccgccagctcctacctgagcctgacacctgagcagtggaagtcccacagatcctacagctgccaagtgacccacgaaggcagcaccgtggaaaagacagtggcccctacagagtgcagcgaagtgaaaaccgactccaccgaccacgtgaagcccaaagagacagagaacaccaagcagcccagcaagagctgccacaagcccaaggccatcgtgcacaccgagaaagtgaacatgatgagcctgaccgtgctgggcctgcggatgctgttcgccaaaaccgtggccgtgaacttcctgctgaccgccaagctgttcttcctccgcgccaagagaagcggatctggcgtgaagcagaccctgaatttcgacctgctgaagctggctggcgacgtggaatccaacccaggcccttctagaggccatatgaccgagtacaagcccacggtgcgcctcgccacccgcgacgacgtccccagggccgtacgcaccctcgccgccgcgttcgccgactaccccgccacgcgccacaccgtcgatccggaccgccacatcgagcgggtcaccgagctgcaagaactcttcctcacgcgcgtcgggctcgacatcggcaaggtgtgggtcgcggacgacggcgccgcggtggcggtctggaccacgccggagagcgtcgaagcgggggcggtgttcgccgagatcggcccgcgcatggccgagttgagcggttcccggctggccgcgcagcaacagatggaaggcctcctggcgccgcaccggcccaaggagcccgcgtggttcctggccaccgtcggcgtctcgcccgaccaccagggcaagggtctgggcagcgccgtcgtgctccccggagtggaggcggccgagcgcgccggggtgcccgccttcctggagacctccgcgccccgcaacctccccttctacgagcggctcggcttcaccgtcaccgccgacgtcgaggtgcccgaaggaccgcgcacctggtgcatgacccgcaagcccggtgcctga

SEQ ID NO: 18099 - DNA, 2538 bp, synthetic construct
  source 1..2538: mol_type = other DNA
atggccttaccagtgaccgccttgctcctgccgctggccttgctgctccacgccgccaggccgctcgaggaggcctctacaaagggaccctccgtgtttcctctggctcccagcagcaagtctacaagcggaggaacagccgctctgggctgcctggtcaaggattactttcccgagcctgtgaccgtgtcctggaatagcggagcactgacaagcggcgtgcacacctttccagccgtgctgcaaagcagcggcctgtactctctgagcagcgtggtcacagtgcctagctctagcctgggcacccagacctacatctgcaatgtgaaccacaagcctagcaacaccaaggtggacaagagagtggaacccaagagctgtcccatcaagaccgatgtgattacaatggaccccaaggacaactgctccaaggacgccaacgataccctgctgctccagctgaccaacaccagcgcctactacatgtacttgttgctgctgctgaagtccgtggtgtacttcgccatcatcacatgctgcctgctgcggagaaccgccttctgctgcaacggcgagaagtctagggccaagcgatctggatctggagcaacaaacttctcactactcaaacaagcaggtgacgtggaggagaatcccgggcctactagcatggcccttccagtcactgccttgctgttgcctctggcgctcctgctccacgccgctagaccgggcatgagaaccgaggacctgcctaaggccgtggtgttcctggaaccccagtggtacagagtgctggaaaaggacagcgtgaccctgaagtgccagggcgcctacagccccgaggacaatagcacccagtggttccacaacgagagcctgatctccagccaggccagcagctacttcatcgacgccgccaccgtggacgacagcggcgagtatagatgccagaccaacctgagcaccctgagcgaccccgtgcagctggaagtgcacatcggatggctgctgctgcaggcccccagatgggtgttcaaagaagaggaccccatccacctgagatgccactcttggaagaacaccgccctgcacaaagtgacctacctgcagaacggcaagggcagaaagtacttccaccacaacagcgacttctacatccccaaggccaccctgaaggactccggctcctacttctgcagaggcctcgtgggcagcaagaacgtgtccagcgagacagtgaacatcaccatcacccagggcctggccgtgtctaccatcagcagctttttcccacccggctaccagacgcgtggacagcctaaggccaatcctaccgtgacactgttccctccaagcagcgaagaactccaggccaacaaggccacacttgtgtgcctgatctccgacttctaccctggggctgtgacagtggcttggaaggccgatggatctcctgtgaaagccggcgtggaaaccaccaagccatccaagcagagcaacaacaaatacgccgccagctcctacctgagcctgacacctgagcagtggaagtcccacagatcctacagctgccaagtgacccacgaaggcagcaccgtggaaaagacagtggcccctacagagtgcagcgaagtgaaaaccgactccaccgaccacgtgaagcccaaagagacagagaacaccaagcagcccagcaagagctgccacaagcccaaggccatcgtgcacaccgagaaagtgaacatgatgagcctgaccgtgctgggcctgcggatgctgttcgccaaaaccgtggccgtgaacttcctgctgaccgccaagctgttcttcctccgcgccaagagaagcggatctggcgtgaagcagaccctgaatttcgacctgctgaagctggctggcgacgtggaatccaacccaggcccttctagaggccatatgaccgagtacaagcccacggtgcgcctcgccacccgcgacgacgtccccagggccgtacgcaccctcgccgccgcgttcgccgactaccccgccacgcgccacaccgtcgatccggaccgccacatcgagcgggtcaccgagctgcaagaactcttcctcacgcgcgtcgggctcgacatcggcaaggtgtgggtcgcggacgacggcgccgcggtggcggtctggaccacgccggagagcgtcgaagcgggggcggtgttcgccgagatcggcccgcgcatggccgagttgagcggttcccggctggccgcgcagcaacagatggaaggcctcctggcgccgcaccggcccaaggagcccgcgtggttcctggccaccgtcggcgtctcgcccgaccaccagggcaagggtctgggcagcgccgtcgtgctccccggagtggaggcggccgagcgcgccggggtgcccgccttcctggagacctccgcgccccgcaacctccccttctacgagcggctcggcttcaccgtcaccgccgacgtcgaggtgcccgaaggaccgcgcacctggtgcatgacccgcaagcccggtgcctga

SEQ ID NO: 18100 - DNA, 1419 bp, synthetic construct
  source 1..1419: mol_type = other DNA
atggccttaccagtgaccgccttgctcctgccgctggccttgctgctccacgccgccaggccgctcgaggaggcctctacaaagggaccctccgtgtttcctctggctcccagcagcaagtctacaagcggaggaacagccgctctgggctgcctggtcaaggattactttcccgagcctgtgaccgtgtcctggaatagcggagcactgacaagcggcgtgcacacctttccagccgtgctgcaaagcagcggcctgtactctctgagcagcgtggtcacagtgcctagctctagcctgggcacccagacctacatctgcaatgtgaaccacaagcctagcaacaccaaggtggacaagagagtggaacccaagagctgtcccatcaagaccgatgtgattacaatggaccccaaggacaactgctccaaggacgccaacgataccctgctgctccagctgaccaacaccagcgcctactacatgtacttgttgctgctgctgaagtccgtggtgtacttcgccatcatcacatgctgcctgctgcggagaaccgccttctgctgcaacggcgagaagtctagggccaagcgatctggatctggagcaacaaacttctcactactcaaacaagcaggtgacgtggaggagaatcccgggcctactagcgccaccatggccttaccagtgaccgccttgctcctgccgctggccttgctgctccacgccgccaggccgatggaccccgacctggaaatcagagccgccttcctgcggcagagaaacacagccctgagaacagaggtggccgagctggaacaagaggtgcagcggctggaaaacgaggtgtcccagtacgagacaagatacggccctctcggaggcggaaaaacgcgtggacagcctaaggccaatcctaccgtgacactgttccctccaagcagcgaagaactccaggccaacaaggccacacttgtgtgcctgatctccgacttctaccctggggctgtgacagtggcttggaaggccgatggatctcctgtgaaagccggcgtggaaaccaccaagccatccaagcagagcaacaacaaatacgccgccagctcctacctgagcctgacacctgagcagtggaagtcccacagatcctacagctgccaagtgacccacgaaggcagcaccgtggaaaagacagtggcccctacagagtgcagcgaagtgaaaaccgactccaccgaccacgtgaagcccaaagagacagagaacaccaagcagcccagcaagagctgccacaagcccaaggccatcgtgcacaccgagaaagtgaacatgatgagcctgaccgtgctgggcctgcggatgctgttcgccaaaaccgtggccgtgaacttcctgctgaccgccaagctgttcttcctc

SEQ ID NO: 18101 - DNA, 1419 bp, synthetic construct
  source 1..1419: mol_type = other DNA
atggccttaccagtgaccgccttgctcctgccgctggccttgctgctccacgccgccaggccgctcgaggaggcctctacaaagggaccctccgtgtttcctctggctcccagcagcaagtctacaagcggaggaacagccgctctgggctgcctggtcaaggattactttcccgagcctgtgaccgtgtcctggaatagcggagcactgacaagcggcgtgcacacctttccagccgtgctgcaaagcagcggcctgtactctctgagcagcgtggtcacagtgcctagctctagcctgggcacccagacctacatctgcaatgtgaaccacaagcctagcaacaccaaggtggacaagagagtggaacccaagagctgtcccatcaagaccgatgtgattacaatggaccccaaggacaactgctccaaggacgccaacgataccctgctgctccagctgaccaacaccagcgcctactacatgtacttgttgctgctgctgaagtccgtggtgtacttcgccatcatcacatgctgcctgctgcggagaaccgccttctgctgcaacggcgagaagtctagggccaagcgatctggatctggagcaacaaacttctcactactcaaacaagcaggtgacgtggaggagaatcccgggcctactagcgccaccatggccttaccagtgaccgccttgctcctgccgctggccttgctgctccacgccgccaggccgatggaccctgatctcgaaattgaggccgcctttctggaacgcgagaacactgccctggaaaccagggtcgcagagctgagacagagagtgcagagactgcggaacagagtgtctcagtaccgcaccagatatggcccactcggcggaggtaaaacgcgtggacagcctaaggccaatcctaccgtgacactgttccctccaagcagcgaagaactccaggccaacaaggccacacttgtgtgcctgatctccgacttctaccctggggctgtgacagtggcttggaaggccgatggatctcctgtgaaagccggcgtggaaaccaccaagccatccaagcagagcaacaacaaatacgccgccagctcctacctgagcctgacacctgagcagtggaagtcccacagatcctacagctgccaagtgacccacgaaggcagcaccgtggaaaagacagtggcccctacagagtgcagcgaagtgaaaaccgactccaccgaccacgtgaagcccaaagagacagagaacaccaagcagcccagcaagagctgccacaagcccaaggccatcgtgcacaccgagaaagtgaacatgatgagcctgaccgtgctgggcctgcggatgctgttcgccaaaaccgtggccgtgaacttcctgctgaccgccaagctgttcttcctc

SEQ ID NO: 18102 - DNA, 1350 bp, synthetic construct
  source 1..1350: mol_type = other DNA
atggccttaccagtgaccgccttgctcctgccgctggccttgctgctccacgccgccaggccgctcgaggaggcctctacaaagggaccctccgtgtttcctctggctcccagcagcaagtctacaagcggaggaacagccgctctgggctgcctggtcaaggattactttcccgagcctgtgaccgtgtcctggaatagcggagcactgacaagcggcgtgcacacctttccagccgtgctgcaaagcagcggcctgtactctctgagcagcgtggtcacagtgcctagctctagcctgggcacccagacctacatctgcaatgtgaaccacaagcctagcaacaccaaggtggacaagagagtggaacccaagagctgtcccatcaagaccgatgtgattacaatggaccccaaggacaactgctccaaggacgccaacgataccctgctgctccagctgaccaacaccagcgcctactacatgtacttgttgctgctgctgaagtccgtggtgtacttcgccatcatcacatgctgcctgctgcggagaaccgccttctgctgcaacggcgagaagtctagggccaagcgatctggatctggagcaacaaacttctcactactcaaacaagcaggtgacgtggaggagaatcccgggcctactagcgccaccatggccttaccagtgaccgccttgctcctgccgctggccttgctgctccacgccgccaggccggaagttgctgccctcgagaaggaggtagcagctttggaaaaagaagtcgcagcccttgagaaagaagttgcggctctggagaagacgcgtggacagcctaaggccaatcctaccgtgacactgttccctccaagcagcgaagaactccaggccaacaaggccacacttgtgtgcctgatctccgacttctaccctggggctgtgacagtggcttggaaggccgatggatctcctgtgaaagccggcgtggaaaccaccaagccatccaagcagagcaacaacaaatacgccgccagctcctacctgagcctgacacctgagcagtggaagtcccacagatcctacagctgccaagtgacccacgaaggcagcaccgtggaaaagacagtggcccctacagagtgcagcgaagtgaaaaccgactccaccgaccacgtgaagcccaaagagacagagaacaccaagcagcccagcaagagctgccacaagcccaaggccatcgtgcacaccgagaaagtgaacatgatgagcctgaccgtgctgggcctgcggatgctgttcgccaaaaccgtggccgtgaacttcctgctgaccgccaagctgttcttcctc

SEQ ID NO: 18103 - DNA, 2124 bp, synthetic construct
  source 1..2124: mol_type = other DNA
atggccttaccagtgaccgccttgctcctgccgctggccttgctgctccacgccgccaggccgctcgaggaggcctctacaaagggaccctccgtgtttcctctggctcccagcagcaagtctacaagcggaggaacagccgctctgggctgcctggtcaaggattactttcccgagcctgtgaccgtgtcctggaatagcggagcactgacaagcggcgtgcacacctttccagccgtgctgcaaagcagcggcctgtactctctgagcagcgtggtcacagtgcctagctctagcctgggcacccagacctacatctgcaatgtgaaccacaagcctagcaacaccaaggtggacaagagagtggaacccaagagctgtcccatcaagaccgatgtgattacaatggaccccaaggacaactgctccaaggacgccaacgataccctgctgctccagctgaccaacaccagcgcctactacatgtacttgttgctgctgctgaagtccgtggtgtacttcgccatcatcacatgctgcctgctgcggagaaccgccttctgctgcaacggcgagaagtctagggccaagcgatctggatctggagcaacaaacttctcactactcaaacaagcaggtgacgtggaggagaatcccgggcctactagcgccaccatggccttaccagtgaccgccttgctcctgccgctggccttgctgctccacgccgccaggccgctgttcaatcaagaggtgcagatccctctgaccgagagctactgtggcccctgtcctaagaactggatctgctacaagaacaactgctaccagttcttcgacgagagcaagaattggtacgagagccaggccagctgcatgagccagaatgccagcctgctgaaggtgtacagcaaagaggaccaggacctgctgaaactggtcaagagcgcccactggatgggccttgtgcacatccccaccaatggctcttggcagtgggaggacggcagcattctgagccctaacctgctgaccatcatcgagatgcagaagggcgactgcgccctgtacgccagcagctttaagggctacatcgagaattgcagcaccccgaacacctacatctgtatgcagagaaccgtttctggcggaggcggctctggaggaggcggaagtggcggcggaggcgacctctttaatcaagaagtccagattccactcaccgaatcctactgcggaccttgtccaaaaaattggatttgttataagaacaactgttatcaattctttgatgagtctaaaaattggtatgagtcccaggcttcctgcatgtctcagaacgcttctctgctgaaagtctactctaaagaagatcaggatctcctgaagctcgtcaagtctgcccattggatggggctcgtccacattcctaccaacggaagctggcaatgggaagatggctccatcctgtctccaaatctgctcacgattattgaaatgcagaaaggggattgtgctctctacgccagctccttcaagggatatattgagaactgtagcacgcccaatacttatatctgtatgcaacggaccgtgacgcgtggacagcctaaggccaatcctaccgtgacactgttccctccaagcagcgaagaactccaggccaacaaggccacacttgtgtgcctgatctccgacttctaccctggggctgtgacagtggcttggaaggccgatggatctcctgtgaaagccggcgtggaaaccaccaagccatccaagcagagcaacaacaaatacgccgccagctcctacctgagcctgacacctgagcagtggaagtcccacagatcctacagctgccaagtgacccacgaaggcagcaccgtggaaaagacagtggcccctacagagtgcagcgaagtgaaaaccgactccaccgaccacgtgaagcccaaagagacagagaacaccaagcagcccagcaagagctgccacaagcccaaggccatcgtgcacaccgagaaagtgaacatgatgagcctgaccgtgctgggcctgcggatgctgttcgccaaaaccgtggccgtgaacttcctgctgaccgccaagctgttcttcctc

SEQ ID NO: 18104 - DNA, 2124 bp, synthetic construct
  source 1..2124: mol_type = other DNA
atggccttaccagtgaccgccttgctcctgccgctggccttgctgctccacgccgccaggccgctcgaggaggcctctacaaagggaccctccgtgtttcctctggctcccagcagcaagtctacaagcggaggaacagccgctctgggctgcctggtcaaggattactttcccgagcctgtgaccgtgtcctggaatagcggagcactgacaagcggcgtgcacacctttccagccgtgctgcaaagcagcggcctgtactctctgagcagcgtggtcacagtgcctagctctagcctgggcacccagacctacatctgcaatgtgaaccacaagcctagcaacaccaaggtggacaagagagtggaacccaagagctgtcccatcaagaccgatgtgattacaatggaccccaaggacaactgctccaaggacgccaacgataccctgctgctccagctgaccaacaccagcgcctactacatgtacttgttgctgctgctgaagtccgtggtgtacttcgccatcatcacatgctgcctgctgcggagaaccgccttctgctgcaacggcgagaagtctagggccaagcgatctggatctggagcaacaaacttctcactactcaaacaagcaggtgacgtggaggagaatcccgggcctactagcgccaccatggccttaccagtgaccgccttgctcctgccgctggccttgctgctccacgccgccaggccgctgttcaatcaagaggtgcagatccctctgaccgagagctactgtggcccctgtcctaagaactggatctgctacaagaacaactgctaccagttcttcgacgagagcaagaattggtacgagagccaggccagctgcatgagccagaatgccagcctgctgaaggtgtacagcaaagaggaccaggacctgctgaaactggtcaagagcgcccactggatgggccttgtgcacatccccaccaatggctcttggcagtgggaggacggcagcattctgagccctaacctgctgaccatcatcgagatgcagaagggcgactgcgccctgtacgccagcagctttaagggcttcatcgagaattgcagcaccccgaacacctacatctgtatgcagagaaccgttggcggaggcggaagtggaggcggaggatctggcggcggaggctctgacctctttaatcaagaagtccagattccactcaccgaatcctactgcggaccttgtccaaaaaattggatttgttataagaacaactgttatcaattctttgatgagtctaaaaattggtatgagtcccaggcttcctgcatgtctcagaacgcttctctgctgaaagtctactctaaagaagatcaggatctcctgaagctcgtcaagtctgcccattggatggggctcgtccacattcctaccaacggaagctggcaatgggaagatggctccatcctgtctccaaatctgctcacgattattgaaatgcagaaaggggattgtgctctctacgccagctccttcaagggatttattgagaactgtagcacgcccaatacttatatctgtatgcaacggaccgtgacgcgtggacagcctaaggccaatcctaccgtgacactgttccctccaagcagcgaagaactccaggccaacaaggccacacttgtgtgcctgatctccgacttctaccctggggctgtgacagtggcttggaaggccgatggatctcctgtgaaagccggcgtggaaaccaccaagccatccaagcagagcaacaacaaatacgccgccagctcctacctgagcctgacacctgagcagtggaagtcccacagatcctacagctgccaagtgacccacgaaggcagcaccgtggaaaagacagtggcccctacagagtgcagcgaagtgaaaaccgactccaccgaccacgtgaagcccaaagagacagagaacaccaagcagcccagcaagagctgccacaagcccaaggccatcgtgcacaccgagaaagtgaacatgatgagcctgaccgtgctgggcctgcggatgctgttcgccaaaaccgtggccgtgaacttcctgctgaccgccaagctgttcttcctc

SEQ ID NO: 18105 - DNA, 2202 bp, synthetic construct
  source 1..2202: mol_type = other DNA
atggccttaccagtgaccgccttgctcctgccgctggccttgctgctccacgccgccaggccgctcgaggaggcctctacaaagggaccctccgtgtttcctctggctcccagcagcaagtctacaagcggaggaacagccgctctgggctgcctggtcaaggattactttcccgagcctgtgaccgtgtcctggaatagcggagcactgacaagcggcgtgcacacctttccagccgtgctgcaaagcagcggcctgtactctctgagcagcgtggtcacagtgcctagctctagcctgggcacccagacctacatctgcaatgtgaaccacaagcctagcaacaccaaggtggacaagagagtggaacccaagagctgtcccatcaagaccgatgtgattacaatggaccccaaggacaactgctccaaggacgccaacgataccctgctgctccagctgaccaacaccagcgcctactacatgtacttgttgctgctgctgaagtccgtggtgtacttcgccatcatcacatgctgcctgctgcggagaaccgccttctgctgcaacggcgagaagtctagggccaagcgatctggatctggagcaacaaacttctcactactcaaacaagcaggtgacgtggaggagaatcccgggcctactagcatggccttaccagtgaccgccttgctcctgccgctggccttgctgctccacgccgccaggccgatggaccccgacctggaaatcagagccgccttcctgcggcagagaaacacagccctgagaacagaggtggccgagctggaacaagaggtgcagcggctggaaaacgaggtgtcccagtacgagacaagatacggccctctcggaggcggaaaaggtaccggcggaggcggatctggcggcggaggtagcggtggcggaggatctgaattcgacatccagatgacacagagccctagcagcctgtctgccagcgtgggagacagagtgaccatcacatgcaaggccagcgaccacatcaacaactggctggcctggtatcagcagaagcctggacaggcccctaagctgctgatctacggcgctaccacactggaaacaggcgtgcccagcagattttctggcagcggctctggcaccgactacaccctgacaatatccagcctccagcctgaggacttcgccacctactactgtcagcagagctggaacaccccttggacattcggccagggcaccaagctggaaatcaagagaggcggaggcggaagtggaggcggaggatctggcggcggaggctctcaagttcagcttcaacagcctggcgctgagctggtcaaacctggcgcttctgtgaagatgagctgcaaagccagcggctacgccttcagcagctactggatcaactggatgaagcagaaacccggccagggactcgaatggatcggccaaatctatcccggcgacggcgacaccaactacaacggcaagttcaagggcagagccacactgaccgccgatacctctagcagcacagcctacatgcagctgagcagcctgaccagcgaagatagcgccgtgtacttctgtgcccggtccatcacaacagtcgtgggctgcgctatggactattggggccagggaacaagcgtgaccgtgtctagtacgcgtggacagcctaaggccaatcctaccgtgacactgttccctccaagcagcgaagaactccaggccaacaaggccacacttgtgtgcctgatctccgacttctaccctggggctgtgacagtggcttggaaggccgatggatctcctgtgaaagccggcgtggaaaccaccaagccatccaagcagagcaacaacaaatacgccgccagctcctacctgagcctgacacctgagcagtggaagtcccacagatcctacagctgccaagtgacccacgaaggcagcaccgtggaaaagacagtggcccctacagagtgcagcgaagtgaaaaccgactccaccgaccacgtgaagcccaaagagacagagaacaccaagcagcccagcaagagctgccacaagcccaaggccatcgtgcacaccgagaaagtgaacatgatgagcctgaccgtgctgggcctgcggatgctgttcgccaaaaccgtggccgtgaacttcctgctgaccgccaagctgttcttcctc

SEQ ID NO: 18106 - DNA, 2907 bp, synthetic construct
  source 1..2907: mol_type = other DNA
atggccttaccagtgaccgccttgctcctgccgctggccttgctgctccacgccgccaggccgctcgaggaggcctctacaaagggaccctccgtgtttcctctggctcccagcagcaagtctacaagcggaggaacagccgctctgggctgcctggtcaaggattactttcccgagcctgtgaccgtgtcctggaatagcggagcactgacaagcggcgtgcacacctttccagccgtgctgcaaagcagcggcctgtactctctgagcagcgtggtcacagtgcctagctctagcctgggcacccagacctacatctgcaatgtgaaccacaagcctagcaacaccaaggtggacaagagagtggaacccaagagctgtcccatcaagaccgatgtgattacaatggaccccaaggacaactgctccaaggacgccaacgataccctgctgctccagctgaccaacaccagcgcctactacatgtacttgttgctgctgctgaagtccgtggtgtacttcgccatcatcacatgctgcctgctgcggagaaccgccttctgctgcaacggcgagaagtctagggccaagcgatctggatctggagcaacaaacttctcactactcaaacaagcaggtgacgtggaggagaatcccgggcctactagcatggccttaccagtgaccgccttgctcctgccgctggccttgctgctccacgccgccaggccgctgttcaatcaagaggtgcagatccctctgaccgagagctactgtggcccctgtcctaagaactggatctgctacaagaacaactgctaccagttcttcgacgagagcaagaattggtacgagagccaggccagctgcatgagccagaatgccagcctgctgaaggtgtacagcaaagaggaccaggacctgctgaaactggtcaagagcgcccactggatgggccttgtgcacatccccaccaatggctcttggcagtgggaggacggcagcattctgagccctaacctgctgaccatcatcgagatgcagaagggcgactgcgccctgtacgccagcagctttaagggcttcatcgagaattgcagcaccccgaacacctacatctgtatgcagagaaccgttggcggaggcggaagtggaggcggaggatctggcggcggaggctctgacctctttaatcaagaagtccagattccactcaccgaatcctactgcggaccttgtccaaaaaattggatttgttataagaacaactgttatcaattctttgatgagtctaaaaattggtatgagtcccaggcttcctgcatgtctcagaacgcttctctgctgaaagtctactctaaagaagatcaggatctcctgaagctcgtcaagtctgcccattggatggggctcgtccacattcctaccaacggaagctggcaatgggaagatggctccatcctgtctccaaatctgctcacgattattgaaatgcagaaaggggattgtgctctctacgccagctccttcaagggatttattgagaactgtagcacgcccaatacttatatctgtatgcaacggaccgtgggtaccggcggaggcggatctggcggcggaggtagcggtggcggaggatctgaattcgacatccagatgacacagagccctagcagcctgtctgccagcgtgggagacagagtgaccatcacatgcaaggccagcgaccacatcaacaactggctggcctggtatcagcagaagcctggacaggcccctaagctgctgatctacggcgctaccacactggaaacaggcgtgcccagcagattttctggcagcggctctggcaccgactacaccctgacaatatccagcctccagcctgaggacttcgccacctactactgtcagcagagctggaacaccccttggacattcggccagggcaccaagctggaaatcaagagaggcggaggcggaagtggaggcggaggatctggcggcggaggctctcaagttcagcttcaacagcctggcgctgagctggtcaaacctggcgcttctgtgaagatgagctgcaaagccagcggctacgccttcagcagctactggatcaactggatgaagcagaaacccggccagggactcgaatggatcggccaaatctatcccggcgacggcgacaccaactacaacggcaagttcaagggcagagccacactgaccgccgatacctctagcagcacagcctacatgcagctgagcagcctgaccagcgaagatagcgccgtgtacttctgtgcccggtccatcacaacagtcgtgggctgcgctatggactattggggccagggaacaagcgtgaccgtgtctagtacgcgtggacagcctaaggccaatcctaccgtgacactgttccctccaagcagcgaagaactccaggccaacaaggccacacttgtgtgcctgatctccgacttctaccctggggctgtgacagtggcttggaaggccgatggatctcctgtgaaagccggcgtggaaaccaccaagccatccaagcagagcaacaacaaatacgccgccagctcctacctgagcctgacacctgagcagtggaagtcccacagatcctacagctgccaagtgacccacgaaggcagcaccgtggaaaagacagtggcccctacagagtgcagcgaagtgaaaaccgactccaccgaccacgtgaagcccaaagagacagagaacaccaagcagcccagcaagagctgccacaagcccaaggccatcgtgcacaccgagaaagtgaacatgatgagcctgaccgtgctgggcctgcggatgctgttcgccaaaaccgtggccgtgaacttcctgctgaccgccaagctgttcttcctc

SEQ ID NO: 18107 - DNA, 2022 bp, synthetic construct
  source 1..2022: mol_type = other DNA
atggccttaccagtgaccgccttgctcctgccgctggccttgctgctccacgccgccaggccgctcgaggaggcctctacaaagggaccctccgtgtttcctctggctcccagcagcaagtctacaagcggaggaacagccgctctgggctgcctggtcaaggattactttcccgagcctgtgaccgtgtcctggaatagcggagcactgacaagcggcgtgcacacctttccagccgtgctgcaaagcagcggcctgtactctctgagcagcgtggtcacagtgcctagctctagcctgggcacccagacctacatctgcaatgtgaaccacaagcctagcaacaccaaggtggacaagagagtggaacccaagagctgtcccatcaagaccgatgtgattacaatggaccccaaggacaactgctccaaggacgccaacgataccctgctgctccagctgaccaacaccagcgcctactacatgtacttgttgctgctgctgaagtccgtggtgtacttcgccatcatcacatgctgcctgctgcggagaaccgccttctgctgcaacggcgagaagtctagggccaagcgatctggatctggagcaacaaacttctcactactcaaacaagcaggtgacgtggaggagaatcccgggcctactagcatggccttaccagtgaccgccttgctcctgccgctggccttgctgctccacgccgccaggccgcagtctgtgctgacacagcctcctagtgtgtctggcgctcctggacagagagtgaccatctcttgtaccggcagcagcagcaatatcggagccggctatgacgtgcactggtatcagcagctccctggcacagcccctaaactgctgatcttcggcaacagcaacagacccagcggcgtgcccgatagattcagcggctttaagagcggcacaagcgccagcctggctatcactggactgcaagccgaggacgaggccgactacttctgccagagctacgatagcagcctgagcggcagcggagtgtttggcacaggcaccaaagtgacagtgcttggcggcggaggcggaagtggaggcggaggatctggcggcggaggctctcaaatgcaactggttcaaagcggcggtggcctggtgcaacctggaagaagtctgagactgagctgtgccgccagcggcttcaccttcgatgattacgccatgcactgggtccgacaggcccctggaaaaggactggaatgggtgtccggcatctcctggaatagcggctctatcggctacgccgacagcgtgaagggcagattcaccatcagccgggacaacgccaagaacagcctgtacctccagatgaactccctgagagccgaggatacagccctgtactactgcgccaaggacatccacagcggcagctactacggcctgctgtactacgctatggacgtgtggggccagggcacaaccgtgacagtttcttctacgcgtggacagcctaaggccaatcctaccgtgacactgttccctccaagcagcgaagaactccaggccaacaaggccacacttgtgtgcctgatctccgacttctaccctggggctgtgacagtggcttggaaggccgatggatctcctgtgaaagccggcgtggaaaccaccaagccatccaagcagagcaacaacaaatacgccgccagctcctacctgagcctgacacctgagcagtggaagtcccacagatcctacagctgccaagtgacccacgaaggcagcaccgtggaaaagacagtggcccctacagagtgcagcgaagtgaaaaccgactccaccgaccacgtgaagcccaaagagacagagaacaccaagcagcccagcaagagctgccacaagcccaaggccatcgtgcacaccgagaaagtgaacatgatgagcctgaccgtgctgggcctgcggatgctgttcgccaaaaccgtggccgtgaacttcctgctgaccgccaagctgttcttcctc

SEQ ID NO: 18108 - DNA, 1533 bp, synthetic construct
  source 1..1533: mol_type = other DNA
atggccttaccagtgaccgccttgctcctgccgctggccttgctgctccacgccgccaggccgctcgaggaggcctctacaaagggaccctccgtgtttcctctggctcccagcagcaagtctacaagcggaggaacagccgctctgggctgcctggtcaaggattactttcccgagcctgtgaccgtgtcctggaatagcggagcactgacaagcggcgtgcacacctttccagccgtgctgcaaagcagcggcctgtactctctgagcagcgtggtcacagtgcctagctctagcctgggcacccagacctacatctgcaatgtgaaccacaagcctagcaacaccaaggtggacaagagagtggaacccaagagctgtcccatcaagaccgatgtgattacaatggaccccaaggacaactgctccaaggacgccaacgataccctgctgctccagctgaccaacaccagcgcctactacatgtacttgttgctgctgctgaagtccgtggtgtacttcgccatcatcacatgctgcctgctgcggagaaccgccttctgctgcaacggcgagaagtctagggccaagcgatctggatctggagcaacaaacttctcactactcaaacaagcaggtgacgtggaggagaatcccgggcctactagcatggccttaccagtgaccgccttgctcctgccgctggccttgctgctccacgccgccaggccgatgtgtatgccctgcttcaccaccgaccatcagatggcccggaagtgcgacgattgctgtggcggaaaaggcagaggcaagtgctacggccctcagtgcttgtgtagactcgagggcggaggcggaagtggaggcggaggatctggcggcggaggctctttcgaagtgtgtatgccttgttttaccacggatcaacaaatggctcgcaagtgttctgactgctgcggaggcaaaggccggggaaagtgttatggcccacagtgtctgtgccggacgcgtggacagcctaaggccaatcctaccgtgacactgttccctccaagcagcgaagaactccaggccaacaaggccacacttgtgtgcctgatctccgacttctaccctggggctgtgacagtggcttggaaggccgatggatctcctgtgaaagccggcgtggaaaccaccaagccatccaagcagagcaacaacaaatacgccgccagctcctacctgagcctgacacctgagcagtggaagtcccacagatcctacagctgccaagtgacccacgaaggcagcaccgtggaaaagacagtggcccctacagagtgcagcgaagtgaaaaccgactccaccgaccacgtgaagcccaaagagacagagaacaccaagcagcccagcaagagctgccacaagcccaaggccatcgtgcacaccgagaaagtgaacatgatgagcctgaccgtgctgggcctgcggatgctgttcgccaaaaccgtggccgtgaacttcctgctgaccgccaagctgttcttcctc

SEQ ID NO: 18109 - DNA, 2322 bp, synthetic construct
  source 1..2322: mol_type = other DNA
atggccttaccagtgaccgccttgctcctgccgctggccttgctgctccacgccgccaggccgctcgaggaggcctctacaaagggaccctccgtgtttcctctggctcccagcagcaagtctacaagcggaggaacagccgctctgggctgcctggtcaaggattactttcccgagcctgtgaccgtgtcctggaatagcggagcactgacaagcggcgtgcacacctttccagccgtgctgcaaagcagcggcctgtactctctgagcagcgtggtcacagtgcctagctctagcctgggcacccagacctacatctgcaatgtgaaccacaagcctagcaacaccaaggtggacaagagagtggaacccaagagctgtcccatcaagaccgatgtgattacaatggaccccaaggacaactgctccaaggacgccaacgataccctgctgctccagctgaccaacaccagcgcctactacatgtacttgttgctgctgctgaagtccgtggtgtacttcgccatcatcacatgctgcctgctgcggagaaccgccttctgctgcaacggcgagaagtctagggccaagcgatctggatctggagcaacaaacttctcactactcaaacaagcaggtgacgtggaggagaatcccgggcctactagcatggccttaccagtgaccgccttgctcctgccgctggccttgctgctccacgccgccaggccgatgtgtatgccctgcttcaccaccgaccatcagatggcccggaagtgcgacgattgctgtggcggaaaaggcagaggcaagtgctacggccctcagtgcttgtgtagactcgagggcggaggcggaagtggaggcggaggatctggcggcggaggctctttcgaagtgtgtatgccttgttttaccacggatcaacaaatggctcgcaagtgttctgactgctgcggaggcaaaggccggggaaagtgttatggcccacagtgtctgtgccggggtaccggcggaggcggatctggcggcggaggtagcggtggcggaggatctgaattcgacatccagatgacacagagccctagcagcctgtctgccagcgtgggagacagagtgaccatcacatgcaaggccagcgaccacatcaacaactggctggcctggtatcagcagaagcctggacaggcccctaagctgctgatctacggcgctaccacactggaaacaggcgtgcccagcagattttctggcagcggctctggcaccgactacaccctgacaatatccagcctccagcctgaggacttcgccacctactactgtcagcagagctggaacaccccttggacattcggccagggcaccaagctggaaatcaagagaggcggaggcggaagtggaggcggaggatctggcggcggaggctctcaagttcagcttcaacagcctggcgctgagctggtcaaacctggcgcttctgtgaagatgagctgcaaagccagcggctacgccttcagcagctactggatcaactggatgaagcagaaacccggccagggactcgaatggatcggccaaatctatcccggcgacggcgacaccaactacaacggcaagttcaagggcagagccacactgaccgccgatacctctagcagcacagcctacatgcagctgagcagcctgaccagcgaagatagcgccgtgtacttctgtgcccggtccatcacaacagtcgtgggctgcgctatggactattggggccagggaacaagcgtgaccgtgtctagtacgcgtggacagcctaaggccaatcctaccgtgacactgttccctccaagcagcgaagaactccaggccaacaaggccacacttgtgtgcctgatctccgacttctaccctggggctgtgacagtggcttggaaggccgatggatctcctgtgaaagccggcgtggaaaccaccaagccatccaagcagagcaacaacaaatacgccgccagctcctacctgagcctgacacctgagcagtggaagtcccacagatcctacagctgccaagtgacccacgaaggcagcaccgtggaaaagacagtggcccctacagagtgcagcgaagtgaaaaccgactccaccgaccacgtgaagcccaaagagacagagaacaccaagcagcccagcaagagctgccacaagcccaaggccatcgtgcacaccgagaaagtgaacatgatgagcctgaccgtgctgggcctgcggatgctgttcgccaaaaccgtggccgtgaacttcctgctgaccgccaagctgttcttcctc

SEQ ID NO: 18110 - DNA, 2547 bp, synthetic construct
  source 1..2547: mol_type = other DNA
atggccttaccagtgaccgccttgctcctgccgctggccttgctgctccacgccgccaggccgctcgaggaggcctctacaaagggaccctccgtgtttcctctggctcccagcagcaagtctacaagcggaggaacagccgctctgggctgcctggtcaaggattactttcccgagcctgtgaccgtgtcctggaatagcggagcactgacaagcggcgtgcacacctttccagccgtgctgcaaagcagcggcctgtactctctgagcagcgtggtcacagtgcctagctctagcctgggcacccagacctacatctgcaatgtgaaccacaagcctagcaacaccaaggtggacaagagagtggaacccaagagctgtcccatcaagaccgatgtgattacaatggaccccaaggacaactgctccaaggacgccaacgataccctgctgctccagctgaccaacaccagcgcctactacatgtacttgttgctgctgctgaagtccgtggtgtacttcgccatcatcacatgctgcctgctgcggagaaccgccttctgctgcaacggcgagaagtctagggccaagcgatctggatctggagcaacaaacttctcactactcaaacaagcaggtgacgtggaggagaatcccgggcctactagcatggccttaccagtgaccgccttgctcctgccgctggccttgctgctccacgccgccaggccgagccccgtagctcctgcctgtgaccccagactcctaaataaactgctgcgtgactcccacctccttcacagccgactgagtcagtgtcccgacgtggaccctttgtctatccctgttctgctgcctgctgtggactttagcctgggagaatggaaaacccagacggaacagagcaaggcacaggacattctaggggcagtgtcccttctactggagggagtgatggcagcacgaggacagttggaaccctcctgcctctcatccctcctgggacagctttctgggcaggttcgcctcctcttgggggccctgcagggcctcctaggaacccagcttcctctacagggcaggaccacagctcacaaggaccccaatgccctcttcttgagcttgcaacaactgcttcggggaaaggtgcgcttcctgcttctggtagaaggtcccaccctctgtgtcagacggaccctgccaaccacagctgtcccaagcagtacttctggtaccggcggaggcggatctggcggcggaggtagcggtggcggaggatctgaattcgacatccagatgacacagagccctagcagcctgtctgccagcgtgggagacagagtgaccatcacatgcaaggccagcgaccacatcaacaactggctggcctggtatcagcagaagcctggacaggcccctaagctgctgatctacggcgctaccacactggaaacaggcgtgcccagcagattttctggcagcggctctggcaccgactacaccctgacaatatccagcctccagcctgaggacttcgccacctactactgtcagcagagctggaacaccccttggacattcggccagggcaccaagctggaaatcaagagaggcggaggcggaagtggaggcggaggatctggcggcggaggctctcaagttcagcttcaacagcctggcgctgagctggtcaaacctggcgcttctgtgaagatgagctgcaaagccagcggctacgccttcagcagctactggatcaactggatgaagcagaaacccggccagggactcgaatggatcggccaaatctatcccggcgacggcgacaccaactacaacggcaagttcaagggcagagccacactgaccgccgatacctctagcagcacagcctacatgcagctgagcagcctgaccagcgaagatagcgccgtgtacttctgtgcccggtccatcacaacagtcgtgggctgcgctatggactattggggccagggaacaagcgtgaccgtgtctagtacgcgtggacagcctaaggccaatcctaccgtgacactgttccctccaagcagcgaagaactccaggccaacaaggccacacttgtgtgcctgatctccgacttctaccctggggctgtgacagtggcttggaaggccgatggatctcctgtgaaagccggcgtggaaaccaccaagccatccaagcagagcaacaacaaatacgccgccagctcctacctgagcctgacacctgagcagtggaagtcccacagatcctacagctgccaagtgacccacgaaggcagcaccgtggaaaagacagtggcccctacagagtgcagcgaagtgaaaaccgactccaccgaccacgtgaagcccaaagagacagagaacaccaagcagcccagcaagagctgccacaagcccaaggccatcgtgcacaccgagaaagtgaacatgatgagcctgaccgtgctgggcctgcggatgctgttcgccaaaaccgtggccgtgaacttcctgctgaccgccaagctgttcttcctc

SEQ ID NO: 18111 - DNA, 2268 bp, synthetic construct
  source 1..2268: mol_type = other DNA
atggccttaccagtgaccgccttgctcctgccgctggccttgctgctccacgccgccaggccgctcgaggaggcctctacaaagggaccctccgtgtttcctctggctcccagcagcaagtctacaagcggaggaacagccgctctgggctgcctggtcaaggattactttcccgagcctgtgaccgtgtcctggaatagcggagcactgacaagcggcgtgcacacctttccagccgtgctgcaaagcagcggcctgtactctctgagcagcgtggtcacagtgcctagctctagcctgggcacccagacctacatctgcaatgtgaaccacaagcctagcaacaccaaggtggacaagagagtggaacccaagagctgtcccatcaagaccgatgtgattacaatggaccccaaggacaactgctccaaggacgccaacgataccctgctgctccagctgaccaacaccagcgcctactacatgtacttgttgctgctgctgaagtccgtggtgtacttcgccatcatcacatgctgcctgctgcggagaaccgccttctgctgcaacggcgagaagtctagggccaagcgatctggatctggagcaacaaacttctcactactcaaacaagcaggtgacgtggaggagaatcccgggcctactagcatggccttaccagtgaccgccttgctcctgccgctggccttgctgctccacgccgccaggccgatgggcagctgggaagagttcgagctgagactgaacgccatcgaggaacggctgtatgccctcggaggatctgaagccgagctggcctacttcgagtacgtgatcgccgacttcgagggcaacctgcagcggtacaaaggcaagggcaaccctgaagtggaagccctgtacttcgaggccgacgccatcttcgaggaactggtggcctacagacacaacggtaccggcggaggcggatctggcggcggaggtagcggtggcggaggatctgaattcgacatccagatgacacagagccctagcagcctgtctgccagcgtgggagacagagtgaccatcacatgcaaggccagcgaccacatcaacaactggctggcctggtatcagcagaagcctggacaggcccctaagctgctgatctacggcgctaccacactggaaacaggcgtgcccagcagattttctggcagcggctctggcaccgactacaccctgacaatatccagcctccagcctgaggacttcgccacctactactgtcagcagagctggaacaccccttggacattcggccagggcaccaagctggaaatcaagagaggcggaggcggaagtggaggcggaggatctggcggcggaggctctcaagttcagcttcaacagcctggcgctgagctggtcaaacctggcgcttctgtgaagatgagctgcaaagccagcggctacgccttcagcagctactggatcaactggatgaagcagaaacccggccagggactcgaatggatcggccaaatctatcccggcgacggcgacaccaactacaacggcaagttcaagggcagagccacactgaccgccgatacctctagcagcacagcctacatgcagctgagcagcctgaccagcgaagatagcgccgtgtacttctgtgcccggtccatcacaacagtcgtgggctgcgctatggactattggggccagggaacaagcgtgaccgtgtctagtacgcgtggacagcctaaggccaatcctaccgtgacactgttccctccaagcagcgaagaactccaggccaacaaggccacacttgtgtgcctgatctccgacttctaccctggggctgtgacagtggcttggaaggccgatggatctcctgtgaaagccggcgtggaaaccaccaagccatccaagcagagcaacaacaaatacgccgccagctcctacctgagcctgacacctgagcagtggaagtcccacagatcctacagctgccaagtgacccacgaaggcagcaccgtggaaaagacagtggcccctacagagtgcagcgaagtgaaaaccgactccaccgaccacgtgaagcccaaagagacagagaacaccaagcagcccagcaagagctgccacaagcccaaggccatcgtgcacaccgagaaagtgaacatgatgagcctgaccgtgctgggcctgcggatgctgttcgccaaaaccgtggccgtgaacttcctgctgaccgccaagctgttcttcctc

SEQ ID NO: 18112 - DNA, 2688 bp, synthetic construct
  source 1..2688: mol_type = other DNA
atggccttaccagtgaccgccttgctcctgccgctggccttgctgctccacgccgccaggccgctcgagggacagcctaaggccaatcctaccgtgacactgttccctccaagcagcgaagaactccaggccaacaaggccacacttgtgtgcctgatctccgacttctaccctggggctgtgacagtggcttggaaggccgatggatctcctgtgaaagccggcgtggaaaccaccaagccatccaagcagagcaacaacaaatacgccgccagctcctacctgagcctgacacctgagcagtggaagtcccacagatcctacagctgccaagtgacccacgaaggcagcaccgtggaaaagacagtggcccctacagagtgcagcgaagtgaaaaccgactccaccgaccacgtgaagcccaaagagacagagaacaccaagcagcccagcaagagctgccacaagcccaaggccatcgtgcacaccgagaaagtgaacatgatgagcctgaccgtgctgggcctgcggatgctgttcgccaaaaccgtggccgtgaacttcctgctgaccgccaagctgttcttcctcagggccaagcgatctggatctggagcaacaaacttctcactactcaaacaagcaggtgacgtggaggagaatcccgggcctactagcatggccttaccagtgaccgccttgctcctgccgctggccttgctgctccacgccgccaggccggacatccagatgacacagactacatcctccctgtctgcctctctgggagacagagtcaccatcagttgcagggcaagtcaggacattagtaaatatttaaattggtatcagcagaaaccagatggaactgttaaactcctgatctaccatacatcaagattacactcaggagtcccatcaaggttcagtggcagtgggtctggaacagattattctctcaccattagcaacctggagcaagaagatattgccacttacttttgccaacagggtaatacgcttccgtacacgttcggaggggggaccaagctggagatcacaggtggcggtggctcgggcggtggtgggtcgggtggcggcggatctgaggtgaaactgcaggagtcaggacctggcctggtggcgccctcacagagcctgtccgtcacatgcactgtctcaggggtctcattacccgactatggtgtaagctggattcgccagcctccacgaaagggtctggagtggctgggagtaatatggggtagtgaaaccacatactataattcagctctcaaatccagactgaccatcatcaaggacaactccaagagccaagttttcttaaaaatgaacagtctgcaaactgatgacacagccatttactactgtgccaaacattattactacggtggtagctatgctatggactactggggtcaaggaacctcagtcaccgtctcctcaacgcgtgaggcctctacaaagggaccctccgtgtttcctctggctcccagcagcaagtctacaagcggaggaacagccgctctgggctgcctggtcaaggattactttcccgagcctgtgaccgtgtcctggaatagcggagcactgacaagcggcgtgcacacctttccagccgtgctgcaaagcagcggcctgtactctctgagcagcgtggtcacagtgcctagctctagcctgggcacccagacctacatctgcaatgtgaaccacaagcctagcaacaccaaggtggacaagagagtggaacccaagagctgtcccatcaagaccgatgtgattacaatggaccccaaggacaactgctccaaggacgccaacgataccctgctgctccagctgaccaacaccagcgcctactacatgtacttgttgctgctgctgaagtccgtggtgtacttcgccatcatcacatgctgcctgctgcggagaaccgccttctgctgcaacggcgagaagtctcgcgccaagagaagcggatctggcgtgaagcagaccctgaatttcgacctgctgaagctggctggcgacgtggaatccaacccaggcccttctagaggccatatgaccgagtacaagcccacggtgcgcctcgccacccgcgacgacgtccccagggccgtacgcaccctcgccgccgcgttcgccgactaccccgccacgcgccacaccgtcgatccggaccgccacatcgagcgggtcaccgagctgcaagaactcttcctcacgcgcgtcgggctcgacatcggcaaggtgtgggtcgcggacgacggcgccgcggtggcggtctggaccacgccggagagcgtcgaagcgggggcggtgttcgccgagatcggcccgcgcatggccgagttgagcggttcccggctggccgcgcagcaacagatggaaggcctcctggcgccgcaccggcccaaggagcccgcgtggttcctggccaccgtcggcgtctcgcccgaccaccagggcaagggtctgggcagcgccgtcgtgctccccggagtggaggcggccgagcgcgccggggtgcccgccttcctggagacctccgcgccccgcaacctccccttctacgagcggctcggcttcaccgtcaccgccgacgtcgaggtgcccgaaggaccgcgcacctggtgcatgacccgcaagcccggtgcctga

SEQ ID NO: 18113 - DNA, 2691 bp, synthetic construct
  source 1..2691: mol_type = other DNA
atggccttaccagtgaccgccttgctcctgccgctggccttgctgctccacgccgccaggccgctcgagggacagcctaaggccaatcctaccgtgacactgttccctccaagcagcgaagaactccaggccaacaaggccacacttgtgtgcctgatctccgacttctaccctggggctgtgacagtggcttggaaggccgatggatctcctgtgaaagccggcgtggaaaccaccaagccatccaagcagagcaacaacaaatacgccgccagctcctacctgagcctgacacctgagcagtggaagtcccacagatcctacagctgccaagtgacccacgaaggcagcaccgtggaaaagacagtggcccctacagagtgcagcgaagtgaaaaccgactccaccgaccacgtgaagcccaaagagacagagaacaccaagcagcccagcaagagctgccacaagcccaaggccatcgtgcacaccgagaaagtgaacatgatgagcctgaccgtgctgggcctgcggatgctgttcgccaaaaccgtggccgtgaacttcctgctgaccgccaagctgttcttcctcagggccaagcgatctggatctggagcaacaaacttctcactactcaaacaagcaggtgacgtggaggagaatcccgggcctactagcaccatggccttaccagtgaccgccttgctcctgccgctggccttgctgctccacgccgccaggccggagatcgtgatgacccagagccctgccaccctgtctctgagccctggcgaaagagccaccctgagctgtagagccagccaggacatcagcaagtacctgaactggtatcagcagaagcccggccaggcccccagactgctgatctaccacaccagcagactgcacagcggcatccccgccagattttctggctctggcagcggcaccgactacaccctgacaatcagcagcctccagcccgaggacttcgccgtgtacttctgtcagcaaggcaacaccctgccctacaccttcggccagggcaccaagctggaaatcaagggcggaggcggaagtggaggcggaggatctggcggcggaggctctcaggtgcaactccaggaatctggccctggcctcgtgaagcccagcgagacactgagcctgacctgtaccgtgtccggcgtgtccctgcctgactatggcgtgtcctggatcagacagccccctggcaagggcctggaatggatcggagtgatttggggcagcgaaaccacctactacaacagctccctgaagtccagagtgaccatctccaaggacaactccaagaaccaggtgtccctgaagctgagcagcgtgacagccgccgacaccgccgtgtattactgcgccaagcactactactacggcggcagctacgctatggactactggggccagggaaccctcgtgaccgtgtctagtacgcgtgaggcctctacaaagggaccctccgtgtttcctctggctcccagcagcaagtctacaagcggaggaacagccgctctgggctgcctggtcaaggattactttcccgagcctgtgaccgtgtcctggaatagcggagcactgacaagcggcgtgcacacctttccagccgtgctgcaaagcagcggcctgtactctctgagcagcgtggtcacagtgcctagctctagcctgggcacccagacctacatctgcaatgtgaaccacaagcctagcaacaccaaggtggacaagagagtggaacccaagagctgtcccatcaagaccgatgtgattacaatggaccccaaggacaactgctccaaggacgccaacgataccctgctgctccagctgaccaacaccagcgcctactacatgtacttgttgctgctgctgaagtccgtggtgtacttcgccatcatcacatgctgcctgctgcggagaaccgccttctgctgcaacggcgagaagtctcgcgccaagagaagcggatctggcgtgaagcagaccctgaatttcgacctgctgaagctggctggcgacgtggaatccaacccaggcccttctagaggccatatgaccgagtacaagcccacggtgcgcctcgccacccgcgacgacgtccccagggccgtacgcaccctcgccgccgcgttcgccgactaccccgccacgcgccacaccgtcgatccggaccgccacatcgagcgggtcaccgagctgcaagaactcttcctcacgcgcgtcgggctcgacatcggcaaggtgtgggtcgcggacgacggcgccgcggtggcggtctggaccacgccggagagcgtcgaagcgggggcggtgttcgccgagatcggcccgcgcatggccgagttgagcggttcccggctggccgcgcagcaacagatggaaggcctcctggcgccgcaccggcccaaggagcccgcgtggttcctggccaccgtcggcgtctcgcccgaccaccagggcaagggtctgggcagcgccgtcgtgctccccggagtggaggcggccgagcgcgccggggtgcccgccttcctggagacctccgcgccccgcaacctccccttctacgagcggctcggcttcaccgtcaccgccgacgtcgaggtgcccgaaggaccgcgcacctggtgcatgacccgcaagcccggtgcctga

SEQ ID NO: 18114 - DNA, 2694 bp, synthetic construct
  source 1..2694: mol_type = other DNA
atggccttaccagtgaccgccttgctcctgccgctggccttgctgctccacgccgccaggccgctcgagggacagcctaaggccaatcctaccgtgacactgttccctccaagcagcgaagaactccaggccaacaaggccacacttgtgtgcctgatctccgacttctaccctggggctgtgacagtggcttggaaggccgatggatctcctgtgaaagccggcgtggaaaccaccaagccatccaagcagagcaacaacaaatacgccgccagctcctacctgagcctgacacctgagcagtggaagtcccacagatcctacagctgccaagtgacccacgaaggcagcaccgtggaaaagacagtggcccctacagagtgcagcgaagtgaaaaccgactccaccgaccacgtgaagcccaaagagacagagaacaccaagcagcccagcaagagctgccacaagcccaaggccatcgtgcacaccgagaaagtgaacatgatgagcctgaccgtgctgggcctgcggatgctgttcgccaaaaccgtggccgtgaacttcctgctgaccgccaagctgttcttcctcagggccaagcgatctggatctggagcaacaaacttctcactactcaaacaagcaggtgacgtggaggagaatcccgggcctactagcaccatggccttaccagtgaccgccttgctcctgccgctggccttgctgctccacgccgccaggccggacgagatcgtgctgacacagagccccgccaccctgtcactgtctccaggcgaaagagccaccctgagctgtagcgccagcagcagcgtgtcctacatgcactggtatcagcagaagcccggccaggcccccagactgctgatctacgataccagcaagctggcctccggcatccccgccagattttctggcagcggctccggcaccgacttcaccctgacaatcagcagcctggaacccgaggacgtggccgtgtactactgttttcaaggcagcgtgtaccccttcaccttcggccagggcaccaagctggaaatcaagagaggtggcggtggctcgggcggtggtgggtcgggtggcggcggatctcaggtgcagctccaggaatctggccctggcctcgtgaagcctagccagaccctgagcctgacctgtaccgtgtctggcggcagcatcagcacaagcggcatgggcgtgggctggatcagacagcaccctggcaagggcctggaatggatcggccacatttggtgggacgacgacaagcggtacaaccccgccctgaagtccagagtgaccatcagcgtggacaccagcaagaaccagttcagcctgaagctgagcagcgtgacagccgccgataccgccgtgtattattgcgcccggatggaactgtggtcctactacttcgactactggggccagggaaccctcgtgaccgtgtctagtacgcgtgaggcctctacaaagggaccctccgtgtttcctctggctcccagcagcaagtctacaagcggaggaacagccgctctgggctgcctggtcaaggattactttcccgagcctgtgaccgtgtcctggaatagcggagcactgacaagcggcgtgcacacctttccagccgtgctgcaaagcagcggcctgtactctctgagcagcgtggtcacagtgcctagctctagcctgggcacccagacctacatctgcaatgtgaaccacaagcctagcaacaccaaggtggacaagagagtggaacccaagagctgtcccatcaagaccgatgtgattacaatggaccccaaggacaactgctccaaggacgccaacgataccctgctgctccagctgaccaacaccagcgcctactacatgtacttgttgctgctgctgaagtccgtggtgtacttcgccatcatcacatgctgcctgctgcggagaaccgccttctgctgcaacggcgagaagtctcgcgccaagagaagcggatctggcgtgaagcagaccctgaatttcgacctgctgaagctggctggcgacgtggaatccaacccaggcccttctagaggccatatgaccgagtacaagcccacggtgcgcctcgccacccgcgacgacgtccccagggccgtacgcaccctcgccgccgcgttcgccgactaccccgccacgcgccacaccgtcgatccggaccgccacatcgagcgggtcaccgagctgcaagaactcttcctcacgcgcgtcgggctcgacatcggcaaggtgtgggtcgcggacgacggcgccgcggtggcggtctggaccacgccggagagcgtcgaagcgggggcggtgttcgccgagatcggcccgcgcatggccgagttgagcggttcccggctggccgcgcagcaacagatggaaggcctcctggcgccgcaccggcccaaggagcccgcgtggttcctggccaccgtcggcgtctcgcccgaccaccagggcaagggtctgggcagcgccgtcgtgctccccggagtggaggcggccgagcgcgccggggtgcccgccttcctggagacctccgcgccccgcaacctccccttctacgagcggctcggcttcaccgtcaccgccgacgtcgaggtgcccgaaggaccgcgcacctggtgcatgacccgcaagcccggtgcctga

SEQ ID NO: 18115 - DNA, 2682 bp, synthetic construct
  source 1..2682: mol_type = other DNA
atggccttaccagtgaccgccttgctcctgccgctggccttgctgctccacgccgccaggccgctcgagggacagcctaaggccaatcctaccgtgacactgttccctccaagcagcgaagaactccaggccaacaaggccacacttgtgtgcctgatctccgacttctaccctggggctgtgacagtggcttggaaggccgatggatctcctgtgaaagccggcgtggaaaccaccaagccatccaagcagagcaacaacaaatacgccgccagctcctacctgagcctgacacctgagcagtggaagtcccacagatcctacagctgccaagtgacccacgaaggcagcaccgtggaaaagacagtggcccctacagagtgcagcgaagtgaaaaccgactccaccgaccacgtgaagcccaaagagacagagaacaccaagcagcccagcaagagctgccacaagcccaaggccatcgtgcacaccgagaaagtgaacatgatgagcctgaccgtgctgggcctgcggatgctgttcgccaaaaccgtggccgtgaacttcctgctgaccgccaagctgttcttcctcagggccaagcgatctggatctggagcaacaaacttctcactactcaaacaagcaggtgacgtggaggagaatcccgggcctactagcatggccttaccagtgaccgccttgctcctgccgctggccttgctgctccacgccgccaggccggacatccagatgacacagagccctagcagcctgtctgccagcgtgggagacagagtgaccatcacctgtagagccagccaggacatcagcaactacctgaactggtatcagcagaagcccggcaaggcccctaagctgctgatctactacaccagcagactgcacagcggcgtgcccagcagattttctggctctggcagcggcaccgacttcaccctgacaatatctagcctccagcctgaggacttcgccacctactattgccagcagggcaacaccctgccttacacatttggacagggcaccaaggtggaaatcaagagaggcggaggcggaagtggaggcggaggatctggcggcggaggctctgaagtgcagctggttgaatcaggtggcggcctggttcaacctggcggatctctgagactgagctgtgccgccagcggcttcaccttcagcgactactttatgagctgggtccgacaggcccctggcaaaggacttgaatgggtcgccaccatcagcaatggcggcacctacacttactaccccgacagcgtgaagggcagattcaccatctccagagacaacagcaagaacaccctgtacctccagatgaactccctgagagccgaggacaccgccgtgtactactgcgccagattcgacggctacatcttcgactattggggccagggcaccctggtcacagtctcttctacgcgtgaggcctctacaaagggaccctccgtgtttcctctggctcccagcagcaagtctacaagcggaggaacagccgctctgggctgcctggtcaaggattactttcccgagcctgtgaccgtgtcctggaatagcggagcactgacaagcggcgtgcacacctttccagccgtgctgcaaagcagcggcctgtactctctgagcagcgtggtcacagtgcctagctctagcctgggcacccagacctacatctgcaatgtgaaccacaagcctagcaacaccaaggtggacaagagagtggaacccaagagctgtcccatcaagaccgatgtgattacaatggaccccaaggacaactgctccaaggacgccaacgataccctgctgctccagctgaccaacaccagcgcctactacatgtacttgttgctgctgctgaagtccgtggtgtacttcgccatcatcacatgctgcctgctgcggagaaccgccttctgctgcaacggcgagaagtctcgcgccaagagaagcggatctggcgtgaagcagaccctgaatttcgacctgctgaagctggctggcgacgtggaatccaacccaggcccttctagaggccatatgaccgagtacaagcccacggtgcgcctcgccacccgcgacgacgtccccagggccgtacgcaccctcgccgccgcgttcgccgactaccccgccacgcgccacaccgtcgatccggaccgccacatcgagcgggtcaccgagctgcaagaactcttcctcacgcgcgtcgggctcgacatcggcaaggtgtgggtcgcggacgacggcgccgcggtggcggtctggaccacgccggagagcgtcgaagcgggggcggtgttcgccgagatcggcccgcgcatggccgagttgagcggttcccggctggccgcgcagcaacagatggaaggcctcctggcgccgcaccggcccaaggagcccgcgtggttcctggccaccgtcggcgtctcgcccgaccaccagggcaagggtctgggcagcgccgtcgtgctccccggagtggaggcggccgagcgcgccggggtgcccgccttcctggagacctccgcgccccgcaacctccccttctacgagcggctcggcttcaccgtcaccgccgacgtcgaggtgcccgaaggaccgcgcacctggtgcatgacccgcaagcccggtgcctga

SEQ ID NO: 18116 - DNA, 2694 bp, synthetic construct
  source 1..2694: mol_type = other DNA
atggccttaccagtgaccgccttgctcctgccgctggccttgctgctccacgccgccaggccgctcgagggacagcctaaggccaatcctaccgtgacactgttccctccaagcagcgaagaactccaggccaacaaggccacacttgtgtgcctgatctccgacttctaccctggggctgtgacagtggcttggaaggccgatggatctcctgtgaaagccggcgtggaaaccaccaagccatccaagcagagcaacaacaaatacgccgccagctcctacctgagcctgacacctgagcagtggaagtcccacagatcctacagctgccaagtgacccacgaaggcagcaccgtggaaaagacagtggcccctacagagtgcagcgaagtgaaaaccgactccaccgaccacgtgaagcccaaagagacagagaacaccaagcagcccagcaagagctgccacaagcccaaggccatcgtgcacaccgagaaagtgaacatgatgagcctgaccgtgctgggcctgcggatgctgttcgccaaaaccgtggccgtgaacttcctgctgaccgccaagctgttcttcctcagggccaagcgatctggatctggagcaacaaacttctcactactcaaacaagcaggtgacgtggaggagaatcccgggcctactagcatggccttaccagtgaccgccttgctcctgccgctggccttgctgctccacgccgccaggccggacatccagatgacacagagccctagcagcctgtctgccagcgtgggagacagagtgaccatcacatgcaaggccagcgaccacatcaacaactggctggcctggtatcagcagaagcctggacaggcccctaagctgctgatctacggcgctaccacactggaaacaggcgtgcccagcagattttctggcagcggctctggcaccgactacaccctgacaatatccagcctccagcctgaggacttcgccacctactactgtcagcagagctggaacaccccttggacattcggccagggcaccaagctggaaatcaagagaggcggaggcggaagtggaggcggaggatctggcggcggaggctctcaagttcagcttcaacagcctggcgctgagctggtcaaacctggcgcttctgtgaagatgagctgcaaagccagcggctacgccttcagcagctactggatcaactggatgaagcagaaacccggccagggactcgaatggatcggccaaatctatcccggcgacggcgacaccaactacaacggcaagttcaagggcagagccacactgaccgccgatacctctagcagcacagcctacatgcagctgagcagcctgaccagcgaagatagcgccgtgtacttctgtgcccggtccatcacaacagtcgtgggctgcgctatggactattggggccagggaacaagcgtgaccgtgtctagtacgcgtgaggcctctacaaagggaccctccgtgtttcctctggctcccagcagcaagtctacaagcggaggaacagccgctctgggctgcctggtcaaggattactttcccgagcctgtgaccgtgtcctggaatagcggagcactgacaagcggcgtgcacacctttccagccgtgctgcaaagcagcggcctgtactctctgagcagcgtggtcacagtgcctagctctagcctgggcacccagacctacatctgcaatgtgaaccacaagcctagcaacaccaaggtggacaagagagtggaacccaagagctgtcccatcaagaccgatgtgattacaatggaccccaaggacaactgctccaaggacgccaacgataccctgctgctccagctgaccaacaccagcgcctactacatgtacttgttgctgctgctgaagtccgtggtgtacttcgccatcatcacatgctgcctgctgcggagaaccgccttctgctgcaacggcgagaagtctcgcgccaagagaagcggatctggcgtgaagcagaccctgaatttcgacctgctgaagctggctggcgacgtggaatccaacccaggcccttctagaggccatatgaccgagtacaagcccacggtgcgcctcgccacccgcgacgacgtccccagggccgtacgcaccctcgccgccgcgttcgccgactaccccgccacgcgccacaccgtcgatccggaccgccacatcgagcgggtcaccgagctgcaagaactcttcctcacgcgcgtcgggctcgacatcggcaaggtgtgggtcgcggacgacggcgccgcggtggcggtctggaccacgccggagagcgtcgaagcgggggcggtgttcgccgagatcggcccgcgcatggccgagttgagcggttcccggctggccgcgcagcaacagatggaaggcctcctggcgccgcaccggcccaaggagcccgcgtggttcctggccaccgtcggcgtctcgcccgaccaccagggcaagggtctgggcagcgccgtcgtgctccccggagtggaggcggccgagcgcgccggggtgcccgccttcctggagacctccgcgccccgcaacctccccttctacgagcggctcggcttcaccgtcaccgccgacgtcgaggtgcccgaaggaccgcgcacctggtgcatgacccgcaagcccggtgcctga

SEQ ID NO: 18117 - DNA, 2700 bp, synthetic construct
  source 1..2700: mol_type = other DNA
atggccttaccagtgaccgccttgctcctgccgctggccttgctgctccacgccgccaggccgctcgagggacagcctaaggccaatcctaccgtgacactgttccctccaagcagcgaagaactccaggccaacaaggccacacttgtgtgcctgatctccgacttctaccctggggctgtgacagtggcttggaaggccgatggatctcctgtgaaagccggcgtggaaaccaccaagccatccaagcagagcaacaacaaatacgccgccagctcctacctgagcctgacacctgagcagtggaagtcccacagatcctacagctgccaagtgacccacgaaggcagcaccgtggaaaagacagtggcccctacagagtgcagcgaagtgaaaaccgactccaccgaccacgtgaagcccaaagagacagagaacaccaagcagcccagcaagagctgccacaagcccaaggccatcgtgcacaccgagaaagtgaacatgatgagcctgaccgtgctgggcctgcggatgctgttcgccaaaaccgtggccgtgaacttcctgctgaccgccaagctgttcttcctcagggccaagcgatctggatctggagcaacaaacttctcactactcaaacaagcaggtgacgtggaggagaatcccgggcctactagcatggccttaccagtgaccgccttgctcctgccgctggccttgctgctccacgccgccaggccgcagatcgtgctgtctcagtctcctgccatcctgagcgcttccccaggcgagaaagtgaccatgacctgtagagccagcagcagcgtgtcctacatgcactggtatcagcagaagcccggcagcagccctaagccttggatctacgccaccagcaatctggcctctggcgtgccagccagattttctggctctggcagcggcaccagctacagcttcacaatcagcagagtggaagccgaggacgccgccacctactattgtcagcagtggaccttcaatcctcctaccttcggcggaggcacccggctggaaatcaaaagaacagtggctgctggcggaggcggaagtggaggcggaggatctggcggcggaggctctcaggcttatctgcaacagagcggagccgaactcgtcagacctggcgcttctgtgaagatgagctgcaaggccagcggctacaccttcaccagctataatatgcactgggtcaagcagacccctcggcagggactcgaatggatcggcggaatctatcccggcaacggcgacacctcctacaaccagaagttcaagggcaaagccacactgaccgtgggcaagagcagcagcaccgcctatatgcagctcagcagcctgaccagcgaggacagcgccgtgtacttctgcgccagatacgactacaactacgctatggactactggggccagggcaccagcgtgacagttagctctgccagcacgcgtgaggcctctacaaagggaccctccgtgtttcctctggctcccagcagcaagtctacaagcggaggaacagccgctctgggctgcctggtcaaggattactttcccgagcctgtgaccgtgtcctggaatagcggagcactgacaagcggcgtgcacacctttccagccgtgctgcaaagcagcggcctgtactctctgagcagcgtggtcacagtgcctagctctagcctgggcacccagacctacatctgcaatgtgaaccacaagcctagcaacaccaaggtggacaagagagtggaacccaagagctgtcccatcaagaccgatgtgattacaatggaccccaaggacaactgctccaaggacgccaacgataccctgctgctccagctgaccaacaccagcgcctactacatgtacttgttgctgctgctgaagtccgtggtgtacttcgccatcatcacatgctgcctgctgcggagaaccgccttctgctgcaacggcgagaagtctcgcgccaagagaagcggatctggcgtgaagcagaccctgaatttcgacctgctgaagctggctggcgacgtggaatccaacccaggcccttctagaggccatatgaccgagtacaagcccacggtgcgcctcgccacccgcgacgacgtccccagggccgtacgcaccctcgccgccgcgttcgccgactaccccgccacgcgccacaccgtcgatccggaccgccacatcgagcgggtcaccgagctgcaagaactcttcctcacgcgcgtcgggctcgacatcggcaaggtgtgggtcgcggacgacggcgccgcggtggcggtctggaccacgccggagagcgtcgaagcgggggcggtgttcgccgagatcggcccgcgcatggccgagttgagcggttcccggctggccgcgcagcaacagatggaaggcctcctggcgccgcaccggcccaaggagcccgcgtggttcctggccaccgtcggcgtctcgcccgaccaccagggcaagggtctgggcagcgccgtcgtgctccccggagtggaggcggccgagcgcgccggggtgcccgccttcctggagacctccgcgccccgcaacctccccttctacgagcggctcggcttcaccgtcaccgccgacgtcgaggtgcccgaaggaccgcgcacctggtgcatgacccgcaagcccggtgcctga

SEQ ID NO: 18118 - DNA, 2694 bp, synthetic construct
  source 1..2694: mol_type = other DNA
atggccttaccagtgaccgccttgctcctgccgctggccttgctgctccacgccgccaggccgctcgagggacagcctaaggccaatcctaccgtgacactgttccctccaagcagcgaagaactccaggccaacaaggccacacttgtgtgcctgatctccgacttctaccctggggctgtgacagtggcttggaaggccgatggatctcctgtgaaagccggcgtggaaaccaccaagccatccaagcagagcaacaacaaatacgccgccagctcctacctgagcctgacacctgagcagtggaagtcccacagatcctacagctgccaagtgacccacgaaggcagcaccgtggaaaagacagtggcccctacagagtgcagcgaagtgaaaaccgactccaccgaccacgtgaagcccaaagagacagagaacaccaagcagcccagcaagagctgccacaagcccaaggccatcgtgcacaccgagaaagtgaacatgatgagcctgaccgtgctgggcctgcggatgctgttcgccaaaaccgtggccgtgaacttcctgctgaccgccaagctgttcttcctcagggccaagcgatctggatctggagcaacaaacttctcactactcaaacaagcaggtgacgtggaggagaatcccgggcctactagcatggccttaccagtgaccgccttgctcctgccgctggccttgctgctccacgccgccaggccggagatcgtgctgacacagagccctgccaccctgtctctgagccctggcgaaagagccaccctgagctgtagagccagccagagcgtgtccagctacctggcctggtatcagcagaagcccggccaggctccccggctgctgatctacgatgccagcaatagagccaccggcatccccgccagattttccggctctggcagcggcaccgacttcaccctgaccatcagctccctggaacccgaggacttcgccgtgtactactgccagcagcggagcaactggcccatcacattcggccagggcacccggctggaaatcaaaggcggaggcggaagtggaggcggaggatctggcggcggaggctctgaggtgcagcttgttgagtctggcggaggactggtgcagcccgatagaagcctgagactgtcttgtgccgccagcggcttcaccttccacgattatgccatgcactgggtccgacaggcccctggcaaaggacttgaatgggtgtccaccatctcttggaacagcggcacaatcggctacgccgactctgtgaagggcagattcaccatcagccgggacaacgccaagaacagcctgtacctccagatgaactccctgagagccgaggacacagccctgtactactgcgccaaggacatccagtacggcaactactactacggcatggacgtgtggggccagggcacaacagtgacagtctcttctacgcgtgaggcctctacaaagggaccctccgtgtttcctctggctcccagcagcaagtctacaagcggaggaacagccgctctgggctgcctggtcaaggattactttcccgagcctgtgaccgtgtcctggaatagcggagcactgacaagcggcgtgcacacctttccagccgtgctgcaaagcagcggcctgtactctctgagcagcgtggtcacagtgcctagctctagcctgggcacccagacctacatctgcaatgtgaaccacaagcctagcaacaccaaggtggacaagagagtggaacccaagagctgtcccatcaagaccgatgtgattacaatggaccccaaggacaactgctccaaggacgccaacgataccctgctgctccagctgaccaacaccagcgcctactacatgtacttgttgctgctgctgaagtccgtggtgtacttcgccatcatcacatgctgcctgctgcggagaaccgccttctgctgcaacggcgagaagtctcgcgccaagagaagcggatctggcgtgaagcagaccctgaatttcgacctgctgaagctggctggcgacgtggaatccaacccaggcccttctagaggccatatgaccgagtacaagcccacggtgcgcctcgccacccgcgacgacgtccccagggccgtacgcaccctcgccgccgcgttcgccgactaccccgccacgcgccacaccgtcgatccggaccgccacatcgagcgggtcaccgagctgcaagaactcttcctcacgcgcgtcgggctcgacatcggcaaggtgtgggtcgcggacgacggcgccgcggtggcggtctggaccacgccggagagcgtcgaagcgggggcggtgttcgccgagatcggcccgcgcatggccgagttgagcggttcccggctggccgcgcagcaacagatggaaggcctcctggcgccgcaccggcccaaggagcccgcgtggttcctggccaccgtcggcgtctcgcccgaccaccagggcaagggtctgggcagcgccgtcgtgctccccggagtggaggcggccgagcgcgccggggtgcccgccttcctggagacctccgcgccccgcaacctccccttctacgagcggctcggcttcaccgtcaccgccgacgtcgaggtgcccgaaggaccgcgcacctggtgcatgacccgcaagcccggtgcctga

SEQ ID NO: 18119 - DNA, 2688 bp, synthetic construct
  source 1..2688: mol_type = other DNA
atggccttaccagtgaccgccttgctcctgccgctggccttgctgctccacgccgccaggccgctcgagggacagcctaaggccaatcctaccgtgacactgttccctccaagcagcgaagaactccaggccaacaaggccacacttgtgtgcctgatctccgacttctaccctggggctgtgacagtggcttggaaggccgatggatctcctgtgaaagccggcgtggaaaccaccaagccatccaagcagagcaacaacaaatacgccgccagctcctacctgagcctgacacctgagcagtggaagtcccacagatcctacagctgccaagtgacccacgaaggcagcaccgtggaaaagacagtggcccctacagagtgcagcgaagtgaaaaccgactccaccgaccacgtgaagcccaaagagacagagaacaccaagcagcccagcaagagctgccacaagcccaaggccatcgtgcacaccgagaaagtgaacatgatgagcctgaccgtgctgggcctgcggatgctgttcgccaaaaccgtggccgtgaacttcctgctgaccgccaagctgttcttcctcagggccaagcgatctggatctggagcaacaaacttctcactactcaaacaagcaggtgacgtggaggagaatcccgggcctactagcatggccttaccagtgaccgccttgctcctgccgctggccttgctgctccacgccgccaggccggacatccagatgacccagagccccagcagcctgtctgccagcgtgggcgacagagtgaccatcacctgtagagccagccaggacgtgaacaccgccgtggcctggtatcagcagaagcctggcaaggcccccaagctgctgatctacagcgccagcttcctggaaagcggcgtgcccagcagattcagcggaagcagaagcggcaccgacttcaccctgaccatcagctccctccagcccgaggacttcgccacctactactgccagcagcactacaccacccctcccaccttcggccagaccaaggtggaaatcaagagaggcggaggcggaagtggaggcggaggatctggcggcggaggctctgaagtgcaactggtggaatctggcggcggactggtgcagcctggcggatctctgagactgagctgtgccgccagcggcttcaacatcaaggacacctacatccactgggtgcgccaggcccctggaaagggactggaatgggtggcccggatctaccccaccaacggctacaccagatacgccgacagcgtgaagggccggttcaccatcagcgccgacaccagcaagaataccgcctacctccagatgaacagcctgcgggccgaggataccgccgtgtactactgctcaagatggggaggcgacggcttctacgctatggacgtgtggggccagggcacccttgtgaccgtgtcatctacgcgtgaggcctctacaaagggaccctccgtgtttcctctggctcccagcagcaagtctacaagcggaggaacagccgctctgggctgcctggtcaaggattactttcccgagcctgtgaccgtgtcctggaatagcggagcactgacaagcggcgtgcacacctttccagccgtgctgcaaagcagcggcctgtactctctgagcagcgtggtcacagtgcctagctctagcctgggcacccagacctacatctgcaatgtgaaccacaagcctagcaacaccaaggtggacaagagagtggaacccaagagctgtcccatcaagaccgatgtgattacaatggaccccaaggacaactgctccaaggacgccaacgataccctgctgctccagctgaccaacaccagcgcctactacatgtacttgttgctgctgctgaagtccgtggtgtacttcgccatcatcacatgctgcctgctgcggagaaccgccttctgctgcaacggcgagaagtctcgcgccaagagaagcggatctggcgtgaagcagaccctgaatttcgacctgctgaagctggctggcgacgtggaatccaacccaggcccttctagaggccatatgaccgagtacaagcccacggtgcgcctcgccacccgcgacgacgtccccagggccgtacgcaccctcgccgccgcgttcgccgactaccccgccacgcgccacaccgtcgatccggaccgccacatcgagcgggtcaccgagctgcaagaactcttcctcacgcgcgtcgggctcgacatcggcaaggtgtgggtcgcggacgacggcgccgcggtggcggtctggaccacgccggagagcgtcgaagcgggggcggtgttcgccgagatcggcccgcgcatggccgagttgagcggttcccggctggccgcgcagcaacagatggaaggcctcctggcgccgcaccggcccaaggagcccgcgtggttcctggccaccgtcggcgtctcgcccgaccaccagggcaagggtctgggcagcgccgtcgtgctccccggagtggaggcggccgagcgcgccggggtgcccgccttcctggagacctccgcgccccgcaacctccccttctacgagcggctcggcttcaccgtcaccgccgacgtcgaggtgcccgaaggaccgcgcacctggtgcatgacccgcaagcccggtgcctga

SEQ ID NO: 18120 - DNA, 2325 bp, synthetic construct
  source 1..2325: mol_type = other DNA
atggccttaccagtgaccgccttgctcctgccgctggccttgctgctccacgccgccaggccgctcgagggacagcctaaggccaatcctaccgtgacactgttccctccaagcagcgaagaactccaggccaacaaggccacacttgtgtgcctgatctccgacttctaccctggggctgtgacagtggcttggaaggccgatggatctcctgtgaaagccggcgtggaaaccaccaagccatccaagcagagcaacaacaaatacgccgccagctcctacctgagcctgacacctgagcagtggaagtcccacagatcctacagctgccaagtgacccacgaaggcagcaccgtggaaaagacagtggcccctacagagtgcagcgaagtgaaaaccgactccaccgaccacgtgaagcccaaagagacagagaacaccaagcagcccagcaagagctgccacaagcccaaggccatcgtgcacaccgagaaagtgaacatgatgagcctgaccgtgctgggcctgcggatgctgttcgccaaaaccgtggccgtgaacttcctgctgaccgccaagctgttcttcctcagggccaagcgatctggatctggagcaacaaacttctcactactcaaacaagcaggtgacgtggaggagaatcccgggcctactagcatggccctgcccgtgacagccctgctgctgcctctggctctgctgctgcacgccgccagacccgatgaattcgaggtgcaactggtggaaagcggcggaggcctggtgcaggctggcggatctctgagactgagctgtgccgccagcggcatcaccttcagcatcaacacaatgggctggtacagacaggcccctggcaagcagagggaactggtggccctgatctccagcatcggcgacacctactacgccgacagcgtgaagggccggttcaccatcagccgggacaacgccaagaacaccgtgtacctccagatgaacagcctgaagcccgaggacaccgccgtgtactactgcaagcggttcagaacagccgcccagggcaccgattattggggccagggaacacaagtgaccgtgtcctctacgcgtgaggcctctacaaagggaccctccgtgtttcctctggctcccagcagcaagtctacaagcggaggaacagccgctctgggctgcctggtcaaggattactttcccgagcctgtgaccgtgtcctggaatagcggagcactgacaagcggcgtgcacacctttccagccgtgctgcaaagcagcggcctgtactctctgagcagcgtggtcacagtgcctagctctagcctgggcacccagacctacatctgcaatgtgaaccacaagcctagcaacaccaaggtggacaagagagtggaacccaagagctgtcccatcaagaccgatgtgattacaatggaccccaaggacaactgctccaaggacgccaacgataccctgctgctccagctgaccaacaccagcgcctactacatgtacttgttgctgctgctgaagtccgtggtgtacttcgccatcatcacatgctgcctgctgcggagaaccgccttctgctgcaacggcgagaagtctcgcgccaagagaagcggatctggcgtgaagcagaccctgaatttcgacctgctgaagctggctggcgacgtggaatccaacccaggcccttctagaggccatatgaccgagtacaagcccacggtgcgcctcgccacccgcgacgacgtccccagggccgtacgcaccctcgccgccgcgttcgccgactaccccgccacgcgccacaccgtcgatccggaccgccacatcgagcgggtcaccgagctgcaagaactcttcctcacgcgcgtcgggctcgacatcggcaaggtgtgggtcgcggacgacggcgccgcggtggcggtctggaccacgccggagagcgtcgaagcgggggcggtgttcgccgagatcggcccgcgcatggccgagttgagcggttcccggctggccgcgcagcaacagatggaaggcctcctggcgccgcaccggcccaaggagcccgcgtggttcctggccaccgtcggcgtctcgcccgaccaccagggcaagggtctgggcagcgccgtcgtgctccccggagtggaggcggccgagcgcgccggggtgcccgccttcctggagacctccgcgccccgcaacctccccttctacgagcggctcggcttcaccgtcaccgccgacgtcgaggtgcccgaaggaccgcgcacctggtgcatgacccgcaagcccggtgcctga

SEQ ID NO: 18121 - DNA, 2325 bp, synthetic construct; identical to SEQ ID NO: 18120
  source 1..2325: mol_type = other DNA

SEQ ID NO: 18122 - DNA, 3120 bp, synthetic construct
  source 1..3120: mol_type = other DNA
atggccttaccagtgaccgccttgctcctgccgctggccttgctgctccacgccgccaggccgctcgagggacagcctaaggccaatcctaccgtgacactgttccctccaagcagcgaagaactccaggccaacaaggccacacttgtgtgcctgatctccgacttctaccctggggctgtgacagtggcttggaaggccgatggatctcctgtgaaagccggcgtggaaaccaccaagccatccaagcagagcaacaacaaatacgccgccagctcctacctgagcctgacacctgagcagtggaagtcccacagatcctacagctgccaagtgacccacgaaggcagcaccgtggaaaagacagtggcccctacagagtgcagcgaagtgaaaaccgactccaccgaccacgtgaagcccaaagagacagagaacaccaagcagcccagcaagagctgccacaagcccaaggccatcgtgcacaccgagaaagtgaacatgatgagcctgaccgtgctgggcctgcggatgctgttcgccaaaaccgtggccgtgaacttcctgctgaccgccaagctgttcttcctcagggccaagcgatctggatctggagcaacaaacttctcactactcaaacaagcaggtgacgtggaggagaatcccgggcctactagcatggccttaccagtgaccgccttgctcctgccgctggccttgctgctccacgccgccaggccgcaggtccagctcgtcgagtccggcggcggcctcgtccaggccggcgactccgtcaccctctcctgcaccgcctccggccgcaccttctcctcctacgccctcgcctggttccgccagcgccccggcaaggagcgcgagttcgtcgccggcctccgctggggcggccccaccaactacgccgactccgtcaaggaccgcttcaccatctccggcgactccgccaagcacaccatgtacctccagatgaactccctcaagcccgaggacaccgccgtctactactgcggctacaaccccggcggctgggccgtcccctcccagtacgagtacgactcctggggccagggcacccaggtcaccgtctcctccggtaccggcggaggcggatctggcggcggaggtagcggtggcggaggatctgaattcgacatccagatgacacagagccctagcagcctgtctgccagcgtgggagacagagtgaccatcacatgcaaggccagcgaccacatcaacaactggctggcctggtatcagcagaagcctggacaggcccctaagctgctgatctacggcgctaccacactggaaacaggcgtgcccagcagattttctggcagcggctctggcaccgactacaccctgacaatatccagcctccagcctgaggacttcgccacctactactgtcagcagagctggaacaccccttggacattcggccagggcaccaagctggaaatcaagagaggcggaggcggaagtggaggcggaggatctggcggcggaggctctcaagttcagcttcaacagcctggcgctgagctggtcaaacctggcgcttctgtgaagatgagctgcaaagccagcggctacgccttcagcagctactggatcaactggatgaagcagaaacccggccagggactcgaatggatcggccaaatctatcccggcgacggcgacaccaactacaacggcaagttcaagggcagagccacactgaccgccgatacctctagcagcacagcctacatgcagctgagcagcctgaccagcgaagatagcgccgtgtacttctgtgcccggtccatcacaacagtcgtgggctgcgctatggactattggggccagggaacaagcgtgaccgtgtctagtacgcgtgaggcctctacaaagggaccctccgtgtttcctctggctcccagcagcaagtctacaagcggaggaacagccgctctgggctgcctggtcaaggattactttcccgagcctgtgaccgtgtcctggaatagcggagcactgacaagcggcgtgcacacctttccagccgtgctgcaaagcagcggcctgtactctctgagcagcgtggtcacagtgcctagctctagcctgggcacccagacctacatctgcaatgtgaaccacaagcctagcaacaccaaggtggacaagagagtggaacccaagagctgtcccatcaagaccgatgtgattacaatggaccccaaggacaactgctccaaggacgccaacgataccctgctgctccagctgaccaacaccagcgcctactacatgtacttgttgctgctgctgaagtccgtggtgtacttcgccatcatcacatgctgcctgctgcggagaaccgccttctgctgcaacggcgagaagtctcgcgccaagagaagcggatctggcgtgaagcagaccctgaatttcgacctgctgaagctggctggcgacgtggaatccaacccaggcccttctagaggccatatgaccgagtacaagcccacggtgcgcctcgccacccgcgacgacgtccccagggccgtacgcaccctcgccgccgcgttcgccgactaccccgccacgcgccacaccgtcgatccggaccgccacatcgagcgggtcaccgagctgcaagaactcttcctcacgcgcgtcgggctcgacatcggcaaggtgtgggtcgcggacgacggcgccgcggtggcggtctggaccacgccggagagcgtcgaagcgggggcggtgttcgccgagatcggcccgcgcatggccgagttgagcggttcccggctggccgcgcagcaacagatggaaggcctcctggcgccgcaccggcccaaggagcccgcgtggttcctggccaccgtcggcgtctcgcccgaccaccagggcaagggtctgggcagcgccgtcgtgctccccggagtggaggcggccgagcgcgccggggtgcccgccttcctggagacctccgcgccccgcaacctccccttctacgagcggctcggcttcaccgtcaccgccgacgtcgaggtgcccgaaggaccgcgcacctggtgcatgacccgcaagcccggtgcctga

SEQ ID NO: 18123 - DNA, 3507 bp, synthetic construct
  source 1..3507: mol_type = other DNA
atggccttaccagtgaccgccttgctcctgccgctggccttgctgctccacgccgccaggccgctcgagggacagcctaaggccaatcctaccgtgacactgttccctccaagcagcgaagaactccaggccaacaaggccacacttgtgtgcctgatctccgacttctaccctggggctgtgacagtggcttggaaggccgatggatctcctgtgaaagccggcgtggaaaccaccaagccatccaagcagagcaacaacaaatacgccgccagctcctacctgagcctgacacctgagcagtggaagtcccacagatcctacagctgccaagtgacccacgaaggcagcaccgtggaaaagacagtggcccctacagagtgcagcgaagtgaaaaccgactccaccgaccacgtgaagcccaaagagacagagaacaccaagcagcccagcaagagctgccacaagcccaaggccatcgtgcacaccgagaaagtgaacatgatgagcctgaccgtgctgggcctgcggatgctgttcgccaaaaccgtggccgtgaacttcctgctgaccgccaagctgttcttcctcagggccaagcgatctggatctggagcaacaaacttctcactactcaaacaagcaggtgacgtggaggagaatcccgggcctactagcatggccttaccagtgaccgccttgctcctgccgctggccttgctgctccacgccgccaggccggaggttcagctgcttgagtctggcggaggactggttcaacctggcggaagcctgagactgtcttgtgccgccagcggcttcacctttagcagctacgccatgagctgggtccgacaggctcctggcaaaggactggaatgggtgtccagcatcagcggcagcggcgactacatctactacgccgatagcgtgaagggcagattcaccatcagccgggacatcagcaagaacaccctgtacctccagatgaacagcctgagagccgaggacaccgccgtgtactactgtgccaaagaaggcaccggcgctaacagcagcctggccgattatagaggccagggcacactggtcaccgtgtctagtggcggaggaagcggcggaggatctcaggtccagctcgtcgagtccggcggcggcctcgtccaggccggcgactccgtcaccctctcctgcaccgcctccggccgcaccttctcctcctacgccctcgcctggttccgccagcgccccggcaaggagcgcgagttcgtcgccggcctccgctggggcggccccaccaactacgccgactccgtcaaggaccgcttcaccatctccggcgactccgccaagcacaccatgtacctccagatgaactccctcaagcccgaggacaccgccgtctactactgcggctacaaccccggcggctgggccgtcccctcccagtacgagtacgactcctggggccagggcacccaggtcaccgtctcctccggtaccggcggaggcggatctggcggcggaggtagcggtggcggaggatctgaattcgacatccagatgacacagagccctagcagcctgtctgccagcgtgggagacagagtgaccatcacatgcaaggccagcgaccacatcaacaactggctggcctggtatcagcagaagcctggacaggcccctaagctgctgatctacggcgctaccacactggaaacaggcgtgcccagcagattttctggcagcggctctggcaccgactacaccctgacaatatccagcctccagcctgaggacttcgccacctactactgtcagcagagctggaacaccccttggacattcggccagggcaccaagctggaaatcaagagaggcggaggcggaagtggaggcggaggatctggcggcggaggctctcaagttcagcttcaacagcctggcgctgagctggtcaaacctggcgcttctgtgaagatgagctgcaaagccagcggctacgccttcagcagctactggatcaactggatgaagcagaaacccggccagggactcgaatggatcggccaaatctatcccggcgacggcgacaccaactacaacggcaagttcaagggcagagccacactgaccgccgatacctctagcagcacagcctacatgcagctgagcagcctgaccagcgaagatagcgccgtgtacttctgtgcccggtccatcacaacagtcgtgggctgcgctatggactattggggccagggaacaagcgtgaccgtgtctagtacgcgtgaggcctctacaaagggaccctccgtgtttcctctggctcccagcagcaagtctacaagcggaggaacagccgctctgggctgcctggtcaaggattactttcccgagcctgtgaccgtgtcctggaatagcggagcactgacaagcggcgtgcacacctttccagccgtgctgcaaagcagcggcctgtactctctgagcagcgtggtcacagtgcctagctctagcctgggcacccagacctacatctgcaatgtgaaccacaagcctagcaacaccaaggtggacaagagagtggaacccaagagctgtcccatcaagaccgatgtgattacaatggaccccaaggacaactgctccaaggacgccaacgataccctgctgctccagctgaccaacaccagcgcctactacatgtacttgttgctgctgctgaagtccgtggtgtacttcgccatcatcacatgctgcctgctgcggagaaccgccttctgctgcaacggcgagaagtctcgcgccaagagaagcggatctggcgtgaagcagaccctgaatttcgacctgctgaagctggctggcgacgtggaatccaacccaggcccttctagaggccatatgaccgagtacaagcccacggtgcgcctcgccacccgcgacgacgtccccagggccgtacgcaccctcgccgccgcgttcgccgactaccccgccacgcgccacaccgtcgatccggaccgccacatcgagcgggtcaccgagctgcaagaactcttcctcacgcgcgtcgggctcgacatcggcaaggtgtgggtcgcggacgacggcgccgcggtggcggtctggaccacgccggagagcgtcgaagcgggggcggtgttcgccgagatcggcccgcgcatggccgagttgagcggttcccggctggccgcgcagcaacagatggaaggcctcctggcgccgcaccggcccaaggagcccgcgtggttcctggccaccgtcggcgtctcgcccgaccaccagggcaagggtctgggcagcgccgtcgtgctccccggagtggaggcggccgagcgcgccggggtgcccgccttcctggagacctccgcgccccgcaacctccccttctacgagcggctcggcttcaccgtcaccgccgacgtcgaggtgcccgaaggaccgcgcacctggtgcatgacccgcaagcccggtgcctga

SEQ ID NO: 18124 - DNA, 3501 bp, synthetic construct
  source 1..3501: mol_type = other DNA
atggccttaccagtgaccgccttgctcctgccgctggccttgctgctccacgccgccaggccgctcgagggacagcctaaggccaatcctaccgtgacactgttccctccaagcagcgaagaactccaggccaacaaggccacacttgtgtgcctgatctccgacttctaccctggggctgtgacagtggcttggaaggccgatggatctcctgtgaaagccggcgtggaaaccaccaagccatccaagcagagcaacaacaaatacgccgccagctcctacctgagcctgacacctgagcagtggaagtcccacagatcctacagctgccaagtgacccacgaaggcagcaccgtggaaaagacagtggcccctacagagtgcagcgaagtgaaaaccgactccaccgaccacgtgaagcccaaagagacagagaacaccaagcagcccagcaagagctgccacaagcccaaggccatcgtgcacaccgagaaagtgaacatgatgagcctgaccgtgctgggcctgcggatgctgttcgccaaaaccgtggccgtgaacttcctgctgaccgccaagctgttcttcctcagggccaagcgatctggatctggagcaacaaacttctcactactcaaacaagcaggtgacgtggaggagaatcccgggcctactagcatggccttaccagtgaccgccttgctcctgccgctggccttgctgctccacgccgccaggccgggcgtgacacagagccccacacacctgattaagaccagaggccagcaggccacactgagatgcagccctatcagcggccacaccagcgtgtactggtatcagcaggctctcggactgggcctccagttcctgctttggtacgacgagggcgaagagagaaaccggggcaacttccctcctcggttttccggcagacagttccccaactacagcagcgagctgaacgtgaacgccctggaactggaagatagcgccctgtacctgtgtgcctcttctcttggtggacctcgcggactggctggactgagaggggatgagcagtttttcggccctggcaccagactgaccgtgctggaaggcggaggaagcggcggaggatctcaggtccagctcgtcgagtccggcggcggcctcgtccaggccggcgactccgtcaccctctcctgcaccgcctccggccgcaccttctcctcctacgccctcgcctggttccgccagcgccccggcaaggagcgcgagttcgtcgccggcctccgctggggcggccccaccaactacgccgactccgtcaaggaccgcttcaccatctccggcgactccgccaagcacaccatgtacctccagatgaactccctcaagcccgaggacaccgccgtctactactgcggctacaaccccggcggctgggccgtcccctcccagtacgagtacgactcctggggccagggcacccaggtcaccgtctcctccggtaccggcggaggcggatctggcggcggaggtagcggtggcggaggatctgaattcgacatccagatgacacagagccctagcagcctgtctgccagcgtgggagacagagtgaccatcacatgcaaggccagcgaccacatcaacaactggctggcctggtatcagcagaagcctggacaggcccctaagctgctgatctacggcgctaccacactggaaacaggcgtgcccagcagattttctggcagcggctctggcaccgactacaccctgacaatatccagcctccagcctgaggacttcgccacctactactgtcagcagagctggaacaccccttggacattcggccagggcaccaagctggaaatcaagagaggcggaggcggaagtggaggcggaggatctggcggcggaggctctcaagttcagcttcaacagcctggcgctgagctggtcaaacctggcgcttctgtgaagatgagctgcaaagccagcggctacgccttcagcagctactggatcaactggatgaagcagaaacccggccagggactcgaatggatcggccaaatctatcccggcgacggcgacaccaactacaacggcaagttcaagggcagagccacactgaccgccgatacctctagcagcacagcctacatgcagctgagcagcctgaccagcgaagatagcgccgtgtacttctgtgcccggtccatcacaacagtcgtgggctgcgctatggactattggggccagggaacaagcgtgaccgtgtctagtacgcgtgaggcctctacaaagggaccctccgtgtttcctctggctcccagcagcaagtctacaagcggaggaacagccgctctgggctgcctggtcaaggattactttcccgagcctgtgaccgtgtcctggaatagcggagcactgacaagcggcgtgcacacctttccagccgtgctgcaaagcagcggcctgtactctctgagcagcgtggtcacagtgcctagctctagcctgggcacccagacctacatctgcaatgtgaaccacaagcctagcaacaccaaggtggacaagagagtggaacccaagagctgtcccatcaagaccgatgtgattacaatggaccccaaggacaactgctccaaggacgccaacgataccctgctgctccagctgaccaacaccagcgcctactacatgtacttgttgctgctgctgaagtccgtggtgtacttcgccatcatcacatgctgcctgctgcggagaaccgccttctgctgcaacggcgagaagtctcgcgccaagagaagcggatctggcgtgaagcagaccctgaatttcgacctgctgaagctggctggcgacgtggaatccaacccaggcccttctagaggccatatgaccgagtacaagcccacggtgcgcctcgccacccgcgacgacgtccccagggccgtacgcaccctcgccgccgcgttcgccgactaccccgccacgcgccacaccgtcgatccggaccgccacatcgagcgggtcaccgagctgcaagaactcttcctcacgcgcgtcgggctcgacatcggcaaggtgtgggtcgcggacgacggcgccgcggtggcggtctggaccacgccggagagcgtcgaagcgggggcggtgttcgccgagatcggcccgcgcatggccgagttgagcggttcccggctggccgcgcagcaacagatggaaggcctcctggcgccgcaccggcccaaggagcccgcgtggttcctggccaccgtcggcgtctcgcccgaccaccagggcaagggtctgggcagcgccgtcgtgctccccggagtggaggcggccgagcgcgccggggtgcccgccttcctggagacctccgcgccccgcaacctccccttctacgagcggctcggcttcaccgtcaccgccgacgtcgaggtgcccgaaggaccgcgcacctggtgcatgacccgcaagcccggtgcctga

SEQ ID NO: 18125 - DNA, 2781 bp, synthetic construct
  source 1..2781: mol_type = other DNA
atggccttaccagtgaccgccttgctcctgccgctggccttgctgctccacgccgccaggccgctcgagggacagcctaaggccaatcctaccgtgacactgttccctccaagcagcgaagaactccaggccaacaaggccacacttgtgtgcctgatctccgacttctaccctggggctgtgacagtggcttggaaggccgatggatctcctgtgaaagccggcgtggaaaccaccaagccatccaagcagagcaacaacaaatacgccgccagctcctacctgagcctgacacctgagcagtggaagtcccacagatcctacagctgccaagtgacccacgaaggcagcaccgtggaaaagacagtggcccctacagagtgcagcgaagtgaaaaccgactccaccgaccacgtgaagcccaaagagacagagaacaccaagcagcccagcaagagctgccacaagcccaaggccatcgtgcacaccgagaaagtgaacatgatgagcctgaccgtgctgggcctgcggatgctgttcgccaaaaccgtggccgtgaacttcctgctgaccgccaagctgttcttcctcagggccaagcgatctggatctggagcaacaaacttctcactactcaaacaagcaggtgacgtggaggagaatcccgggcctactagcatggccttaccagtgaccgccttgctcctgccgctggccttgctgctccacgccgccaggccgggcgtgacacagagccccacacacctgattaagaccagaggccagcaggccacactgagatgcagccctatcagcggccacaccagcgtgtactggtatcagcaggctctcggactgggcctccagttcctgctttggtacgacgagggcgaagagagaaaccggggcaacttccctcctcggttttccggcagacagttccccaactacagcagcgagctgaacgtgaacgccctggaactggaagatagcgccctgtacctgtgtgcctcttctcttggtggacctcgcggactggctggactgagaggggatgagcagtttttcggccctggcaccagactgaccgtgctggaaggcggaggaagcggcggaggatctggcgtgacacagagccccacacacctgattaagaccagaggccagcaggccacactgagatgcagccctatcagcggccacaccagcgtgtactggtatcagcaggctctcggactgggcctccagttcctgctttggtacgacgagggcgaagagagaaaccggggcaacttccctcctcggttttccggcagacagttccccaactacagcagcgagctgaacgtgaacgccctggaactggaagatagcgccctgtacctgtgtgccagctctctcggcggagatgaactgggagccgatggcaacgagcagttctttggccctggcaccagactgaccgtgctggaaggtaccggcggaggcggatctggcggcggaggtagcggtggcggaggatctgaattcgacatccagatgacacagagccctagcagcctgtctgccagcgtgggagacagagtgaccatcacatgcaaggccagcgaccacatcaacaactggctggcctggtatcagcagaagcctggacaggcccctaagctgctgatctacggcgctaccacactggaaacaggcgtgcccagcagattttctggcagcggctctggcaccgactacaccctgacaatatccagcctccagcctgaggacttcgccacctactactgtcagcagagctggaacaccccttggacattcggccagggcaccaagctggaaatcaagagaggcggaggcggaagtggaggcggaggatctggcggcggaggctctcaagttcagcttcaacagcctggcgctgagctggtcaaacctggcgcttctgtgaagatgagctgcaaagccagcggctacgccttcagcagctactggatcaactggatgaagcagaaacccggccagggactcgaatggatcggccaaatctatcccggcgacggcgacaccaactacaacggcaagttcaagggcagagccacactgaccgccgatacctctagcagcacagcctacatgcagctgagcagcctgaccagcgaagatagcgccgtgtacttctgtgcccggtccatcacaacagtcgtgggctgcgctatggactattggggccagggaacaagcgtgaccgtgtctagtacgcgtgaggcctctacaaagggaccctccgtgtttcctctggctcccagcagcaagtctacaagcggaggaacagccgctctgggctgcctggtcaaggattactttcccgagcctgtgaccgtgtcctggaatagcggagcactgacaagcggcgtgcacacctttccagccgtgctgcaaagcagcggcctgtactctctgagcagcgtggtcacagtgcctagctctagcctgggcacccagacctacatctgcaatgtgaaccacaagcctagcaacaccaaggtggacaagagagtggaacccaagagctgtcccatcaagaccgatgtgattacaatggaccccaaggacaactgctccaaggacgccaacgataccctgctgctccagctgaccaacaccagcgcctactacatgtacttgttgctgctgctgaagtccgtggtgtacttcgccatcatcacatgctgcctgctgcggagaaccgccttctgctgcaacggcgagaagtct

SEQ ID NO: 18126 - DNA, 2343 bp, synthetic construct
  source 1..2343: mol_type = other DNA
atggccttaccagtgaccgccttgctcctgccgctggccttgctgctccacgccgccaggccgctcgagggacagcctaaggccaatcctaccgtgacactgttccctccaagcagcgaagaactccaggccaacaaggccacacttgtgtgcctgatctccgacttctaccctggggctgtgacagtggcttggaaggccgatggatctcctgtgaaagccggcgtggaaaccaccaagccatccaagcagagcaacaacaaatacgccgccagctcctacctgagcctgacacctgagcagtggaagtcccacagatcctacagctgccaagtgacccacgaaggcagcaccgtggaaaagacagtggcccctacagagtgcagcgaagtgaaaaccgactccaccgaccacgtgaagcccaaagagacagagaacaccaagcagcccagcaagagctgccacaagcccaaggccatcgtgcacaccgagaaagtgaacatgatgagcctgaccgtgctgggcctgcggatgctgttcgccaaaaccgtggccgtgaacttcctgctgaccgccaagctgttcttcctcagggccaagcgatctggatctggagcaacaaacttctcactactcaaacaagcaggtgacgtggaggagaatcccgggcctactagcatggccctgcccgtgacagccctgctgctgcctctggctctgctgctgcacgccgccagacccgatgaattcggctctgacctgggcatcaagctgctgttcgccgctgccaagggccaggacgacgaagtgcggattctgctggctgctggggccgacgtgaacgccaaggatttcgagggctacacccccctgcacgtggccgcctatgatggacacctggaaatcgtggaagtgctgctgaaggctggcgctgatgtgaatgccaaagacagccagggccggacccctctgcatgaagccgcctacagcggccatctggaaattgtggaagtgctgctgaaagccggggcagacgtgaacgctcaggacgacgctggcgagacaccagccgatctggctgcagcttggggccacgaagatatcgccgaggtgctgcagaagacgcgtgaggcctctacaaagggaccctccgtgtttcctctggctcccagcagcaagtctacaagcggaggaacagccgctctgggctgcctggtcaaggattactttcccgagcctgtgaccgtgtcctggaatagcggagcactgacaagcggcgtgcacacctttccagccgtgctgcaaagcagcggcctgtactctctgagcagcgtggtcacagtgcctagctctagcctgggcacccagacctacatctgcaatgtgaaccacaagcctagcaacaccaaggtggacaagagagtggaacccaagagctgtcccatcaagaccgatgtgattacaatggaccccaaggacaactgctccaaggacgccaacgataccctgctgctccagctgaccaacaccagcgcctactacatgtacttgttgctgctgctgaagtccgtggtgtacttcgccatcatcacatgctgcctgctgcggagaaccgccttctgctgcaacggcgagaagtctcgcgccaagagaagcggatctggcgtgaagcagaccctgaatttcgacctgctgaagctggctggcgacgtggaatccaacccaggcccttctagaggccatatgaccgagtacaagcccacggtgcgcctcgccacccgcgacgacgtccccagggccgtacgcaccctcgccgccgcgttcgccgactaccccgccacgcgccacaccgtcgatccggaccgccacatcgagcgggtcaccgagctgcaagaactcttcctcacgcgcgtcgggctcgacatcggcaaggtgtgggtcgcggacgacggcgccgcggtggcggtctggaccacgccggagagcgtcgaagcgggggcggtgttcgccgagatcggcccgcgcatggccgagttgagcggttcccggctggccgcgcagcaacagatggaaggcctcctggcgccgcaccggcccaaggagcccgcgtggttcctggccaccgtcggcgtctcgcccgaccaccagggcaagggtctgggcagcgccgtcgtgctccccggagtggaggcggccgagcgcgccggggtgcccgccttcctggagacctccgcgccccgcaacctccccttctacgagcggctcggcttcaccgtcaccgccgacgtcgaggtgcccgaaggaccgcgcacctggtgcatgacccgcaagcccggtgcctga

SEQ ID NO: 18127 - DNA, 2130 bp, synthetic construct
  source 1..2130: mol_type = other DNA
atggccttaccagtgaccgccttgctcctgccgctggccttgctgctccacgccgccaggccgctcgagggacagcctaaggccaatcctaccgtgacactgttccctccaagcagcgaagaactccaggccaacaaggccacacttgtgtgcctgatctccgacttctaccctggggctgtgacagtggcttggaaggccgatggatctcctgtgaaagccggcgtggaaaccaccaagccatccaagcagagcaacaacaaatacgccgccagctcctacctgagcctgacacctgagcagtggaagtcccacagatcctacagctgccaagtgacccacgaaggcagcaccgtggaaaagacagtggcccctacagagtgcagcgaagtgaaaaccgactccaccgaccacgtgaagcccaaagagacagagaacaccaagcagcccagcaagagctgccacaagcccaaggccatcgtgcacaccgagaaagtgaacatgatgagcctgaccgtgctgggcctgcggatgctgttcgccaaaaccgtggccgtgaacttcctgctgaccgccaagctgttcttcctcagggccaagcgatctggatctggagcaacaaacttctcactactcaaacaagcaggtgacgtggaggagaatcccgggcctactagcatggactggatttggcgcatccttttccttgtcggcgctgctaccggcgcccattccttcgaaggcagcggattcgaatacgccaaagagatgcggaacgcctactgggagatcgccctgctgcccaatctgaccaaccagcagaagagagcccccatcagaaagctgtacgacgacccctcccagagcagcgagctgctgtctgaggctaaaaaactgaacgatagccagacgcgtgaggcctctacaaagggaccctccgtgtttcctctggctcccagcagcaagtctacaagcggaggaacagccgctctgggctgcctggtcaaggattactttcccgagcctgtgaccgtgtcctggaatagcggagcactgacaagcggcgtgcacacctttccagccgtgctgcaaagcagcggcctgtactctctgagcagcgtggtcacagtgcctagctctagcctgggcacccagacctacatctgcaatgtgaaccacaagcctagcaacaccaaggtggacaagagagtggaacccaagagctgtcccatcaagaccgatgtgattacaatggaccccaaggacaactgctccaaggacgccaacgataccctgctgctccagctgaccaacaccagcgcctactacatgtacttgttgctgctgctgaagtccgtggtgtacttcgccatcatcacatgctgcctgctgcggagaaccgccttctgctgcaacggcgagaagtctcgcgccaagagaagcggatctggcgtgaagcagaccctgaatttcgacctgctgaagctggctggcgacgtggaatccaacccaggcccttctagaggccatatgaccgagtacaagcccacggtgcgcctcgccacccgcgacgacgtccccagggccgtacgcaccctcgccgccgcgttcgccgactaccccgccacgcgccacaccgtcgatccggaccgccacatcgagcgggtcaccgagctgcaagaactcttcctcacgcgcgtcgggctcgacatcggcaaggtgtgggtcgcggacgacggcgccgcggtggcggtctggaccacgccggagagcgtcgaagcgggggcggtgttcgccgagatcggcccgcgcatggccgagttgagcggttcccggctggccgcgcagcaacagatggaaggcctcctggcgccgcaccggcccaaggagcccgcgtggttcctggccaccgtcggcgtctcgcccgaccaccagggcaagggtctgggcagcgccgtcgtgctccccggagtggaggcggccgagcgcgccggggtgcccgccttcctggagacctccgcgccccgcaacctccccttctacgagcggctcggcttcaccgtcaccgccgacgtcgaggtgcccgaaggaccgcgcacctggtgcatgacccgcaagcccggtgcctga

SEQ ID NO: 18128 - DNA, 2796 bp, synthetic construct
  source 1..2796: mol_type = other DNA
atggccttaccagtgaccgccttgctcctgccgctggccttgctgctccacgccgccaggccgctcgagggacagcctaaggccaatcctaccgtgacactgttccctccaagcagcgaagaactccaggccaacaaggccacacttgtgtgcctgatctccgacttctaccctggggctgtgacagtggcttggaaggccgatggatctcctgtgaaagccggcgtggaaaccaccaagccatccaagcagagcaacaacaaatacgccgccagctcctacctgagcctgacacctgagcagtggaagtcccacagatcctacagctgccaagtgacccacgaaggcagcaccgtggaaaagacagtggcccctacagagtgcagcgaagtgaaaaccgactccaccgaccacgtgaagcccaaagagacagagaacaccaagcagcccagcaagagctgccacaagcccaaggccatcgtgcacaccgagaaagtgaacatgatgagcctgaccgtgctgggcctgcggatgctgttcgccaaaaccgtggccgtgaacttcctgctgaccgccaagctgttcttcctcagggccaagcgatctggatctggagcaacaaacttctcactactcaaacaagcaggtgacgtggaggagaatcccgggcctactagcatggccctgcccgtgacagccctgctgctgcctctggctctgctgctgcacgccgccagacccgatgaattcgaggtgcaactggtggaaagcggcggaggcctggtgcaggctggcggatctctgagactgagctgtgccgccagcggcatcaccttcagcatcaacacaatgggctggtacagacaggcccctggcaagcagagggaactggtggccctgatctccagcatcggcgacacctactacgccgacagcgtgaagggccggttcaccatcagccgggacaacgccaagaacaccgtgtacctccagatgaacagcctgaagcccgaggacaccgccgtgtactactgcaagcggttcagaacagccgcccagggcaccgattattggggccagggaacacaagtgaccgtgtcctctctcgagggaggaggcggctccgggggaggcggaagtggaggcggaggatctgggtctggaggaagcggatctggaggctcagggtcagggggctcaggcagtggaggctctttcgaagtgcaactggtggaatctgggggcggactggtgcagccaggcggaagtctgaggctgtcttgtgccgcctccggcagcatcttcggcttcaacgacatggcctggtatcggcaggctcccggaaaacagcgcgagctggtggctctgattagcagagtgggcgtgaccagcagcgccgactctgtgaagggcagattcacaatctccagagtgaacgccaaggatacagtgtacctccagatgaactctctgaaacctgaggatacagcagtgtactattgctacatggaccagcggctggacggcagcacactggcctactggggacagggaactcaagtgacagtgtctagcacgcgtgaggcctctacaaagggaccctccgtgtttcctctggctcccagcagcaagtctacaagcggaggaacagccgctctgggctgcctggtcaaggattactttcccgagcctgtgaccgtgtcctggaatagcggagcactgacaagcggcgtgcacacctttccagccgtgctgcaaagcagcggcctgtactctctgagcagcgtggtcacagtgcctagctctagcctgggcacccagacctacatctgcaatgtgaaccacaagcctagcaacaccaaggtggacaagagagtggaacccaagagctgtcccatcaagaccgatgtgattacaatggaccccaaggacaactgctccaaggacgccaacgataccctgctgctccagctgaccaacaccagcgcctactacatgtacttgttgctgctgctgaagtccgtggtgtacttcgccatcatcacatgctgcctgctgcggagaaccgccttctgctgcaacggcgagaagtctcgcgccaagagaagcggatctggcgtgaagcagaccctgaatttcgacctgctgaagctggctggcgacgtggaatccaacccaggcccttctagaggccatatgaccgagtacaagcccacggtgcgcctcgccacccgcgacgacgtccccagggccgtacgcaccctcgccgccgcgttcgccgactaccccgccacgcgccacaccgtcgatccggaccgccacatcgagcgggtcaccgagctgcaagaactcttcctcacgcgcgtcgggctcgacatcggcaaggtgtgggtcgcggacgacggcgccgcggtggcggtctggaccacgccggagagcgtcgaagcgggggcggtgttcgccgagatcggcccgcgcatggccgagttgagcggttcccggctggccgcgcagcaacagatggaaggcctcctggcgccgcaccggcccaaggagcccgcgtggttcctggccaccgtcggcgtctcgcccgaccaccagggcaagggtctgggcagcgccgtcgtgctccccggagtggaggcggccgagcgcgccggggtgcccgccttcctggagacctccgcgccccgcaacctccccttctacgagcggctcggcttcaccgtcaccgccgacgtcgaggtgcccgaaggaccgcgcacctggtgcatgacccgcaagcccggtgcctga

SEQ ID NO: 18129 - DNA, 2538 bp, synthetic construct
  source 1..2538: mol_type = other DNA
atggccttaccagtgaccgccttgctcctgccgctggccttgctgctccacgccgccaggccgctcgagggacagcctaaggccaatcctaccgtgacactgttccctccaagcagcgaagaactccaggccaacaaggccacacttgtgtgcctgatctccgacttctaccctggggctgtgacagtggcttggaaggccgatggatctcctgtgaaagccggcgtggaaaccaccaagccatccaagcagagcaacaacaaatacgccgccagctcctacctgagcctgacacctgagcagtggaagtcccacagatcctacagctgccaagtgacccacgaaggcagcaccgtggaaaagacagtggcccctacagagtgcagcgaagtgaaaaccgactccaccgaccacgtgaagcccaaagagacagagaacaccaagcagcccagcaagagctgccacaagcccaaggccatcgtgcacaccgagaaagtgaacatgatgagcctgaccgtgctgggcctgcggatgctgttcgccaaaaccgtggccgtgaacttcctgctgaccgccaagctgttcttcctcagggccaagcgatctggatctggagcaacaaacttctcactactcaaacaagcaggtgacgtggaggagaatcccgggcctactagcatggcccttccagtcactgccttgctgttgcctctggcgctcctgctccacgccgctagaccgggcatgagaaccgaggacctgcctaaggccgtggtgttcctggaaccccagtggtacagagtgctggaaaaggacagcgtgaccctgaagtgccagggcgcctacagccccgaggacaatagcacccagtggttccacaacgagagcctgatctccagccaggccagcagctacttcatcgacgccgccaccgtggacgacagcggcgagtatagatgccagaccaacctgagcaccctgagcgaccccgtgcagctggaagtgcacatcggatggctgctgctgcaggcccccagatgggtgttcaaagaagaggaccccatccacctgagatgccactcttggaagaacaccgccctgcacaaagtgacctacctgcagaacggcaagggcagaaagtacttccaccacaacagcgacttctacatccccaaggccaccctgaaggactccggctcctacttctgcagaggcctcgtgggcagcaagaacgtgtccagcgagacagtgaacatcaccatcacccagggcctggccgtgtctaccatcagcagctttttcccacccggctaccagacgcgtgaggcctctacaaagggaccctccgtgtttcctctggctcccagcagcaagtctacaagcggaggaacagccgctctgggctgcctggtcaaggattactttcccgagcctgtgaccgtgtcctggaatagcggagcactgacaagcggcgtgcacacctttccagccgtgctgcaaagcagcggcctgtactctctgagcagcgtggtcacagtgcctagctctagcctgggcacccagacctacatctgcaatgtgaaccacaagcctagcaacaccaaggtggacaagagagtggaacccaagagctgtcccatcaagaccgatgtgattacaatggaccccaaggacaactgctccaaggacgccaacgataccctgctgctccagctgaccaacaccagcgcctactacatgtacttgttgctgctgctgaagtccgtggtgtacttcgccatcatcacatgctgcctgctgcggagaaccgccttctgctgcaacggcgagaagtctcgcgccaagagaagcggatctggcgtgaagcagaccctgaatttcgacctgctgaagctggctggcgacgtggaatccaacccaggcccttctagaggccatatgaccgagtacaagcccacggtgcgcctcgccacccgcgacgacgtccccagggccgtacgcaccctcgccgccgcgttcgccgactaccccgccacgcgccacaccgtcgatccggaccgccacatcgagcgggtcaccgagctgcaagaactcttcctcacgcgcgtcgggctcgacatcggcaaggtgtgggtcgcggacgacggcgccgcggtggcggtctggaccacgccggagagcgtcgaagcgggggcggtgttcgccgagatcggcccgcgcatggccgagttgagcggttcccggctggccgcgcagcaacagatggaaggcctcctggcgccgcaccggcccaaggagcccgcgtggttcctggccaccgtcggcgtctcgcccgaccaccagggcaagggtctgggcagcgccgtcgtgctccccggagtggaggcggccgagcgcgccggggtgcccgccttcctggagacctccgcgccccgcaacctccccttctacgagcggctcggcttcaccgtcaccgccgacgtcgaggtgcccgaaggaccgcgcacctggtgcatgacccgcaagcccggtgcctga

SEQ ID NO: 18130 - DNA, 1419 bp, synthetic construct
  source 1..1419: mol_type = other DNA
atggccttaccagtgaccgccttgctcctgccgctggccttgctgctccacgccgccaggccgctcgagggacagcctaaggccaatcctaccgtgacactgttccctccaagcagcgaagaactccaggccaacaaggccacacttgtgtgcctgatctccgacttctaccctggggctgtgacagtggcttggaaggccgatggatctcctgtgaaagccggcgtggaaaccaccaagccatccaagcagagcaacaacaaatacgccgccagctcctacctgagcctgacacctgagcagtggaagtcccacagatcctacagctgccaagtgacccacgaaggcagcaccgtggaaaagacagtggcccctacagagtgcagcgaagtgaaaaccgactccaccgaccacgtgaagcccaaagagacagagaacaccaagcagcccagcaagagctgccacaagcccaaggccatcgtgcacaccgagaaagtgaacatgatgagcctgaccgtgctgggcctgcggatgctgttcgccaaaaccgtggccgtgaacttcctgctgaccgccaagctgttcttcctcagggccaagcgatctggatctggagcaacaaacttctcactactcaaacaagcaggtgacgtggaggagaatcccgggcctactagcgccaccatggccttaccagtgaccgccttgctcctgccgctggccttgctgctccacgccgccaggccgatggaccccgacctggaaatcagagccgccttcctgcggcagagaaacacagccctgagaacagaggtggccgagctggaacaagaggtgcagcggctggaaaacgaggtgtcccagtacgagacaagatacggccctctcggaggcggaaaaacgcgtgaggcctctacaaagggaccctccgtgtttcctctggctcccagcagcaagtctacaagcggaggaacagccgctctgggctgcctggtcaaggattactttcccgagcctgtgaccgtgtcctggaatagcggagcactgacaagcggcgtgcacacctttccagccgtgctgcaaagcagcggcctgtactctctgagcagcgtggtcacagtgcctagctctagcctgggcacccagacctacatctgcaatgtgaaccacaagcctagcaacaccaaggtggacaagagagtggaacccaagagctgtcccatcaagaccgatgtgattacaatggaccccaaggacaactgctccaaggacgccaacgataccctgctgctccagctgaccaacaccagcgcctactacatgtacttgttgctgctgctgaagtccgtggtgtacttcgccatcatcacatgctgcctgctgcggagaaccgccttctgctgcaacggcgagaagtct

SEQ ID NO: 18131 - DNA, 1419 bp, synthetic construct
  source 1..1419: mol_type = other DNA
atggccttaccagtgaccgccttgctcctgccgctggccttgctgctccacgccgccaggccgctcgagggacagcctaaggccaatcctaccgtgacactgttccctccaagcagcgaagaactccaggccaacaaggccacacttgtgtgcctgatctccgacttctaccctggggctgtgacagtggcttggaaggccgatggatctcctgtgaaagccggcgtggaaaccaccaagccatccaagcagagcaacaacaaatacgccgccagctcctacctgagcctgacacctgagcagtggaagtcccacagatcctacagctgccaagtgacccacgaaggcagcaccgtggaaaagacagtggcccctacagagtgcagcgaagtgaaaaccgactccaccgaccacgtgaagcccaaagagacagagaacaccaagcagcccagcaagagctgccacaagcccaaggccatcgtgcacaccgagaaagtgaacatgatgagcctgaccgtgctgggcctgcggatgctgttcgccaaaaccgtggccgtgaacttcctgctgaccgccaagctgttcttcctcagggccaagcgatctggatctggagcaacaaacttctcactactcaaacaagcaggtgacgtggaggagaatcccgggcctactagcgccaccatggccttaccagtgaccgccttgctcctgccgctggccttgctgctccacgccgccaggccgatggaccctgatctcgaaattgaggccgcctttctggaacgcgagaacactgccctggaaaccagggtcgcagagctgagacagagagtgcagagactgcggaacagagtgtctcagtaccgcaccagatatggcccactcggcggaggtaaaacgcgtgaggcctctacaaagggaccctccgtgtttcctctggctcccagcagcaagtctacaagcggaggaacagccgctctgggctgcctggtcaaggattactttcccgagcctgtgaccgtgtcctggaatagcggagcactgacaagcggcgtgcacacctttccagccgtgctgcaaagcagcggcctgtactctctgagcagcgtggtcacagtgcctagctctagcctgggcacccagacctacatctgcaatgtgaaccacaagcctagcaacaccaaggtggacaagagagtggaacccaagagctgtcccatcaagaccgatgtgattacaatggaccccaaggacaactgctccaaggacgccaacgataccctgctgctccagctgaccaacaccagcgcctactacatgtacttgttgctgctgctgaagtccgtggtgtacttcgccatcatcacatgctgcctgctgcggagaaccgccttctgctgcaacggcgagaagtct

SEQ ID NO: 18132 - DNA, 2124 bp, synthetic construct
  source 1..2124: mol_type = other DNA
atggccttaccagtgaccgccttgctcctgccgctggccttgctgctccacgccgccaggccgctcgagggacagcctaaggccaatcctaccgtgacactgttccctccaagcagcgaagaactccaggccaacaaggccacacttgtgtgcctgatctccgacttctaccctggggctgtgacagtggcttggaaggccgatggatctcctgtgaaagccggcgtggaaaccaccaagccatccaagcagagcaacaacaaatacgccgccagctcctacctgagcctgacacctgagcagtggaagtcccacagatcctacagctgccaagtgacccacgaaggcagcaccgtggaaaagacagtggcccctacagagtgcagcgaagtgaaaaccgactccaccgaccacgtgaagcccaaagagacagagaacaccaagcagcccagcaagagctgccacaagcccaaggccatcgtgcacaccgagaaagtgaacatgatgagcctgaccgtgctgggcctgcggatgctgttcgccaaaaccgtggccgtgaacttcctgctgaccgccaagctgttcttcctcagggccaagcgatctggatctggagcaacaaacttctcactactcaaacaagcaggtgacgtggaggagaatcccgggcctactagcgccaccatggccttaccagtgaccgccttgctcctgccgctggccttgctgctccacgccgccaggccgctgttcaatcaagaggtgcagatccctctgaccgagagctactgtggcccctgtcctaagaactggatctgctacaagaacaactgctaccagttcttcgacgagagcaagaattggtacgagagccaggccagctgcatgagccagaatgccagcctgctgaaggtgtacagcaaagaggaccaggacctgctgaaactggtcaagagcgcccactggatgggccttgtgcacatccccaccaatggctcttggcagtgggaggacggcagcattctgagccctaacctgctgaccatcatcgagatgcagaagggcgactgcgccctgtacgccagcagctttaagggctacatcgagaattgcagcaccccgaacacctacatctgtatgcagagaaccgtttctggcggaggcggctctggaggaggcggaagtggcggcggaggcgacctctttaatcaagaagtccagattccactcaccgaatcctactgcggaccttgtccaaaaaattggatttgttataagaacaactgttatcaattctttgatgagtctaaaaattggtatgagtcccaggcttcctgcatgtctcagaacgcttctctgctgaaagtctactctaaagaagatcaggatctcctgaagctcgtcaagtctgcccattggatggggctcgtccacattcctaccaacggaagctggcaatgggaagatggctccatcctgtctccaaatctgctcacgattattgaaatgcagaaaggggattgtgctctctacgccagctccttcaagggatatattgagaactgtagcacgcccaatacttatatctgtatgcaacggaccgtgacgcgtgaggcctctacaaagggaccctccgtgtttcctctggctcccagcagcaagtctacaagcggaggaacagccgctctgggctgcctggtcaaggattactttcccgagcctgtgaccgtgtcctggaatagcggagcactgacaagcggcgtgcacacctttccagccgtgctgcaaagcagcggcctgtactctctgagcagcgtggtcacagtgcctagctctagcctgggcacccagacctacatctgcaatgtgaaccacaagcctagcaacaccaaggtggacaagagagtggaacccaagagctgtcccatcaagaccgatgtgattacaatggaccccaaggacaactgctccaaggacgccaacgataccctgctgctccagctgaccaacaccagcgcctactacatgtacttgttgctgctgctgaagtccgtggtgtacttcgccatcatcacatgctgcctgctgcggagaaccgccttctgctgcaacggcgagaagtct

SEQ ID NO: 18133 - DNA, 2124 bp, synthetic construct
  source 1..2124: mol_type = other DNA
atggccttaccagtgaccgccttgctcctgccgctggccttgctgctccacgccgccaggccgctcgagggacagcctaaggccaatcctaccgtgacactgttccctccaagcagcgaagaactccaggccaacaaggccacacttgtgtgcctgatctccgacttctaccctggggctgtgacagtggcttggaaggccgatggatctcctgtgaaagccggcgtggaaaccaccaagccatccaagcagagcaacaacaaatacgccgccagctcctacctgagcctgacacctgagcagtggaagtcccacagatcctacagctgccaagtgacccacgaaggcagcaccgtggaaaagacagtggcccctacagagtgcagcgaagtgaaaaccgactccaccgaccacgtgaagcccaaagagacagagaacaccaagcagcccagcaagagctgccacaagcccaaggccatcgtgcacaccgagaaagtgaacatgatgagcctgaccgtgctgggcctgcggatgctgttcgccaaaaccgtggccgtgaacttcctgctgaccgccaagctgttcttcctcagggccaagcgatctggatctggagcaacaaacttctcactactcaaacaagcaggtgacgtggaggagaatcccgggcctactagcgccaccatggccttaccagtgaccgccttgctcctgccgctggccttgctgctccacgccgccaggccgctgttcaatcaagaggtgcagatccctctgaccgagagctactgtggcccctgtcctaagaactggatctgctacaagaacaactgctaccagttcttcgacgagagcaagaattggtacgagagccaggccagctgcatgagccagaatgccagcctgctgaaggtgtacagcaaagaggaccaggacctgctgaaactggtcaagagcgcccactggatgggccttgtgcacatccccaccaatggctcttggcagtgggaggacggcagcattctgagccctaacctgctgaccatcatcgagatgcagaagggcgactgcgccctgtacgccagcagctttaagggcttcatcgagaattgcagcaccccgaacacctacatctgtatgcagagaaccgttggcggaggcggaagtggaggcggaggatctggcggcggaggctctgacctctttaatcaagaagtccagattccactcaccgaatcctactgcggaccttgtccaaaaaattggatttgttataagaacaactgttatcaattctttgatgagtctaaaaattggtatgagtcccaggcttcctgcatgtctcagaacgcttctctgctgaaagtctactctaaagaagatcaggatctcctgaagctcgtcaagtctgcccattggatggggctcgtccacattcctaccaacggaagctggcaatgggaagatggctccatcctgtctccaaatctgctcacgattattgaaatgcagaaaggggattgtgctctctacgccagctccttcaagggatttattgagaactgtagcacgcccaatacttatatctgtatgcaacggaccgtgacgcgtgaggcctctacaaagggaccctccgtgtttcctctggctcccagcagcaagtctacaagcggaggaacagccgctctgggctgcctggtcaaggattactttcccgagcctgtgaccgtgtcctggaatagcggagcactgacaagcggcgtgcacacctttccagccgtgctgcaaagcagcggcctgtactctctgagcagcgtggtcacagtgcctagctctagcctgggcacccagacctacatctgcaatgtgaaccacaagcctagcaacaccaaggtggacaagagagtggaacccaagagctgtcccatcaagaccgatgtgattacaatggaccccaaggacaactgctccaaggacgccaacgataccctgctgctccagctgaccaacaccagcgcctactacatgtacttgttgctgctgctgaagtccgtggtgtacttcgccatcatcacatgctgcctgctgcggagaaccgccttctgctgcaacggcgagaagtct

SEQ ID NO: 18134 - DNA, 2202 bp, synthetic construct
  source 1..2202: mol_type = other DNA
atggccttaccagtgaccgccttgctcctgccgctggccttgctgctccacgccgccaggccgctcgagggacagcctaaggccaatcctaccgtgacactgttccctccaagcagcgaagaactccaggccaacaaggccacacttgtgtgcctgatctccgacttctaccctggggctgtgacagtggcttggaaggccgatggatctcctgtgaaagccggcgtggaaaccaccaagccatccaagcagagcaacaacaaatacgccgccagctcctacctgagcctgacacctgagcagtggaagtcccacagatcctacagctgccaagtgacccacgaaggcagcaccgtggaaaagacagtggcccctacagagtgcagcgaagtgaaaaccgactccaccgaccacgtgaagcccaaagagacagagaacaccaagcagcccagcaagagctgccacaagcccaaggccatcgtgcacaccgagaaagtgaacatgatgagcctgaccgtgctgggcctgcggatgctgttcgccaaaaccgtggccgtgaacttcctgctgaccgccaagctgttcttcctcagggccaagcgatctggatctggagcaacaaacttctcactactcaaacaagcaggtgacgtggaggagaatcccgggcctactagcatggccttaccagtgaccgccttgctcctgccgctggccttgctgctccacgccgccaggccgatggaccccgacctggaaatcagagccgccttcctgcggcagagaaacacagccctgagaacagaggtggccgagctggaacaagaggtgcagcggctggaaaacgaggtgtcccagtacgagacaagatacggccctctcggaggcggaaaaggtaccggcggaggcggatctggcggcggaggtagcggtggcggaggatctgaattcgacatccagatgacacagagccctagcagcctgtctgccagcgtgggagacagagtgaccatcacatgcaaggccagcgaccacatcaacaactggctggcctggtatcagcagaagcctggacaggcccctaagctgctgatctacggcgctaccacactggaaacaggcgtgcccagcagattttctggcagcggctctggcaccgactacaccctgacaatatccagcctccagcctgaggacttcgccacctactactgtcagcagagctggaacaccccttggacattcggccagggcaccaagctggaaatcaagagaggcggaggcggaagtggaggcggaggatctggcggcggaggctctcaagttcagcttcaacagcctggcgctgagctggtcaaacctggcgcttctgtgaagatgagctgcaaagccagcggctacgccttcagcagctactggatcaactggatgaagcagaaacccggccagggactcgaatggatcggccaaatctatcccggcgacggcgacaccaactacaacggcaagttcaagggcagagccacactgaccgccgatacctctagcagcacagcctacatgcagctgagcagcctgaccagcgaagatagcgccgtgtacttctgtgcccggtccatcacaacagtcgtgggctgcgctatggactattggggccagggaacaagcgtgaccgtgtctagtacgcgtgaggcctctacaaagggaccctccgtgtttcctctggctcccagcagcaagtctacaagcggaggaacagccgctctgggctgcctggtcaaggattactttcccgagcctgtgaccgtgtcctggaatagcggagcactgacaagcggcgtgcacacctttccagccgtgctgcaaagcagcggcctgtactctctgagcagcgtggtcacagtgcctagctctagcctgggcacccagacctacatctgcaatgtgaaccacaagcctagcaacaccaaggtggacaagagagtggaacccaagagctgtcccatcaagaccgatgtgattacaatggaccccaaggacaactgctccaaggacgccaacgataccctgctgctccagctgaccaacaccagcgcctactacatgtacttgttgctgctgctgaagtccgtggtgtacttcgccatcatcacatgctgcctgctgcggagaaccgccttctgctgcaacggcgagaagtct

SEQ ID NO: 18135 - DNA, 2907 bp, synthetic construct
  source 1..2907: mol_type = other DNA
atggccttaccagtgaccgccttgctcctgccgctggccttgctgctccacgccgccaggccgctcgagggacagcctaaggccaatcctaccgtgacactgttccctccaagcagcgaagaactccaggccaacaaggccacacttgtgtgcctgatctccgacttctaccctggggctgtgacagtggcttggaaggccgatggatctcctgtgaaagccggcgtggaaaccaccaagccatccaagcagagcaacaacaaatacgccgccagctcctacctgagcctgacacctgagcagtggaagtcccacagatcctacagctgccaagtgacccacgaaggcagcaccgtggaaaagacagtggcccctacagagtgcagcgaagtgaaaaccgactccaccgaccacgtgaagcccaaagagacagagaacaccaagcagcccagcaagagctgccacaagcccaaggccatcgtgcacaccgagaaagtgaacatgatgagcctgaccgtgctgggcctgcggatgctgttcgccaaaaccgtggccgtgaacttcctgctgaccgccaagctgttcttcctcagggccaagcgatctggatctggagcaacaaacttctcactactcaaacaagcaggtgacgtggaggagaatcccgggcctactagcatggccttaccagtgaccgccttgctcctgccgctggccttgctgctccacgccgccaggccgctgttcaatcaagaggtgcagatccctctgaccgagagctactgtggcccctgtcctaagaactggatctgctacaagaacaactgctaccagttcttcgacgagagcaagaattggtacgagagccaggccagctgcatgagccagaatgccagcctgctgaaggtgtacagcaaagaggaccaggacctgctgaaactggtcaagagcgcccactggatgggccttgtgcacatccccaccaatggctcttggcagtgggaggacggcagcattctgagccctaacctgctgaccatcatcgagatgcagaagggcgactgcgccctgtacgccagcagctttaagggcttcatcgagaattgcagcaccccgaacacctacatctgtatgcagagaaccgttggcggaggcggaagtggaggcggaggatctggcggcggaggctctgacctctttaatcaagaagtccagattccactcaccgaatcctactgcggaccttgtccaaaaaattggatttgttataagaacaactgttatcaattctttgatgagtctaaaaattggtatgagtcccaggcttcctgcatgtctcagaacgcttctctgctgaaagtctactctaaagaagatcaggatctcctgaagctcgtcaagtctgcccattggatggggctcgtccacattcctaccaacggaagctggcaatgggaagatggctccatcctgtctccaaatctgctcacgattattgaaatgcagaaaggggattgtgctctctacgccagctccttcaagggatttattgagaactgtagcacgcccaatacttatatctgtatgcaacggaccgtgggtaccggcggaggcggatctggcggcggaggtagcggtggcggaggatctgaattcgacatccagatgacacagagccctagcagcctgtctgccagcgtgggagacagagtgaccatcacatgcaaggccagcgaccacatcaacaactggctggcctggtatcagcagaagcctggacaggcccctaagctgctgatctacggcgctaccacactggaaacaggcgtgcccagcagattttctggcagcggctctggcaccgactacaccctgacaatatccagcctccagcctgaggacttcgccacctactactgtcagcagagctggaacaccccttggacattcggccagggcaccaagctggaaatcaagagaggcggaggcggaagtggaggcggaggatctggcggcggaggctctcaagttcagcttcaacagcctggcgctgagctggtcaaacctggcgcttctgtgaagatgagctgcaaagccagcggctacgccttcagcagctactggatcaactggatgaagcagaaacccggccagggactcgaatggatcggccaaatctatcccggcgacggcgacaccaactacaacggcaagttcaagggcagagccacactgaccgccgatacctctagcagcacagcctacatgcagctgagcagcctgaccagcgaagatagcgccgtgtacttctgtgcccggtccatcacaacagtcgtgggctgcgctatggactattggggccagggaacaagcgtgaccgtgtctagtacgcgtgaggcctctacaaagggaccctccgtgtttcctctggctcccagcagcaagtctacaagcggaggaacagccgctctgggctgcctggtcaaggattactttcccgagcctgtgaccgtgtcctggaatagcggagcactgacaagcggcgtgcacacctttccagccgtgctgcaaagcagcggcctgtactctctgagcagcgtggtcacagtgcctagctctagcctgggcacccagacctacatctgcaatgtgaaccacaagcctagcaacaccaaggtggacaagagagtggaacccaagagctgtcccatcaagaccgatgtgattacaatggaccccaaggacaactgctccaaggacgccaacgataccctgctgctccagctgaccaacaccagcgcctactacatgtacttgttgctgctgctgaagtccgtggtgtacttcgccatcatcacatgctgcctgctgcggagaaccgccttctgctgcaacggcgagaagtct

SEQ ID NO: 18136 - DNA, 2022 bp, synthetic construct
  source 1..2022: mol_type = other DNA
atggccttaccagtgaccgccttgctcctgccgctggccttgctgctccacgccgccaggccgctcgagggacagcctaaggccaatcctaccgtgacactgttccctccaagcagcgaagaactccaggccaacaaggccacacttgtgtgcctgatctccgacttctaccctggggctgtgacagtggcttggaaggccgatggatctcctgtgaaagccggcgtggaaaccaccaagccatccaagcagagcaacaacaaatacgccgccagctcctacctgagcctgacacctgagcagtggaagtcccacagatcctacagctgccaagtgacccacgaaggcagcaccgtggaaaagacagtggcccctacagagtgcagcgaagtgaaaaccgactccaccgaccacgtgaagcccaaagagacagagaacaccaagcagcccagcaagagctgccacaagcccaaggccatcgtgcacaccgagaaagtgaacatgatgagcctgaccgtgctgggcctgcggatgctgttcgccaaaaccgtggccgtgaacttcctgctgaccgccaagctgttcttcctcagggccaagcgatctggatctggagcaacaaacttctcactactcaaacaagcaggtgacgtggaggagaatcccgggcctactagcatggccttaccagtgaccgccttgctcctgccgctggccttgctgctccacgccgccaggccgcagtctgtgctgacacagcctcctagtgtgtctggcgctcctggacagagagtgaccatctcttgtaccggcagcagcagcaatatcggagccggctatgacgtgcactggtatcagcagctccctggcacagcccctaaactgctgatcttcggcaacagcaacagacccagcggcgtgcccgatagattcagcggctttaagagcggcacaagcgccagcctggctatcactggactgcaagccgaggacgaggccgactacttctgccagagctacgatagcagcctgagcggcagcggagtgtttggcacaggcaccaaagtgacagtgcttggcggcggaggcggaagtggaggcggaggatctggcggcggaggctctcaaatgcaactggttcaaagcggcggtggcctggtgcaacctggaagaagtctgagactgagctgtgccgccagcggcttcaccttcgatgattacgccatgcactgggtccgacaggcccctggaaaaggactggaatgggtgtccggcatctcctggaatagcggctctatcggctacgccgacagcgtgaagggcagattcaccatcagccgggacaacgccaagaacagcctgtacctccagatgaactccctgagagccgaggatacagccctgtactactgcgccaaggacatccacagcggcagctactacggcctgctgtactacgctatggacgtgtggggccagggcacaaccgtgacagtttcttctacgcgtgaggcctctacaaagggaccctccgtgtttcctctggctcccagcagcaagtctacaagcggaggaacagccgctctgggctgcctggtcaaggattactttcccgagcctgtgaccgtgtcctggaatagcggagcactgacaagcggcgtgcacacctttccagccgtgctgcaaagcagcggcctgtactctctgagcagcgtggtcacagtgcctagctctagcctgggcacccagacctacatctgcaatgtgaaccacaagcctagcaacaccaaggtggacaagagagtggaacccaagagctgtcccatcaagaccgatgtgattacaatggaccccaaggacaactgctccaaggacgccaacgataccctgctgctccagctgaccaacaccagcgcctactacatgtacttgttgctgctgctgaagtccgtggtgtacttcgccatcatcacatgctgcctgctgcggagaaccgccttctgctgcaacggcgagaagtct

SEQ ID NO: 18137 - DNA, 1533 bp, synthetic construct
  source 1..1533: mol_type = other DNA
atggccttaccagtgaccgccttgctcctgccgctggccttgctgctccacgccgccaggccgctcgagggacagcctaaggccaatcctaccgtgacactgttccctccaagcagcgaagaactccaggccaacaaggccacacttgtgtgcctgatctccgacttctaccctggggctgtgacagtggcttggaaggccgatggatctcctgtgaaagccggcgtggaaaccaccaagccatccaagcagagcaacaacaaatacgccgccagctcctacctgagcctgacacctgagcagtggaagtcccacagatcctacagctgccaagtgacccacgaaggcagcaccgtggaaaagacagtggcccctacagagtgcagcgaagtgaaaaccgactccaccgaccacgtgaagcccaaagagacagagaacaccaagcagcccagcaagagctgccacaagcccaaggccatcgtgcacaccgagaaagtgaacatgatgagcctgaccgtgctgggcctgcggatgctgttcgccaaaaccgtggccgtgaacttcctgctgaccgccaagctgttcttcctcagggccaagcgatctggatctggagcaacaaacttctcactactcaaacaagcaggtgacgtggaggagaatcccgggcctactagcatggccttaccagtgaccgccttgctcctgccgctggccttgctgctccacgccgccaggccgatgtgtatgccctgcttcaccaccgaccatcagatggcccggaagtgcgacgattgctgtggcggaaaaggcagaggcaagtgctacggccctcagtgcttgtgtagactcgagggcggaggcggaagtggaggcggaggatctggcggcggaggctctttcgaagtgtgtatgccttgttttaccacggatcaacaaatggctcgcaagtgttctgactgctgcggaggcaaaggccggggaaagtgttatggcccacagtgtctgtgccggacgcgtgaggcctctacaaagggaccctccgtgtttcctctggctcccagcagcaagtctacaagcggaggaacagccgctctgggctgcctggtcaaggattactttcccgagcctgtgaccgtgtcctggaatagcggagcactgacaagcggcgtgcacacctttccagccgtgctgcaaagcagcggcctgtactctctgagcagcgtggtcacagtgcctagctctagcctgggcacccagacctacatctgcaatgtgaaccacaagcctagcaacaccaaggtggacaagagagtggaacccaagagctgtcccatcaagaccgatgtgattacaatggaccccaaggacaactgctccaaggacgccaacgataccctgctgctccagctgaccaacaccagcgcctactacatgtacttgttgctgctgctgaagtccgtggtgtacttcgccatcatcacatgctgcctgctgcggagaaccgccttctgctgcaacggcgagaagtct

SEQ ID NO: 18138 - DNA, 2163 bp, synthetic construct
  source 1..2163: mol_type = other DNA
atggccttaccagtgaccgccttgctcctgccgctggccttgctgctccacgccgccaggccgctcgagggacagcctaaggccaatcctaccgtgacactgttccctccaagcagcgaagaactccaggccaacaaggccacacttgtgtgcctgatctccgacttctaccctggggctgtgacagtggcttggaaggccgatggatctcctgtgaaagccggcgtggaaaccaccaagccatccaagcagagcaacaacaaatacgccgccagctcctacctgagcctgacacctgagcagtggaagtcccacagatcctacagctgccaagtgacccacgaaggcagcaccgtggaaaagacagtggcccctacagagtgcagcgaagtgaaaaccgactccaccgaccacgtgaagcccaaagagacagagaacaccaagcagcccagcaagagctgccacaagcccaaggccatcgtgcacaccgagaaagtgaacatgatgagcctgaccgtgctgggcctgcggatgctgttcgccaaaaccgtggccgtgaacttcctgctgaccgccaagctgttcttcctcagggccaagcgatctggatctggagcaacaaacttctcactactcaaacaagcaggtgacgtggaggagaatcccgggcctactagcatggccttaccagtgaccgccttgctcctgccgctggccttgctgctccacgccgccaggccgttcgaagtgtgtatgccttgttttaccacggatcaacaaatggctcgcaagtgttctgactgctgcggaggcaaaggccggggaaagtgttatggcccacagtgtctgtgccggggtaccggcggaggcggatctggcggcggaggtagcggtggcggaggatctgaattcgacatccagatgacacagagccctagcagcctgtctgccagcgtgggagacagagtgaccatcacatgcaaggccagcgaccacatcaacaactggctggcctggtatcagcagaagcctggacaggcccctaagctgctgatctacggcgctaccacactggaaacaggcgtgcccagcagattttctggcagcggctctggcaccgactacaccctgacaatatccagcctccagcctgaggacttcgccacctactactgtcagcagagctggaacaccccttggacattcggccagggcaccaagctggaaatcaagagaggcggaggcggaagtggaggcggaggatctggcggcggaggctctcaagttcagcttcaacagcctggcgctgagctggtcaaacctggcgcttctgtgaagatgagctgcaaagccagcggctacgccttcagcagctactggatcaactggatgaagcagaaacccggccagggactcgaatggatcggccaaatctatcccggcgacggcgacaccaactacaacggcaagttcaagggcagagccacactgaccgccgatacctctagcagcacagcctacatgcagctgagcagcctgaccagcgaagatagcgccgtgtacttctgtgcccggtccatcacaacagtcgtgggctgcgctatggactattggggccagggaacaagcgtgaccgtgtctagtacgcgtgaggcctctacaaagggaccctccgtgtttcctctggctcccagcagcaagtctacaagcggaggaacagccgctctgggctgcctggtcaaggattactttcccgagcctgtgaccgtgtcctggaatagcggagcactgacaagcggcgtgcacacctttccagccgtgctgcaaagcagcggcctgtactctctgagcagcgtggtcacagtgcctagctctagcctgggcacccagacctacatctgcaatgtgaaccacaagcctagcaacaccaaggtggacaagagagtggaacccaagagctgtcccatcaagaccgatgtgattacaatggaccccaaggacaactgctccaaggacgccaacgataccctgctgctccagctgaccaacaccagcgcctactacatgtacttgttgctgctgctgaagtccgtggtgtacttcgccatcatcacatgctgcctgctgcggagaaccgccttctgctgcaacggcgagaagtct

SEQ ID NO: 18139 - DNA, 2553 bp, synthetic construct
  source 1..2553: mol_type = other DNA
atggccttaccagtgaccgccttgctcctgccgctggccttgctgctccacgccgccaggccgctcgagggacagcctaaggccaatcctaccgtgacactgttccctccaagcagcgaagaactccaggccaacaaggccacacttgtgtgcctgatctccgacttctaccctggggctgtgacagtggcttggaaggccgatggatctcctgtgaaagccggcgtggaaaccaccaagccatccaagcagagcaacaacaaatacgccgccagctcctacctgagcctgacacctgagcagtggaagtcccacagatcctacagctgccaagtgacccacgaaggcagcaccgtggaaaagacagtggcccctacagagtgcagcgaagtgaaaaccgactccaccgaccacgtgaagcccaaagagacagagaacaccaagcagcccagcaagagctgccacaagcccaaggccatcgtgcacaccgagaaagtgaacatgatgagcctgaccgtgctgggcctgcggatgctgttcgccaaaaccgtggccgtgaacttcctgctgaccgccaagctgttcttcctcagggccaagcgatctggatctggagcaacaaacttctcactactcaaacaagcaggtgacgtggaggagaatcccgggcctactagcatggccttaccagtgaccgccttgctcctgccgctggccttgctgctccacgccgccaggccgttcgaaagccccgtagctcctgcctgtgaccccagactcctaaataaactgctgcgtgactcccacctccttcacagccgactgagtcagtgtcccgacgtggaccctttgtctatccctgttctgctgcctgctgtggactttagcctgggagaatggaaaacccagacggaacagagcaaggcacaggacattctaggggcagtgtcccttctactggagggagtgatggcagcacgaggacagttggaaccctcctgcctctcatccctcctgggacagctttctgggcaggttcgcctcctcttgggggccctgcagggcctcctaggaacccagcttcctctacagggcaggaccacagctcacaaggaccccaatgccctcttcttgagcttgcaacaactgcttcggggaaaggtgcgcttcctgcttctggtagaaggtcccaccctctgtgtcagacggaccctgccaaccacagctgtcccaagcagtacttctggtaccggcggaggcggatctggcggcggaggtagcggtggcggaggatctgaattcgacatccagatgacacagagccctagcagcctgtctgccagcgtgggagacagagtgaccatcacatgcaaggccagcgaccacatcaacaactggctggcctggtatcagcagaagcctggacaggcccctaagctgctgatctacggcgctaccacactggaaacaggcgtgcccagcagattttctggcagcggctctggcaccgactacaccctgacaatatccagcctccagcctgaggacttcgccacctactactgtcagcagagctggaacaccccttggacattcggccagggcaccaagctggaaatcaagagaggcggaggcggaagtggaggcggaggatctggcggcggaggctctcaagttcagcttcaacagcctggcgctgagctggtcaaacctggcgcttctgtgaagatgagctgcaaagccagcggctacgccttcagcagctactggatcaactggatgaagcagaaacccggccagggactcgaatggatcggccaaatctatcccggcgacggcgacaccaactacaacggcaagttcaagggcagagccacactgaccgccgatacctctagcagcacagcctacatgcagctgagcagcctgaccagcgaagatagcgccgtgtacttctgtgcccggtccatcacaacagtcgtgggctgcgctatggactattggggccagggaacaagcgtgaccgtgtctagtacgcgtgaggcctctacaaagggaccctccgtgtttcctctggctcccagcagcaagtctacaagcggaggaacagccgctctgggctgcctggtcaaggattactttcccgagcctgtgaccgtgtcctggaatagcggagcactgacaagcggcgtgcacacctttccagccgtgctgcaaagcagcggcctgtactctctgagcagcgtggtcacagtgcctagctctagcctgggcacccagacctacatctgcaatgtgaaccacaagcctagcaacaccaaggtggacaagagagtggaacccaagagctgtcccatcaagaccgatgtgattacaatggaccccaaggacaactgctccaaggacgccaacgataccctgctgctccagctgaccaacaccagcgcctactacatgtacttgttgctgctgctgaagtccgtggtgtacttcgccatcatcacatgctgcctgctgcggagaaccgccttctgctgcaacggcgagaagtct

SEQ ID NO: 18140 - DNA, 2274 bp, synthetic construct
  source 1..2274: mol_type = other DNA
atggccttaccagtgaccgccttgctcctgccgctggccttgctgctccacgccgccaggccgctcgagggacagcctaaggccaatcctaccgtgacactgttccctccaagcagcgaagaactccaggccaacaaggccacacttgtgtgcctgatctccgacttctaccctggggctgtgacagtggcttggaaggccgatggatctcctgtgaaagccggcgtggaaaccaccaagccatccaagcagagcaacaacaaatacgccgccagctcctacctgagcctgacacctgagcagtggaagtcccacagatcctacagctgccaagtgacccacgaaggcagcaccgtggaaaagacagtggcccctacagagtgcagcgaagtgaaaaccgactccaccgaccacgtgaagcccaaagagacagagaacaccaagcagcccagcaagagctgccacaagcccaaggccatcgtgcacaccgagaaagtgaacatgatgagcctgaccgtgctgggcctgcggatgctgttcgccaaaaccgtggccgtgaacttcctgctgaccgccaagctgttcttcctcagggccaagcgatctggatctggagcaacaaacttctcactactcaaacaagcaggtgacgtggaggagaatcccgggcctactagcatggccttaccagtgaccgccttgctcctgccgctggccttgctgctccacgccgccaggccgttcgaaatgggcagctgggaagagttcgagctgagactgaacgccatcgaggaacggctgtatgccctcggaggatctgaagccgagctggcctacttcgagtacgtgatcgccgacttcgagggcaacctgcagcggtacaaaggcaagggcaaccctgaagtggaagccctgtacttcgaggccgacgccatcttcgaggaactggtggcctacagacacaacggtaccggcggaggcggatctggcggcggaggtagcggtggcggaggatctgaattcgacatccagatgacacagagccctagcagcctgtctgccagcgtgggagacagagtgaccatcacatgcaaggccagcgaccacatcaacaactggctggcctggtatcagcagaagcctggacaggcccctaagctgctgatctacggcgctaccacactggaaacaggcgtgcccagcagattttctggcagcggctctggcaccgactacaccctgacaatatccagcctccagcctgaggacttcgccacctactactgtcagcagagctggaacaccccttggacattcggccagggcaccaagctggaaatcaagagaggcggaggcggaagtggaggcggaggatctggcggcggaggctctcaagttcagcttcaacagcctggcgctgagctggtcaaacctggcgcttctgtgaagatgagctgcaaagccagcggctacgccttcagcagctactggatcaactggatgaagcagaaacccggccagggactcgaatggatcggccaaatctatcccggcgacggcgacaccaactacaacggcaagttcaagggcagagccacactgaccgccgatacctctagcagcacagcctacatgcagctgagcagcctgaccagcgaagatagcgccgtgtacttctgtgcccggtccatcacaacagtcgtgggctgcgctatggactattggggccagggaacaagcgtgaccgtgtctagtacgcgtgaggcctctacaaagggaccctccgtgtttcctctggctcccagcagcaagtctacaagcggaggaacagccgctctgggctgcctggtcaaggattactttcccgagcctgtgaccgtgtcctggaatagcggagcactgacaagcggcgtgcacacctttccagccgtgctgcaaagcagcggcctgtactctctgagcagcgtggtcacagtgcctagctctagcctgggcacccagacctacatctgcaatgtgaaccacaagcctagcaacaccaaggtggacaagagagtggaacccaagagctgtcccatcaagaccgatgtgattacaatggaccccaaggacaactgctccaaggacgccaacgataccctgctgctccagctgaccaacaccagcgcctactacatgtacttgttgctgctgctgaagtccgtggtgtacttcgccatcatcacatgctgcctgctgcggagaaccgccttctgctgcaacggcgagaagtct

SEQ ID NO: 18141 - DNA, 2622 bp, synthetic construct
  source 1..2622: mol_type = other DNA
atggccttaccagtgaccgccttgctcctgccgctggccttgctgctccacgccgccaggccgctcgaggaggcctctacaaagggaccctccgtgtttcctctggctcccagcagcaagtctacaagcggaggaacagccgctctgggctgcctggtcaaggattactttcccgagcctgtgaccgtgtcctggaatagcggagcactgacaagcggcgtgcacacctttccagccgtgctgcaaagcagcggcctgtactctctgagcagcgtggtcacagtgcctagctctagcctgggcacccagacctacatctgcaatgtgaaccacaagcctagcaacaccaaggtggacaagagagtggaacccaagagctgtggcagagccgattgcggctttaccagcgagagctaccagcagggcgtgctgagcgccaccatcctgtacgagatcctgctgggcaaggccaccctgtacgccgtgctggtgtctgccctggtgctgatggctatggtcaagcggaaggacagccggggaagggccaagcgatctggatctggagcaacaaacttctcactactcaaacaagcaggtgacgtggaggagaatcccgggcctactagcatggccttaccagtgaccgccttgctcctgccgctggccttgctgctccacgccgccaggccggacatccagatgacacagactacatcctccctgtctgcctctctgggagacagagtcaccatcagttgcagggcaagtcaggacattagtaaatatttaaattggtatcagcagaaaccagatggaactgttaaactcctgatctaccatacatcaagattacactcaggagtcccatcaaggttcagtggcagtgggtctggaacagattattctctcaccattagcaacctggagcaagaagatattgccacttacttttgccaacagggtaatacgcttccgtacacgttcggaggggggaccaagctggagatcacaggtggcggtggctcgggcggtggtgggtcgggtggcggcggatctgaggtgaaactgcaggagtcaggacctggcctggtggcgccctcacagagcctgtccgtcacatgcactgtctcaggggtctcattacccgactatggtgtaagctggattcgccagcctccacgaaagggtctggagtggctgggagtaatatggggtagtgaaaccacatactataattcagctctcaaatccagactgaccatcatcaaggacaactccaagagccaagttttcttaaaaatgaacagtctgcaaactgatgacacagccatttactactgtgccaaacattattactacggtggtagctatgctatggactactggggtcaaggaacctcagtcaccgtctcctcaacgcgtggacagcctaaggccaatcctaccgtgacactgttccctccaagcagcgaagaactccaggccaacaaggccacacttgtgtgcctgatctccgacttctaccctggggctgtgacagtggcttggaaggccgatggatctcctgtgaaagccggcgtggaaaccaccaagccatccaagcagagcaacaacaaatacgccgccagctcctacctgagcctgacacctgagcagtggaagtcccacagatcctacagctgccaagtgacccacgaaggcagcaccgtggaaaagacagtggcccctacagagtgcagcatccccgaggacacattcttcccaagccccgagagcagctgcgacgtgaagctggtggaaaagagcttcgagacagacaccaacctgaacttccagaacctgagcgtgatcggcttcagaatcctgctgctgaaagtggccggctttaacctgctgatgaccctgcggctgtggtccagccgcgccaagagaagcggatctggcgtgaagcagaccctgaatttcgacctgctgaagctggctggcgacgtggaatccaacccaggcccttctagaggccatatgaccgagtacaagcccacggtgcgcctcgccacccgcgacgacgtccccagggccgtacgcaccctcgccgccgcgttcgccgactaccccgccacgcgccacaccgtcgatccggaccgccacatcgagcgggtcaccgagctgcaagaactcttcctcacgcgcgtcgggctcgacatcggcaaggtgtgggtcgcggacgacggcgccgcggtggcggtctggaccacgccggagagcgtcgaagcgggggcggtgttcgccgagatcggcccgcgcatggccgagttgagcggttcccggctggccgcgcagcaacagatggaaggcctcctggcgccgcaccggcccaaggagcccgcgtggttcctggccaccgtcggcgtctcgcccgaccaccagggcaagggtctgggcagcgccgtcgtgctccccggagtggaggcggccgagcgcgccggggtgcccgccttcctggagacctccgcgccccgcaacctccccttctacgagcggctcggcttcaccgtcaccgccgacgtcgaggtgcccgaaggaccgcgcacctggtgcatgacccgcaagcccggtgcctga

SEQ ID NO: 18142 - DNA, 2625 bp, synthetic construct
  source 1..2625: mol_type = other DNA
atggccttaccagtgaccgccttgctcctgccgctggccttgctgctccacgccgccaggccgctcgaggaggcctctacaaagggaccctccgtgtttcctctggctcccagcagcaagtctacaagcggaggaacagccgctctgggctgcctggtcaaggattactttcccgagcctgtgaccgtgtcctggaatagcggagcactgacaagcggcgtgcacacctttccagccgtgctgcaaagcagcggcctgtactctctgagcagcgtggtcacagtgcctagctctagcctgggcacccagacctacatctgcaatgtgaaccacaagcctagcaacaccaaggtggacaagagagtggaacccaagagctgtggcagagccgattgcggctttaccagcgagagctaccagcagggcgtgctgagcgccaccatcctgtacgagatcctgctgggcaaggccaccctgtacgccgtgctggtgtctgccctggtgctgatggctatggtcaagcggaaggacagccggggaagggccaagcgatctggatctggagcaacaaacttctcactactcaaacaagcaggtgacgtggaggagaatcccgggcctactagcaccatggccttaccagtgaccgccttgctcctgccgctggccttgctgctccacgccgccaggccggagatcgtgatgacccagagccctgccaccctgtctctgagccctggcgaaagagccaccctgagctgtagagccagccaggacatcagcaagtacctgaactggtatcagcagaagcccggccaggcccccagactgctgatctaccacaccagcagactgcacagcggcatccccgccagattttctggctctggcagcggcaccgactacaccctgacaatcagcagcctccagcccgaggacttcgccgtgtacttctgtcagcaaggcaacaccctgccctacaccttcggccagggcaccaagctggaaatcaagggcggaggcggaagtggaggcggaggatctggcggcggaggctctcaggtgcaactccaggaatctggccctggcctcgtgaagcccagcgagacactgagcctgacctgtaccgtgtccggcgtgtccctgcctgactatggcgtgtcctggatcagacagccccctggcaagggcctggaatggatcggagtgatttggggcagcgaaaccacctactacaacagctccctgaagtccagagtgaccatctccaaggacaactccaagaaccaggtgtccctgaagctgagcagcgtgacagccgccgacaccgccgtgtattactgcgccaagcactactactacggcggcagctacgctatggactactggggccagggaaccctcgtgaccgtgtctagtacgcgtggacagcctaaggccaatcctaccgtgacactgttccctccaagcagcgaagaactccaggccaacaaggccacacttgtgtgcctgatctccgacttctaccctggggctgtgacagtggcttggaaggccgatggatctcctgtgaaagccggcgtggaaaccaccaagccatccaagcagagcaacaacaaatacgccgccagctcctacctgagcctgacacctgagcagtggaagtcccacagatcctacagctgccaagtgacccacgaaggcagcaccgtggaaaagacagtggcccctacagagtgcagcatccccgaggacacattcttcccaagccccgagagcagctgcgacgtgaagctggtggaaaagagcttcgagacagacaccaacctgaacttccagaacctgagcgtgatcggcttcagaatcctgctgctgaaagtggccggctttaacctgctgatgaccctgcggctgtggtccagccgcgccaagagaagcggatctggcgtgaagcagaccctgaatttcgacctgctgaagctggctggcgacgtggaatccaacccaggcccttctagaggccatatgaccgagtacaagcccacggtgcgcctcgccacccgcgacgacgtccccagggccgtacgcaccctcgccgccgcgttcgccgactaccccgccacgcgccacaccgtcgatccggaccgccacatcgagcgggtcaccgagctgcaagaactcttcctcacgcgcgtcgggctcgacatcggcaaggtgtgggtcgcggacgacggcgccgcggtggcggtctggaccacgccggagagcgtcgaagcgggggcggtgttcgccgagatcggcccgcgcatggccgagttgagcggttcccggctggccgcgcagcaacagatggaaggcctcctggcgccgcaccggcccaaggagcccgcgtggttcctggccaccgtcggcgtctcgcccgaccaccagggcaagggtctgggcagcgccgtcgtgctccccggagtggaggcggccgagcgcgccggggtgcccgccttcctggagacctccgcgccccgcaacctccccttctacgagcggctcggcttcaccgtcaccgccgacgtcgaggtgcccgaaggaccgcgcacctggtgcatgacccgcaagcccggtgcctga

SEQ ID NO: 18143 - DNA, 2628 bp, synthetic construct
  source 1..2628: mol_type = other DNA
atggccttaccagtgaccgccttgctcctgccgctggccttgctgctccacgccgccaggccgctcgaggaggcctctacaaagggaccctccgtgtttcctctggctcccagcagcaagtctacaagcggaggaacagccgctctgggctgcctggtcaaggattactttcccgagcctgtgaccgtgtcctggaatagcggagcactgacaagcggcgtgcacacctttccagccgtgctgcaaagcagcggcctgtactctctgagcagcgtggtcacagtgcctagctctagcctgggcacccagacctacatctgcaatgtgaaccacaagcctagcaacaccaaggtggacaagagagtggaacccaagagctgtggcagagccgattgcggctttaccagcgagagctaccagcagggcgtgctgagcgccaccatcctgtacgagatcctgctgggcaaggccaccctgtacgccgtgctggtgtctgccctggtgctgatggctatggtcaagcggaaggacagccggggaagggccaagcgatctggatctggagcaacaaacttctcactactcaaacaagcaggtgacgtggaggagaatcccgggcctactagcaccatggccttaccagtgaccgccttgctcctgccgctggccttgctgctccacgccgccaggccggacgagatcgtgctgacacagagccccgccaccctgtcactgtctccaggcgaaagagccaccctgagctgtagcgccagcagcagcgtgtcctacatgcactggtatcagcagaagcccggccaggcccccagactgctgatctacgataccagcaagctggcctccggcatccccgccagattttctggcagcggctccggcaccgacttcaccctgacaatcagcagcctggaacccgaggacgtggccgtgtactactgttttcaaggcagcgtgtaccccttcaccttcggccagggcaccaagctggaaatcaagagaggtggcggtggctcgggcggtggtgggtcgggtggcggcggatctcaggtgcagctccaggaatctggccctggcctcgtgaagcctagccagaccctgagcctgacctgtaccgtgtctggcggcagcatcagcacaagcggcatgggcgtgggctggatcagacagcaccctggcaagggcctggaatggatcggccacatttggtgggacgacgacaagcggtacaaccccgccctgaagtccagagtgaccatcagcgtggacaccagcaagaaccagttcagcctgaagctgagcagcgtgacagccgccgataccgccgtgtattattgcgcccggatggaactgtggtcctactacttcgactactggggccagggaaccctcgtgaccgtgtctagtacgcgtggacagcctaaggccaatcctaccgtgacactgttccctccaagcagcgaagaactccaggccaacaaggccacacttgtgtgcctgatctccgacttctaccctggggctgtgacagtggcttggaaggccgatggatctcctgtgaaagccggcgtggaaaccaccaagccatccaagcagagcaacaacaaatacgccgccagctcctacctgagcctgacacctgagcagtggaagtcccacagatcctacagctgccaagtgacccacgaaggcagcaccgtggaaaagacagtggcccctacagagtgcagcatccccgaggacacattcttcccaagccccgagagcagctgcgacgtgaagctggtggaaaagagcttcgagacagacaccaacctgaacttccagaacctgagcgtgatcggcttcagaatcctgctgctgaaagtggccggctttaacctgctgatgaccctgcggctgtggtccagccgcgccaagagaagcggatctggcgtgaagcagaccctgaatttcgacctgctgaagctggctggcgacgtggaatccaacccaggcccttctagaggccatatgaccgagtacaagcccacggtgcgcctcgccacccgcgacgacgtccccagggccgtacgcaccctcgccgccgcgttcgccgactaccccgccacgcgccacaccgtcgatccggaccgccacatcgagcgggtcaccgagctgcaagaactcttcctcacgcgcgtcgggctcgacatcggcaaggtgtgggtcgcggacgacggcgccgcggtggcggtctggaccacgccggagagcgtcgaagcgggggcggtgttcgccgagatcggcccgcgcatggccgagttgagcggttcccggctggccgcgcagcaacagatggaaggcctcctggcgccgcaccggcccaaggagcccgcgtggttcctggccaccgtcggcgtctcgcccgaccaccagggcaagggtctgggcagcgccgtcgtgctccccggagtggaggcggccgagcgcgccggggtgcccgccttcctggagacctccgcgccccgcaacctccccttctacgagcggctcggcttcaccgtcaccgccgacgtcgaggtgcccgaaggaccgcgcacctggtgcatgacccgcaagcccggtgcctga

SEQ ID NO: 18144 - DNA, 2616 bp, synthetic construct
  source 1..2616: mol_type = other DNA
atggccttaccagtgaccgccttgctcctgccgctggccttgctgctccacgccgccaggccgctcgaggaggcctctacaaagggaccctccgtgtttcctctggctcccagcagcaagtctacaagcggaggaacagccgctctgggctgcctggtcaaggattactttcccgagcctgtgaccgtgtcctggaatagcggagcactgacaagcggcgtgcacacctttccagccgtgctgcaaagcagcggcctgtactctctgagcagcgtggtcacagtgcctagctctagcctgggcacccagacctacatctgcaatgtgaaccacaagcctagcaacaccaaggtggacaagagagtggaacccaagagctgtggcagagccgattgcggctttaccagcgagagctaccagcagggcgtgctgagcgccaccatcctgtacgagatcctgctgggcaaggccaccctgtacgccgtgctggtgtctgccctggtgctgatggctatggtcaagcggaaggacagccggggaagggccaagcgatctggatctggagcaacaaacttctcactactcaaacaagcaggtgacgtggaggagaatcccgggcctactagcatggccttaccagtgaccgccttgctcctgccgctggccttgctgctccacgccgccaggccggacatccagatgacacagagccctagcagcctgtctgccagcgtgggagacagagtgaccatcacctgtagagccagccaggacatcagcaactacctgaactggtatcagcagaagcccggcaaggcccctaagctgctgatctactacaccagcagactgcacagcggcgtgcccagcagattttctggctctggcagcggcaccgacttcaccctgacaatatctagcctccagcctgaggacttcgccacctactattgccagcagggcaacaccctgccttacacatttggacagggcaccaaggtggaaatcaagagaggcggaggcggaagtggaggcggaggatctggcggcggaggctctgaagtgcagctggttgaatcaggtggcggcctggttcaacctggcggatctctgagactgagctgtgccgccagcggcttcaccttcagcgactactttatgagctgggtccgacaggcccctggcaaaggacttgaatgggtcgccaccatcagcaatggcggcacctacacttactaccccgacagcgtgaagggcagattcaccatctccagagacaacagcaagaacaccctgtacctccagatgaactccctgagagccgaggacaccgccgtgtactactgcgccagattcgacggctacatcttcgactattggggccagggcaccctggtcacagtctcttctacgcgtggacagcctaaggccaatcctaccgtgacactgttccctccaagcagcgaagaactccaggccaacaaggccacacttgtgtgcctgatctccgacttctaccctggggctgtgacagtggcttggaaggccgatggatctcctgtgaaagccggcgtggaaaccaccaagccatccaagcagagcaacaacaaatacgccgccagctcctacctgagcctgacacctgagcagtggaagtcccacagatcctacagctgccaagtgacccacgaaggcagcaccgtggaaaagacagtggcccctacagagtgcagcatccccgaggacacattcttcccaagccccgagagcagctgcgacgtgaagctggtggaaaagagcttcgagacagacaccaacctgaacttccagaacctgagcgtgatcggcttcagaatcctgctgctgaaagtggccggctttaacctgctgatgaccctgcggctgtggtccagccgcgccaagagaagcggatctggcgtgaagcagaccctgaatttcgacctgctgaagctggctggcgacgtggaatccaacccaggcccttctagaggccatatgaccgagtacaagcccacggtgcgcctcgccacccgcgacgacgtccccagggccgtacgcaccctcgccgccgcgttcgccgactaccccgccacgcgccacaccgtcgatccggaccgccacatcgagcgggtcaccgagctgcaagaactcttcctcacgcgcgtcgggctcgacatcggcaaggtgtgggtcgcggacgacggcgccgcggtggcggtctggaccacgccggagagcgtcgaagcgggggcggtgttcgccgagatcggcccgcgcatggccgagttgagcggttcccggctggccgcgcagcaacagatggaaggcctcctggcgccgcaccggcccaaggagcccgcgtggttcctggccaccgtcggcgtctcgcccgaccaccagggcaagggtctgggcagcgccgtcgtgctccccggagtggaggcggccgagcgcgccggggtgcccgccttcctggagacctccgcgccccgcaacctccccttctacgagcggctcggcttcaccgtcaccgccgacgtcgaggtgcccgaaggaccgcgcacctggtgcatgacccgcaagcccggtgcctga

SEQ ID NO: 18145 - DNA, 2628 bp, synthetic construct
  source 1..2628: mol_type = other DNA
atggccttaccagtgaccgccttgctcctgccgctggccttgctgctccacgccgccaggccgctcgaggaggcctctacaaagggaccctccgtgtttcctctggctcccagcagcaagtctacaagcggaggaacagccgctctgggctgcctggtcaaggattactttcccgagcctgtgaccgtgtcctggaatagcggagcactgacaagcggcgtgcacacctttccagccgtgctgcaaagcagcggcctgtactctctgagcagcgtggtcacagtgcctagctctagcctgggcacccagacctacatctgcaatgtgaaccacaagcctagcaacaccaaggtggacaagagagtggaacccaagagctgtggcagagccgattgcggctttaccagcgagagctaccagcagggcgtgctgagcgccaccatcctgtacgagatcctgctgggcaaggccaccctgtacgccgtgctggtgtctgccctggtgctgatggctatggtcaagcggaaggacagccggggaagggccaagcgatctggatctggagcaacaaacttctcactactcaaacaagcaggtgacgtggaggagaatcccgggcctactagcatggccttaccagtgaccgccttgctcctgccgctggccttgctgctccacgccgccaggccggacatccagatgacacagagccctagcagcctgtctgccagcgtgggagacagagtgaccatcacatgcaaggccagcgaccacatcaacaactggctggcctggtatcagcagaagcctggacaggcccctaagctgctgatctacggcgctaccacactggaaacaggcgtgcccagcagattttctggcagcggctctggcaccgactacaccctgacaatatccagcctccagcctgaggacttcgccacctactactgtcagcagagctggaacaccccttggacattcggccagggcaccaagctggaaatcaagagaggcggaggcggaagtggaggcggaggatctggcggcggaggctctcaagttcagcttcaacagcctggcgctgagctggtcaaacctggcgcttctgtgaagatgagctgcaaagccagcggctacgccttcagcagctactggatcaactggatgaagcagaaacccggccagggactcgaatggatcggccaaatctatcccggcgacggcgacaccaactacaacggcaagttcaagggcagagccacactgaccgccgatacctctagcagcacagcctacatgcagctgagcagcctgaccagcgaagatagcgccgtgtacttctgtgcccggtccatcacaacagtcgtgggctgcgctatggactattggggccagggaacaagcgtgaccgtgtctagtacgcgtggacagcctaaggccaatcctaccgtgacactgttccctccaagcagcgaagaactccaggccaacaaggccacacttgtgtgcctgatctccgacttctaccctggggctgtgacagtggcttggaaggccgatggatctcctgtgaaagccggcgtggaaaccaccaagccatccaagcagagcaacaacaaatacgccgccagctcctacctgagcctgacacctgagcagtggaagtcccacagatcctacagctgccaagtgacccacgaaggcagcaccgtggaaaagacagtggcccctacagagtgcagcatccccgaggacacattcttcccaagccccgagagcagctgcgacgtgaagctggtggaaaagagcttcgagacagacaccaacctgaacttccagaacctgagcgtgatcggcttcagaatcctgctgctgaaagtggccggctttaacctgctgatgaccctgcggctgtggtccagccgcgccaagagaagcggatctggcgtgaagcagaccctgaatttcgacctgctgaagctggctggcgacgtggaatccaacccaggcccttctagaggccatatgaccgagtacaagcccacggtgcgcctcgccacccgcgacgacgtccccagggccgtacgcaccctcgccgccgcgttcgccgactaccccgccacgcgccacaccgtcgatccggaccgccacatcgagcgggtcaccgagctgcaagaactcttcctcacgcgcgtcgggctcgacatcggcaaggtgtgggtcgcggacgacggcgccgcggtggcggtctggaccacgccggagagcgtcgaagcgggggcggtgttcgccgagatcggcccgcgcatggccgagttgagcggttcccggctggccgcgcagcaacagatggaaggcctcctggcgccgcaccggcccaaggagcccgcgtggttcctggccaccgtcggcgtctcgcccgaccaccagggcaagggtctgggcagcgccgtcgtgctccccggagtggaggcggccgagcgcgccggggtgcccgccttcctggagacctccgcgccccgcaacctccccttctacgagcggctcggcttcaccgtcaccgccgacgtcgaggtgcccgaaggaccgcgcacctggtgcatgacccgcaagcccggtgcctga

SEQ ID NO: 18146 - DNA, 2634 bp, synthetic construct
  source 1..2634: mol_type = other DNA
atggccttaccagtgaccgccttgctcctgccgctggccttgctgctccacgccgccaggccgctcgaggaggcctctacaaagggaccctccgtgtttcctctggctcccagcagcaagtctacaagcggaggaacagccgctctgggctgcctggtcaaggattactttcccgagcctgtgaccgtgtcctggaatagcggagcactgacaagcggcgtgcacacctttccagccgtgctgcaaagcagcggcctgtactctctgagcagcgtggtcacagtgcctagctctagcctgggcacccagacctacatctgcaatgtgaaccacaagcctagcaacaccaaggtggacaagagagtggaacccaagagctgtggcagagccgattgcggctttaccagcgagagctaccagcagggcgtgctgagcgccaccatcctgtacgagatcctgctgggcaaggccaccctgtacgccgtgctggtgtctgccctggtgctgatggctatggtcaagcggaaggacagccggggaagggccaagcgatctggatctggagcaacaaacttctcactactcaaacaagcaggtgacgtggaggagaatcccgggcctactagcatggccttaccagtgaccgccttgctcctgccgctggccttgctgctccacgccgccaggccgcagatcgtgctgtctcagtctcctgccatcctgagcgcttccccaggcgagaaagtgaccatgacctgtagagccagcagcagcgtgtcctacatgcactggtatcagcagaagcccggcagcagccctaagccttggatctacgccaccagcaatctggcctctggcgtgccagccagattttctggctctggcagcggcaccagctacagcttcacaatcagcagagtggaagccgaggacgccgccacctactattgtcagcagtggaccttcaatcctcctaccttcggcggaggcacccggctggaaatcaaaagaacagtggctgctggcggaggcggaagtggaggcggaggatctggcggcggaggctctcaggcttatctgcaacagagcggagccgaactcgtcagacctggcgcttctgtgaagatgagctgcaaggccagcggctacaccttcaccagctataatatgcactgggtcaagcagacccctcggcagggactcgaatggatcggcggaatctatcccggcaacggcgacacctcctacaaccagaagttcaagggcaaagccacactgaccgtgggcaagagcagcagcaccgcctatatgcagctcagcagcctgaccagcgaggacagcgccgtgtacttctgcgccagatacgactacaactacgctatggactactggggccagggcaccagcgtgacagttagctctgccagcacgcgtggacagcctaaggccaatcctaccgtgacactgttccctccaagcagcgaagaactccaggccaacaaggccacacttgtgtgcctgatctccgacttctaccctggggctgtgacagtggcttggaaggccgatggatctcctgtgaaagccggcgtggaaaccaccaagccatccaagcagagcaacaacaaatacgccgccagctcctacctgagcctgacacctgagcagtggaagtcccacagatcctacagctgccaagtgacccacgaaggcagcaccgtggaaaagacagtggcccctacagagtgcagcatccccgaggacacattcttcccaagccccgagagcagctgcgacgtgaagctggtggaaaagagcttcgagacagacaccaacctgaacttccagaacctgagcgtgatcggcttcagaatcctgctgctgaaagtggccggctttaacctgctgatgaccctgcggctgtggtccagccgcgccaagagaagcggatctggcgtgaagcagaccctgaatttcgacctgctgaagctggctggcgacgtggaatccaacccaggcccttctagaggccatatgaccgagtacaagcccacggtgcgcctcgccacccgcgacgacgtccccagggccgtacgcaccctcgccgccgcgttcgccgactaccccgccacgcgccacaccgtcgatccggaccgccacatcgagcgggtcaccgagctgcaagaactcttcctcacgcgcgtcgggctcgacatcggcaaggtgtgggtcgcggacgacggcgccgcggtggcggtctggaccacgccggagagcgtcgaagcgggggcggtgttcgccgagatcggcccgcgcatggccgagttgagcggttcccggctggccgcgcagcaacagatggaaggcctcctggcgccgcaccggcccaaggagcccgcgtggttcctggccaccgtcggcgtctcgcccgaccaccagggcaagggtctgggcagcgccgtcgtgctccccggagtggaggcggccgagcgcgccggggtgcccgccttcctggagacctccgcgccccgcaacctccccttctacgagcggctcggcttcaccgtcaccgccgacgtcgaggtgcccgaaggaccgcgcacctggtgcatgacccgcaagcccggtgcctga

SEQ ID NO: 18147 - DNA, 2628 bp, synthetic construct
  source 1..2628: mol_type = other DNA
atggccttaccagtgaccgccttgctcctgccgctggccttgctgctccacgccgccaggccgctcgaggaggcctctacaaagggaccctccgtgtttcctctggctcccagcagcaagtctacaagcggaggaacagccgctctgggctgcctggtcaaggattactttcccgagcctgtgaccgtgtcctggaatagcggagcactgacaagcggcgtgcacacctttccagccgtgctgcaaagcagcggcctgtactctctgagcagcgtggtcacagtgcctagctctagcctgggcacccagacctacatctgcaatgtgaaccacaagcctagcaacaccaaggtggacaagagagtggaacccaagagctgtggcagagccgattgcggctttaccagcgagagctaccagcagggcgtgctgagcgccaccatcctgtacgagatcctgctgggcaaggccaccctgtacgccgtgctggtgtctgccctggtgctgatggctatggtcaagcggaaggacagccggggaagggccaagcgatctggatctggagcaacaaacttctcactactcaaacaagcaggtgacgtggaggagaatcccgggcctactagcatggccttaccagtgaccgccttgctcctgccgctggccttgctgctccacgccgccaggccggagatcgtgctgacacagagccctgccaccctgtctctgagccctggcgaaagagccaccctgagctgtagagccagccagagcgtgtccagctacctggcctggtatcagcagaagcccggccaggctccccggctgctgatctacgatgccagcaatagagccaccggcatccccgccagattttccggctctggcagcggcaccgacttcaccctgaccatcagctccctggaacccgaggacttcgccgtgtactactgccagcagcggagcaactggcccatcacattcggccagggcacccggctggaaatcaaaggcggaggcggaagtggaggcggaggatctggcggcggaggctctgaggtgcagcttgttgagtctggcggaggactggtgcagcccgatagaagcctgagactgtcttgtgccgccagcggcttcaccttccacgattatgccatgcactgggtccgacaggcccctggcaaaggacttgaatgggtgtccaccatctcttggaacagcggcacaatcggctacgccgactctgtgaagggcagattcaccatcagccgggacaacgccaagaacagcctgtacctccagatgaactccctgagagccgaggacacagccctgtactactgcgccaaggacatccagtacggcaactactactacggcatggacgtgtggggccagggcacaacagtgacagtctcttctacgcgtggacagcctaaggccaatcctaccgtgacactgttccctccaagcagcgaagaactccaggccaacaaggccacacttgtgtgcctgatctccgacttctaccctggggctgtgacagtggcttggaaggccgatggatctcctgtgaaagccggcgtggaaaccaccaagccatccaagcagagcaacaacaaatacgccgccagctcctacctgagcctgacacctgagcagtggaagtcccacagatcctacagctgccaagtgacccacgaaggcagcaccgtggaaaagacagtggcccctacagagtgcagcatccccgaggacacattcttcccaagccccgagagcagctgcgacgtgaagctggtggaaaagagcttcgagacagacaccaacctgaacttccagaacctgagcgtgatcggcttcagaatcctgctgctgaaagtggccggctttaacctgctgatgaccctgcggctgtggtccagccgcgccaagagaagcggatctggcgtgaagcagaccctgaatttcgacctgctgaagctggctggcgacgtggaatccaacccaggcccttctagaggccatatgaccgagtacaagcccacggtgcgcctcgccacccgcgacgacgtccccagggccgtacgcaccctcgccgccgcgttcgccgactaccccgccacgcgccacaccgtcgatccggaccgccacatcgagcgggtcaccgagctgcaagaactcttcctcacgcgcgtcgggctcgacatcggcaaggtgtgggtcgcggacgacggcgccgcggtggcggtctggaccacgccggagagcgtcgaagcgggggcggtgttcgccgagatcggcccgcgcatggccgagttgagcggttcccggctggccgcgcagcaacagatggaaggcctcctggcgccgcaccggcccaaggagcccgcgtggttcctggccaccgtcggcgtctcgcccgaccaccagggcaagggtctgggcagcgccgtcgtgctccccggagtggaggcggccgagcgcgccggggtgcccgccttcctggagacctccgcgccccgcaacctccccttctacgagcggctcggcttcaccgtcaccgccgacgtcgaggtgcccgaaggaccgcgcacctggtgcatgacccgcaagcccggtgcctga

SEQ ID NO: 18148 - DNA, 2622 bp, synthetic construct
  source 1..2622: mol_type = other DNA
atggccttaccagtgaccgccttgctcctgccgctggccttgctgctccacgccgccaggccgctcgaggaggcctctacaaagggaccctccgtgtttcctctggctcccagcagcaagtctacaagcggaggaacagccgctctgggctgcctggtcaaggattactttcccgagcctgtgaccgtgtcctggaatagcggagcactgacaagcggcgtgcacacctttccagccgtgctgcaaagcagcggcctgtactctctgagcagcgtggtcacagtgcctagctctagcctgggcacccagacctacatctgcaatgtgaaccacaagcctagcaacaccaaggtggacaagagagtggaacccaagagctgtggcagagccgattgcggctttaccagcgagagctaccagcagggcgtgctgagcgccaccatcctgtacgagatcctgctgggcaaggccaccctgtacgccgtgctggtgtctgccctggtgctgatggctatggtcaagcggaaggacagccggggaagggccaagcgatctggatctggagcaacaaacttctcactactcaaacaagcaggtgacgtggaggagaatcccgggcctactagcatggccttaccagtgaccgccttgctcctgccgctggccttgctgctccacgccgccaggccggacatccagatgacccagagccccagcagcctgtctgccagcgtgggcgacagagtgaccatcacctgtagagccagccaggacgtgaacaccgccgtggcctggtatcagcagaagcctggcaaggcccccaagctgctgatctacagcgccagcttcctggaaagcggcgtgcccagcagattcagcggaagcagaagcggcaccgacttcaccctgaccatcagctccctccagcccgaggacttcgccacctactactgccagcagcactacaccacccctcccaccttcggccagaccaaggtggaaatcaagagaggcggaggcggaagtggaggcggaggatctggcggcggaggctctgaagtgcaactggtggaatctggcggcggactggtgcagcctggcggatctctgagactgagctgtgccgccagcggcttcaacatcaaggacacctacatccactgggtgcgccaggcccctggaaagggactggaatgggtggcccggatctaccccaccaacggctacaccagatacgccgacagcgtgaagggccggttcaccatcagcgccgacaccagcaagaataccgcctacctccagatgaacagcctgcgggccgaggataccgccgtgtactactgctcaagatggggaggcgacggcttctacgctatggacgtgtggggccagggcacccttgtgaccgtgtcatctacgcgtggacagcctaaggccaatcctaccgtgacactgttccctccaagcagcgaagaactccaggccaacaaggccacacttgtgtgcctgatctccgacttctaccctggggctgtgacagtggcttggaaggccgatggatctcctgtgaaagccggcgtggaaaccaccaagccatccaagcagagcaacaacaaatacgccgccagctcctacctgagcctgacacctgagcagtggaagtcccacagatcctacagctgccaagtgacccacgaaggcagcaccgtggaaaagacagtggcccctacagagtgcagcatccccgaggacacattcttcccaagccccgagagcagctgcgacgtgaagctggtggaaaagagcttcgagacagacaccaacctgaacttccagaacctgagcgtgatcggcttcagaatcctgctgctgaaagtggccggctttaacctgctgatgaccctgcggctgtggtccagccgcgccaagagaagcggatctggcgtgaagcagaccctgaatttcgacctgctgaagctggctggcgacgtggaatccaacccaggcccttctagaggccatatgaccgagtacaagcccacggtgcgcctcgccacccgcgacgacgtccccagggccgtacgcaccctcgccgccgcgttcgccgactaccccgccacgcgccacaccgtcgatccggaccgccacatcgagcgggtcaccgagctgcaagaactcttcctcacgcgcgtcgggctcgacatcggcaaggtgtgggtcgcggacgacggcgccgcggtggcggtctggaccacgccggagagcgtcgaagcgggggcggtgttcgccgagatcggcccgcgcatggccgagttgagcggttcccggctggccgcgcagcaacagatggaaggcctcctggcgccgcaccggcccaaggagcccgcgtggttcctggccaccgtcggcgtctcgcccgaccaccagggcaagggtctgggcagcgccgtcgtgctccccggagtggaggcggccgagcgcgccggggtgcccgccttcctggagacctccgcgccccgcaacctccccttctacgagcggctcggcttcaccgtcaccgccgacgtcgaggtgcccgaaggaccgcgcacctggtgcatgacccgcaagcccggtgcctga

SEQ ID NO: 18149 - DNA, 2259 bp, synthetic construct
  source 1..2259: mol_type = other DNA
atggccttaccagtgaccgccttgctcctgccgctggccttgctgctccacgccgccaggccgctcgaggaggcctctacaaagggaccctccgtgtttcctctggctcccagcagcaagtctacaagcggaggaacagccgctctgggctgcctggtcaaggattactttcccgagcctgtgaccgtgtcctggaatagcggagcactgacaagcggcgtgcacacctttccagccgtgctgcaaagcagcggcctgtactctctgagcagcgtggtcacagtgcctagctctagcctgggcacccagacctacatctgcaatgtgaaccacaagcctagcaacaccaaggtggacaagagagtggaacccaagagctgtggcagagccgattgcggctttaccagcgagagctaccagcagggcgtgctgagcgccaccatcctgtacgagatcctgctgggcaaggccaccctgtacgccgtgctggtgtctgccctggtgctgatggctatggtcaagcggaaggacagccggggaagggccaagcgatctggatctggagcaacaaacttctcactactcaaacaagcaggtgacgtggaggagaatcccgggcctactagcatggccctgcccgtgacagccctgctgctgcctctggctctgctgctgcacgccgccagacccgatgaattcgaggtgcaactggtggaaagcggcggaggcctggtgcaggctggcggatctctgagactgagctgtgccgccagcggcatcaccttcagcatcaacacaatgggctggtacagacaggcccctggcaagcagagggaactggtggccctgatctccagcatcggcgacacctactacgccgacagcgtgaagggccggttcaccatcagccgggacaacgccaagaacaccgtgtacctccagatgaacagcctgaagcccgaggacaccgccgtgtactactgcaagcggttcagaacagccgcccagggcaccgattattggggccagggaacacaagtgaccgtgtcctctacgcgtggacagcctaaggccaatcctaccgtgacactgttccctccaagcagcgaagaactccaggccaacaaggccacacttgtgtgcctgatctccgacttctaccctggggctgtgacagtggcttggaaggccgatggatctcctgtgaaagccggcgtggaaaccaccaagccatccaagcagagcaacaacaaatacgccgccagctcctacctgagcctgacacctgagcagtggaagtcccacagatcctacagctgccaagtgacccacgaaggcagcaccgtggaaaagacagtggcccctacagagtgcagcatccccgaggacacattcttcccaagccccgagagcagctgcgacgtgaagctggtggaaaagagcttcgagacagacaccaacctgaacttccagaacctgagcgtgatcggcttcagaatcctgctgctgaaagtggccggctttaacctgctgatgaccctgcggctgtggtccagccgcgccaagagaagcggatctggcgtgaagcagaccctgaatttcgacctgctgaagctggctggcgacgtggaatccaacccaggcccttctagaggccatatgaccgagtacaagcccacggtgcgcctcgccacccgcgacgacgtccccagggccgtacgcaccctcgccgccgcgttcgccgactaccccgccacgcgccacaccgtcgatccggaccgccacatcgagcgggtcaccgagctgcaagaactcttcctcacgcgcgtcgggctcgacatcggcaaggtgtgggtcgcggacgacggcgccgcggtggcggtctggaccacgccggagagcgtcgaagcgggggcggtgttcgccgagatcggcccgcgcatggccgagttgagcggttcccggctggccgcgcagcaacagatggaaggcctcctggcgccgcaccggcccaaggagcccgcgtggttcctggccaccgtcggcgtctcgcccgaccaccagggcaagggtctgggcagcgccgtcgtgctccccggagtggaggcggccgagcgcgccggggtgcccgccttcctggagacctccgcgccccgcaacctccccttctacgagcggctcggcttcaccgtcaccgccgacgtcgaggtgcccgaaggaccgcgcacctggtgcatgacccgcaagcccggtgcctga

SEQ ID NO: 18150 - DNA, 2259 bp, synthetic construct; identical to SEQ ID NO: 18149
  source 1..2259: mol_type = other DNA

SEQ ID NO: 18151 - DNA, 3054 bp, synthetic construct
  source 1..3054: mol_type = other DNA
atggccttaccagtgaccgccttgctcctgccgctggccttgctgctccacgccgccaggccgctcgaggaggcctctacaaagggaccctccgtgtttcctctggctcccagcagcaagtctacaagcggaggaacagccgctctgggctgcctggtcaaggattactttcccgagcctgtgaccgtgtcctggaatagcggagcactgacaagcggcgtgcacacctttccagccgtgctgcaaagcagcggcctgtactctctgagcagcgtggtcacagtgcctagctctagcctgggcacccagacctacatctgcaatgtgaaccacaagcctagcaacaccaaggtggacaagagagtggaacccaagagctgtggcagagccgattgcggctttaccagcgagagctaccagcagggcgtgctgagcgccaccatcctgtacgagatcctgctgggcaaggccaccctgtacgccgtgctggtgtctgccctggtgctgatggctatggtcaagcggaaggacagccggggaagggccaagcgatctggatctggagcaacaaacttctcactactcaaacaagcaggtgacgtggaggagaatcccgggcctactagcatggccttaccagtgaccgccttgctcctgccgctggccttgctgctccacgccgccaggccgcaggtccagctcgtcgagtccggcggcggcctcgtccaggccggcgactccgtcaccctctcctgcaccgcctccggccgcaccttctcctcctacgccctcgcctggttccgccagcgccccggcaaggagcgcgagttcgtcgccggcctccgctggggcggccccaccaactacgccgactccgtcaaggaccgcttcaccatctccggcgactccgccaagcacaccatgtacctccagatgaactccctcaagcccgaggacaccgccgtctactactgcggctacaaccccggcggctgggccgtcccctcccagtacgagtacgactcctggggccagggcacccaggtcaccgtctcctccggtaccggcggaggcggatctggcggcggaggtagcggtggcggaggatctgaattcgacatccagatgacacagagccctagcagcctgtctgccagcgtgggagacagagtgaccatcacatgcaaggccagcgaccacatcaacaactggctggcctggtatcagcagaagcctggacaggcccctaagctgctgatctacggcgctaccacactggaaacaggcgtgcccagcagattttctggcagcggctctggcaccgactacaccctgacaatatccagcctccagcctgaggacttcgccacctactactgtcagcagagctggaacaccccttggacattcggccagggcaccaagctggaaatcaagagaggcggaggcggaagtggaggcggaggatctggcggcggaggctctcaagttcagcttcaacagcctggcgctgagctggtcaaacctggcgcttctgtgaagatgagctgcaaagccagcggctacgccttcagcagctactggatcaactggatgaagcagaaacccggccagggactcgaatggatcggccaaatctatcccggcgacggcgacaccaactacaacggcaagttcaagggcagagccacactgaccgccgatacctctagcagcacagcctacatgcagctgagcagcctgaccagcgaagatagcgccgtgtacttctgtgcccggtccatcacaacagtcgtgggctgcgctatggactattggggccagggaacaagcgtgaccgtgtctagtacgcgtggacagcctaaggccaatcctaccgtgacactgttccctccaagcagcgaagaactccaggccaacaaggccacacttgtgtgcctgatctccgacttctaccctggggctgtgacagtggcttggaaggccgatggatctcctgtgaaagccggcgtggaaaccaccaagccatccaagcagagcaacaacaaatacgccgccagctcctacctgagcctgacacctgagcagtggaagtcccacagatcctacagctgccaagtgacccacgaaggcagcaccgtggaaaagacagtggcccctacagagtgcagcatccccgaggacacattcttcccaagccccgagagcagctgcgacgtgaagctggtggaaaagagcttcgagacagacaccaacctgaacttccagaacctgagcgtgatcggcttcagaatcctgctgctgaaagtggccggctttaacctgctgatgaccctgcggctgtggtccagccgcgccaagagaagcggatctggcgtgaagcagaccctgaatttcgacctgctgaagctggctggcgacgtggaatccaacccaggcccttctagaggccatatgaccgagtacaagcccacggtgcgcctcgccacccgcgacgacgtccccagggccgtacgcaccctcgccgccgcgttcgccgactaccccgccacgcgccacaccgtcgatccggaccgccacatcgagcgggtcaccgagctgcaagaactcttcctcacgcgcgtcgggctcgacatcggcaaggtgtgggtcgcggacgacggcgccgcggtggcggtctggaccacgccggagagcgtcgaagcgggggcggtgttcgccgagatcggcccgcgcatggccgagttgagcggttcccggctggccgcgcagcaacagatggaaggcctcctggcgccgcaccggcccaaggagcccgcgtggttcctggccaccgtcggcgtctcgcccgaccaccagggcaagggtctgggcagcgccgtcgtgctccccggagtggaggcggccgagcgcgccggggtgcccgccttcctggagacctccgcgccccgcaacctccccttctacgagcggctcggcttcaccgtcaccgccgacgtcgaggtgcccgaaggaccgcgcacctggtgcatgacccgcaagcccggtgcctga
